(19) United States
(12) Patent Application Publication
(10) Pub. No.: US 2016/0002648 A1
(43) Pub. Date: Jan. 7, 2016

(54) GENES FOR IMPROVING NUTRIENT UPTAKE AND ABIOTIC STRESS TOLERANCE IN PLANTS

(71) Applicants: Mei GUO, Johnston, IA (US); Kevin R. HAYES, Johnston, IA (US); Brooke PETERSON-BURCH, Johnston, IA (US); Carl R. SIMMONS, Johnston, IA (US); Shoba SIVASANKAR, Johnston, IA (US); Jijun ZOU, Johnston, IA (US); PIONEER HI-BRED INTERNATIONAL INC., Johnston, IA (US)

(72) Inventors: MEI GUO, WEST DES MOINES, IA (US); KEVIN HAYES, URBANDALE, IA (US); BROOKE PETERSON-BURCH, ANKENY, IA (US); CARL SIMMONS, DES MOINES, IA (US); SOBHANA SIVASANKAR, ADEL, IA (US); JIJUN ZOU, JOHNSTON, IA (US)

(21) Appl. No.: 14/771,528

(22) PCT Filed: Mar. 3, 2014
(86) PCT No.: PCT/US14/19905

§ 371 Date: Aug. 31, 2015

Related U.S. Application Data
(60) Provisional application No. 61/776,363, filed on Mar. 11, 2013.

(51) Int. Cl. C12N 15/82; C12N 9/12; C12Q 1/68; C07K 14/415

(52) U.S. Cl. CPC C12N 15/8243; C07K 14/415; C12N 15/8273; C12N 9/12; C12N 15/8218; C12N 15/8261; C12N 15/8286; C12N 15/8274; C12Q 1/6895; C12Y 207/11025; C12Q 2600/156; C12Q 2600/13

(57) ABSTRACT

The present disclosure provides methods to increase crop yield utilizing transgenic genes controlling plant growth and yield. The specific genes can be used to increase tissue growth and abiotic stress tolerance. Plants, plant progeny, seeds and tissues created by these methods are also described. Polynucleotides encoding the sequences are provided for expression in a plant of interest. Expression cassettes, plants, plant cells, plant parts and seeds comprising the sequences of the disclosure are further provided. In specific embodiments, the polynucleotide is operably linked to a constitutive promoter.

### FIELD OF THE DISCLOSURE

[0001] The disclosure relates generally to compositions and methods for increasing crop yield.

### BACKGROUND

[0002] The domestication of many plants has correlated with dramatic increases in yield. Most phenotypic variation occurring in natural populations is continuous and is effected by multiple gene influences. The identification of specific genes responsible for the dramatic differences in yield, in domesticated plants, has become an important focus of agricultural research.

[0003] One group of genes affecting yield are the nitrogen utilization efficiency (NUE) genes. These genes have utility for improving the use of nitrogen in crop plants, especially maize. The genes can be used to alter the genetic composition of the plants rendering them more productive with current fertilizer application standards, or maintaining their productive rates with significantly reduced fertilizer input. Increased nitrogen use efficiency can result from enhanced uptake and assimilation of nitrogen fertilizer and/or the subsequent remobilization and reutilization of accumulated nitrogen reserves. Plants containing these genes can therefore be used for the enhancement of yield. Improving the nitrogen use efficiency in corn would increase corn harvestable yield per unit of input nitrogen fertilizer, both in developing nations where access to nitrogen fertilizer is limited and in developed nations were the level of nitrogen use remains high. Nitrogen utilization improvement also allows decreases in on-farm input costs, decreased use and dependence on the non-renewable energy sources required for nitrogen fertilizer production, and decreases the environmental impact of nitrogen fertilizer manufacturing and agricultural use.

[0004] Two kinds of genes have been found in plants that regulate plant growth and development. Some genes can enhance plant growth while others suppress plant growth. For example, during leaf development, growth enhancing genes are active to keep young leaves growing. When the leaf reaches full-size, the growth suppressing genes are activated to stop the leaf from further growth.

[0005] Insufficient water for optimum growth and development of crop plants is a major obstacle to consistent or increased food production worldwide. Population growth, climate change, irrigation-induced soil salinity, and loss of productive agricultural land to development are among the factors contributing to a need for crop plants which can tolerate drought. Drought stress often results in reduced yield. In maize, this yield loss results in large part from plant failure to set and fill seed in the apical portion of the ear, a phenomenon known as tip kernel abortion.

[0006] Plants are restricted to their habitats and must adjust to the prevailing environmental conditions of their surroundings. To cope with abiotic stressors in their habitats, higher plants use a variety of adaptations and plasticity with respect to gene regulation, morphogenesis and metabolism. Adaptation and defense strategies may involve the activation of genes encoding proteins important in the acclimation or defense towards different stressors including drought. Understanding and leveraging the mechanisms of abiotic stress tolerance will have a significant impact on crop productivity.

[0007] Methods are needed to enhance drought stress tolerance and to maintain or increase yield under drought conditions.

[0008] Crop yield improvements have long been sought and are an age-old problem. Crop yield enhancement has been achieved in the past, by various means, some known, most not. Continued crop yield enhancement will be challenging, demanding specific physiological improvements, such as abiotic stress, and involving more targeted specific approaches, that is, by manipulation of known sets of genes and including both transgenic and breeding approaches. Water limitations globally are the main limitation of crop yield. No prior solution is found to be sufficient to solve the problem of limited crop yield, and thus it remains an unsolved or unfulfilled problem warranting further investigation. This disclosure identifies a set of specific genes that can boost crop yield. It is expected that the main approach for crop yield improvements with these genes is via a judicious ectopic expression, and/or specific native or induced allele selections that could also achieve the yield enhancing effects. Some genes may require reduced expression or expression targeted to specific tissue(s) or developmental profiles.

[0009] The present disclosure provides methods to increase crop yield utilizing the disclosed genes controlling plant growth and yield. Plants, plant progeny, seeds and tissues created by these methods are also described.

### BRIEF SUMMARY

[0010] The disclosure relates generally to compositions and methods for increasing crop yield. Certain embodiments provide methods for enhancing growth of harvestable organs. Certain embodiments provide methods for suppressing growth of non-harvestable organs such as male flower and pollen. Certain embodiments comprise pairs of growth enhancement components and growth suppression components in which the phenotype of the plants is modified to increase harvest index and subsequently crop yield. Certain embodiments provide constructs and methods useful for restructure of plant growth and development through manipulating organ size through cell size or cell numbers.

[0011] The present disclosure presents methods to alter the genetic composition of crop plants, especially maize, so that such crops can be more productive with current fertilizer applications and/or as productive with significantly reduced fertilizer input. The utility of this disclosure is then both yield enhancement and reduced fertilizer costs with corresponding reduced impact to the environment. The genetic enhancement of the crop plant's intrinsic genetics in order to enhance nitrogen use efficiency has not been achieved by scientists in the past in any commercially viable sense. This disclosure uniquely uses a highly selected set of maize plants that has been shown to differ in aspects of nitrogen utilization. The plants were then subjected to experiments in mRNA profiling and data analysis to yield a set of genes that are useful for modification of crop plants, especially maize for enhancing nitrogen use efficiency.

[0012] Compositions and methods for controlling plant growth for increasing yield in a plant are provided. The compositions include specific gene sequences from sorghum, maize, Arabidopsis thaliana and Pichia angusta. Compositions of the disclosure comprise amino acid sequences and nucleotide sequences selected from SEQ ID NOS: 1-5105 as well as variants and fragments thereof.

[0013] Polynucleotides encoding the sequences are provided in DNA constructs for expression in a plant of interest. Expression cassettes, plants, plant cells, plant parts and seeds comprising the sequences of the disclosure are further provided. In one aspect, the polynucleotide is operably linked to a constitutive promoter. In another aspect, the polynucleotide is operably linked to a tissue-specific/tissue-preferential promoter.

[0014] Methods for modulating the level of a yield improvement sequence in a plant or plant part is provided. The methods comprise introducing into a plant or plant part a heterologous polynucleotide comprising a yield improvement sequence of the disclosure. The level of yield improvement polypeptide can be increased or decreased. Such method can be used to increase the yield in plants; in one embodiment, the method is used to increase grain yield in cereals.

[0015] Methods are provided for increasing abiotic stress in plants. More particularly, the methods of the disclosure find use in agriculture for increasing abiotic stress in dicot and monocot plants. The methods comprise introducing into a plant cell a polynucleotide that encodes a polypeptide operably linked to a promoter that drives expression in a plant.

[0016] Methods are further provided for maintaining or increasing yield in plants under drought conditions. Also provided are transformed plants, plant tissues, plant cells and seeds thereof.

### DETAILED DESCRIPTION

[0017] Methods are provided for increasing stress tolerance, particularly abiotic stress tolerance, in plants. These methods find use, for example, in increasing tolerance to drought stress and maintaining or increasing yield during drought conditions, particularly in agricultural plants.

[0018] Unless defined otherwise, all technical and scientific terms used herein have the same meaning as commonly understood by one of ordinary skill in the art to which this disclosure belongs. Unless mentioned otherwise, the techniques employed or contemplated herein are standard methodologies well known to one of ordinary skill in the art. The materials, methods and examples are illustrative only and not limiting. The following is presented by way of illustration and is not intended to limit the scope of the disclosure.

[0019] The present disclosures now will be described more fully hereinafter with reference to the accompanying drawings, in which some, but not all embodiments of the disclosure are shown. Indeed, these disclosures may be embodied in many different forms and should not be construed as limited to the embodiments set forth herein; rather, these embodiments are provided so that this disclosure will satisfy applicable legal requirements. Like numbers refer to like elements throughout.

[0020] Many modifications and other embodiments of the disclosures set forth herein will come to mind to one skilled in the art to which these disclosures pertain having the benefit of the teachings presented in the foregoing descriptions and the associated drawings. Therefore, it is to be understood that the disclosures are not to be limited to the specific embodiments disclosed and that modifications and other embodiments are intended to be included within the scope of the appended claims. Although specific terms are employed herein, they are used in a generic and descriptive sense only and not for purposes of limitation.

[0021] The practice of the present disclosure will employ, unless otherwise indicated, conventional techniques of botany, microbiology, tissue culture, molecular biology, chemistry, biochemistry and recombinant DNA technology, which are within the skill of the art. Such techniques are explained fully in the literature. See, e.g., Langenheim and Thimann, BOTANY: PLANT BIOLOGY AND ITS RELATION TO HUMAN AFFAIRS, John Wiley (1982); CELL CULTURE AND SOMATIC CELL GENETICS OF PLANTS, vol. 1, Vasil, ed. (1984); Stanier, et al., THE MICROBIAL WORLD, 5^{th} ed., Prentice-Hall (1986); Dhringra and Sinclair, BASIC PLANT PATHOLOGY METHODS, CRC Press (1985); Maniatis, et al., MOLECULAR CLONING: A LABORATORY MANUAL (1982); DNA CLONING, vols. I and II, Glover, ed. (1985); OLIGONUCLEOTIDE SYNTHESIS, Gait, ed. (1984); NUCLEIC ACID HYBRIDIZATION, Hames and Higgins, eds. (1984); and the series METHODS IN ENZYMOLOGY, Colowick and Kaplan, eds, Academic Press, Inc., San Diego, Calif.

[0022] Units, prefixes and symbols may be denoted in their SI accepted form. Unless otherwise indicated, nucleic acids are written left to right in 5′ to 3′ orientation; amino acid sequences are written left to right in amino to carboxy orientation, respectively. Numeric ranges are inclusive of the numbers defining the range. Amino acids may be referred to herein by either their commonly known three letter symbols or by the one-letter symbols recommended by the IUPAC-IUB Biochemical Nomenclature Commission. Nucleotides, likewise, may be referred to by their commonly accepted single-letter codes. The terms defined below are more fully defined by reference to the specification as a whole.

[0023] In describing the present disclosure, the following terms will be employed and are intended to be defined as indicated below.

[0024] By “microbe” is meant any microorganism (including both eukaryotic and prokaryotic microorganisms), such as fungi, yeast, bacteria, actinomycetes, algae and protozoa, as well as other unicellular structures.

[0025] By “amplified” is meant the construction of multiple copies of a nucleic acid sequence or multiple copies complementary to the nucleic acid sequence using at least one of the nucleic acid sequences as a template. Amplification systems include the polymerase chain reaction (PCR) system, ligase chain reaction (LCR) system, nucleic acid sequence based amplification (NASBA, Cangene, Mississauga, Ontario), Q-Beta Replicase systems, transcription-based amplification system (TAS), and strand displacement amplification (SDA). See, e.g., DIAGNOSTIC MOLECULAR MICROBIOLOGY: PRINCIPLES AND APPLICATIONS, Persing, et al., eds., American Society for Microbiology, Washington, D.C. (1993). The product of amplification is termed an amplicon.

[0026] The term “conservatively modified variants” applies to both amino acid and nucleic acid sequences. With respect to particular nucleic acid sequences, conservatively modified variants refer to those nucleic acids that encode identical or conservatively modified variants of the amino acid sequences. Because of the degeneracy of the genetic code, a large number of functionally identical nucleic acids encode any given protein. For instance, the codons GCA, GCC, GCG and GCU all encode the amino acid alanine. Thus, at every position where an alanine is specified by a codon, the codon can be altered to any of the corresponding codons described without altering the encoded polypeptide. Such nucleic acid variations are “silent variations” and represent one species of conservatively modified variation. Every nucleic acid sequence herein that encodes a polypeptide also describes every possible silent variation of the nucleic acid. One of ordinary skill will recognize that each codon in a nucleic acid (except AUG, which is ordinarily the only codon for methionine; one exception is Micrococcus rubens, for which GTG is the methionine codon (Ishizuka, et al., (1993) J. Gen. Microbiol. 139:425-32) can be modified to yield a functionally identical molecule. Accordingly, each silent variation of a nucleic acid, which encodes a polypeptide of the present disclosure, is implicit in each described polypeptide sequence and incorporated herein by reference.

[0027] As to amino acid sequences, one of skill will recognize that individual substitutions, deletions or additions to a nucleic acid, peptide, polypeptide or protein sequence which alters, adds or deletes a single amino acid or a small percentage of amino acids in the encoded sequence is a “conservatively modified variant” when the alteration results in the substitution of an amino acid with a chemically similar amino acid. Thus, any number of amino acid residues selected from the group of integers consisting of from 1 to 15 can be so altered. Thus, for example, 1, 2, 3, 4, 5, 7 or 10 alterations can be made. Conservatively modified variants typically provide similar biological activity as the unmodified polypeptide sequence from which they are derived. For example, substrate specificity, enzyme activity, or ligand/receptor binding is generally at least 30%, 40%, 50%, 60%, 70%, 80% or 90%, preferably 60-90% of the native protein for it's native substrate. Conservative substitution tables providing functionally similar amino acids are well known in the art.

[0028] The following six groups each contain amino acids that are conservative substitutions for one another:

[0029] 1) Alanine (A), Serine (S), Threonine (T);

[0030] 2) Aspartic acid (D), Glutamic acid (E);

[0031] 3) Asparagine (N), Glutamine (Q);

[0032] 4) Arginine (R), Lysine (K);

[0033] 5) Isoleucine (I), Leucine (L), Methionine (M), Valine (V); and

[0034] 6) Phenylalanine (F), Tyrosine (Y), Tryptophan (W).

See also, Creighton, PROTEINS, W.H. Freeman and Co. (1984).

[0035] As used herein, “consisting essentially of” means the inclusion of additional sequences to an object polynucleotide where the additional sequences do not selectively hybridize, under stringent hybridization conditions, to the same cDNA as the polynucleotide and where the hybridization conditions include a wash step in 0.1×SSC and 0.1% sodium dodecyl sulfate at 65° C.

[0036] By “encoding” or “encoded,” with respect to a specified nucleic acid, is meant comprising the information for translation into the specified protein. A nucleic acid encoding a protein may comprise non-translated sequences (e.g., introns) within translated regions of the nucleic acid, or may lack such intervening non-translated sequences (e.g., as in cDNA). The information by which a protein is encoded is specified by the use of codons. Typically, the amino acid sequence is encoded by the nucleic acid using the “universal” genetic code. However, variants of the universal code, such as is present in some plant, animal and fungal mitochondria, the bacterium Mycoplasma capricolum (Yamao, et al., (1985) Proc. Natl. Acad. Sci. USA 82:2306-9) or the ciliate Macronucleus, may be used when the nucleic acid is expressed using these organisms.

[0037] When the nucleic acid is prepared or altered synthetically, advantage can be taken of known codon preferences of the intended host where the nucleic acid is to be expressed. For example, although nucleic acid sequences of the present disclosure may be expressed in both monocotyledonous and dicotyledonous plant species, sequences can be modified to account for the specific codon preferences and GC content preferences of monocotyledonous plants or dicotyledonous plants as these preferences have been shown to differ (Murray, et al., (1989) Nucleic Acids Res. 17:477-98, herein incorporated by reference). Thus, the maize preferred codon for a particular amino acid might be derived from known gene sequences from maize. Maize codon usage for 28 genes from maize plants is listed in Table 4 of Murray, et al., supra.

[0038] As used herein, “heterologous” in reference to a nucleic acid is a nucleic acid that originates from a foreign species, or, if from the same species, is substantially modified from its native form in composition and/or genomic locus by deliberate human intervention. For example, a promoter operably linked to a heterologous structural gene is from a species different from that from which the structural gene was derived or, if from the same species, one or both are substantially modified from their original form. A heterologous protein may originate from a foreign species or, if from the same species, is substantially modified from its original form by deliberate human intervention.

[0039] By “host cell” is meant a cell, which contains a vector and supports the replication and/or expression of the expression vector. Host cells may be prokaryotic cells such as E. coli, or eukaryotic cells such as yeast, insect, plant, amphibian or mammalian cells. Preferably, host cells are monocotyledonous or dicotyledonous plant cells, including but not limited to maize, sorghum, sunflower, soybean, wheat, alfalfa, rice, cotton, canola, barley, millet and tomato. A particularly preferred monocotyledonous host cell is a maize host cell.

[0040] The term “hybridization complex” includes reference to a duplex nucleic acid structure formed by two single-stranded nucleic acid sequences selectively hybridized with each other.

[0041] The term “introduced” in the context of inserting a nucleic acid into a cell, means “transfection” or “transformation” or “transduction” and includes reference to the incorporation of a nucleic acid into a eukaryotic or prokaryotic cell where the nucleic acid may be incorporated into the genome of the cell (e.g., chromosome, plasmid, plastid or mitochondrial DNA), converted into an autonomous replicon, or transiently expressed (e.g., transfected mRNA).

[0042] The terms “isolated” refers to material, such as a nucleic acid or a protein, which is substantially or essentially free from components which normally accompany or interact with it as found in its naturally occurring environment. The isolated material optionally comprises material not found with the material in its natural environment. Nucleic acids, which are “isolated”, as defined herein, are also referred to as “heterologous” nucleic acids. Unless otherwise stated, the term “yield improvement nucleic acid” means a nucleic acid comprising a polynucleotide (“yield improvement polynucleotide”) encoding a yield improvement polypeptide. The term “Growth Enhancement gene” means a gene that when expressed can increase cell numbers, cell size and dry matter accumulation, resulting in increased organ size, numbers and dry weight. On the opposite, the term “Growth suppression gene” means a gene when expressed can decrease or inhibit cell numbers, cell size and dry matter accumulation, resulting in decreased organ size, numbers and dry weight. The term “yield improvement gene” may include both “Growth Enhancer gene” and “Growth suppressor gene”.

[0043] As used herein, “nucleic acid” includes reference to a deoxyribonucleotide or ribonucleotide polymer in either single- or double-stranded form, and unless otherwise limited, encompasses known analogues having the essential nature of natural nucleotides in that they hybridize to single-stranded nucleic acids in a manner similar to naturally occurring nucleotides (e.g., peptide nucleic acids).

[0044] By “nucleic acid library” is meant a collection of isolated DNA or RNA molecules, which comprise and substantially represent the entire transcribed fraction of a genome of a specified organism. Construction of exemplary nucleic acid libraries, such as genomic and cDNA libraries, is taught in standard molecular biology references such as Berger and Kimmel, GUIDE TO MOLECULAR CLONING TECHNIQUES, from the series METHODS IN ENZYMOLOGY, vol. 152, Academic Press, Inc., San Diego, Calif. (1987); Sambrook, et al., MOLECULAR CLONING: A LABORATORY MANUAL, 2^{nd} ed., vols. 1-3 (1989); and CURRENT PROTOCOLS IN MOLECULAR BIOLOGY, Ausubel, et al., eds, Current Protocols, a joint venture between Greene Publishing Associates, Inc. and John Wiley & Sons, Inc. (1994 Supplement).

[0045] As used herein “operably linked” includes reference to a functional linkage between a first sequence, such as a promoter and a second sequence, wherein the promoter sequence initiates and mediates transcription of the DNA sequence corresponding to the second sequence. Generally, operably linked means that the nucleic acid sequences being linked are contiguous and, where necessary to join two protein coding regions, contiguous and in the same reading frame.

[0046] As used herein, the term “plant” includes reference to whole plants, plant organs (e.g., leaves, stems, roots, etc.), seeds and plant cells and progeny of same. Plant cell, as used herein includes, without limitation, seeds suspension cultures, embryos, meristematic regions, callus tissue, leaves, roots, shoots, gametophytes, sporophytes, pollen and microspores. The class of plants, which can be used in the methods of the disclosure, is generally as broad as the class of higher plants amenable to transformation techniques, including both monocotyledonous and dicotyledonous plants including species from the genera: Cucurbita, Rosa, Vitis, Juglans, Fragaria, Lotus, Medicago, Onobrychis, Trifolium, Trigonella, Vigna, Citrus, Linum, Geranium, Manihot, Daucus, Arabidopsis, Brassica, Raphanus, Sinapis, Atropa, Capsicum, Datura, Hyoscyamus, Lycopersicon, Nicotiana, Solanum, Petunia, Digitalis, Majorana, Ciahorium, Helianthus, Lactuca, Bromus, Asparagus, Antirrhinum, Heterocallis, Nemesis, Pelargonium, Panieum, Pennisetum, Ranunculus, Senecio, Salpiglossis, Cucumis, Browaalia, Glycine, Pisum, Phaseolus, Lolium, Oryza, Avena, Hordeum, Secale, Allium and Triticum. A particularly preferred plant is Zea mays.

[0047] As used herein, “yield” includes reference to bushels per acre of a grain crop at harvest, as adjusted for grain moisture (15% typically). Grain moisture is measured in the grain at harvest. The adjusted test weight of grain is determined to be the weight in pounds per bushel, adjusted for grain moisture level at harvest.

[0048] As used herein, “polynucleotide” includes reference to a deoxyribopolynucleotide, ribopolynucleotide or analogs thereof that have the essential nature of a natural ribonucleotide in that they hybridize, under stringent hybridization conditions, to substantially the same nucleotide sequence as naturally occurring nucleotides and/or allow translation into the same amino acid(s) as the naturally occurring nucleotide(s). A polynucleotide can be full-length or a subsequence of a native or heterologous structural or regulatory gene. Unless otherwise indicated, the term includes reference to the specified sequence as well as the complementary sequence thereof. Thus, DNAs or RNAs with backbones modified for stability or for other reasons are “polynucleotides” as that term is intended herein. Moreover, DNAs or RNAs comprising unusual bases, such as inosine, or modified bases, such as tritylated bases, to name just two examples, are polynucleotides as the term is used herein. It will be appreciated that a great variety of modifications have been made to DNA and RNA that serve many useful purposes known to those of skill in the art. The term polynucleotide as it is employed herein embraces such chemically, enzymatically or metabolically modified forms of polynucleotides, as well as the chemical forms of DNA and RNA characteristic of viruses and cells, including inter alia, simple and complex cells.

[0049] The terms “polypeptide,” “peptide” and “protein” are used interchangeably herein to refer to a polymer of amino acid residues. The terms apply to amino acid polymers in which one or more amino acid residue is an artificial chemical analogue of a corresponding naturally occurring amino acid, as well as to naturally occurring amino acid polymers.

[0050] As used herein “promoter” includes reference to a region of DNA upstream from the start of transcription and involved in recognition and binding of RNA polymerase and other proteins to initiate transcription. A “plant promoter” is a promoter capable of initiating transcription in plant cells. Exemplary plant promoters include, but are not limited to, those that are obtained from plants, plant viruses and bacteria which comprise genes expressed in plant cells such Agrobacterium or Rhizobium. Examples are promoters that preferentially initiate transcription in certain tissues, such as leaves, roots, seeds, fibres, xylem vessels, tracheids or sclerenchyma. Such promoters are referred to as “tissue preferred.” A “cell type” specific promoter primarily drives expression in certain cell types in one or more organs, for example, vascular cells in roots or leaves. An “inducible” or “regulatable” promoter is a promoter, which is under environmental control. Examples of environmental conditions that may affect transcription by inducible promoters include anaerobic conditions or the presence of light. Another type of promoter is a developmentally regulated promoter, for example, a promoter that drives expression during pollen development. Tissue preferred, cell type specific, developmentally regulated, and inducible promoters constitute the class of “non-constitutive” promoters. A “constitutive” promoter is a promoter, which is active under most environmental conditions.

[0051] The term “yield improvement polypeptide” refers to one or more amino acid sequences. The term is also inclusive of fragments, variants, homologs, alleles or precursors (e.g., preproproteins or proproteins) thereof. A “yield improvement protein” comprises a yield improvement polypeptide. Unless otherwise stated, the term “yield improvement nucleic acid” means a nucleic acid comprising a polynucleotide (“yield improvement polynucleotide”) encoding a yield improvement polypeptide.

[0052] As used herein “recombinant” includes reference to a cell or vector, that has been modified by the introduction of a heterologous nucleic acid or that the cell is derived from a cell so modified. Thus, for example, recombinant cells express genes that are not found in identical form within the native (non-recombinant) form of the cell or express native genes that are otherwise abnormally expressed, under expressed or not expressed at all as a result of deliberate human intervention. The term “recombinant” as used herein does not encompass the alteration of the cell or vector by naturally occurring events (e.g., spontaneous mutation, natural transformation/transduction/transposition) such as those occurring without deliberate human intervention.

[0053] As used herein, a “recombinant expression cassette” is a nucleic acid construct, generated recombinantly or synthetically, with a series of specified nucleic acid elements, which permit transcription of a particular nucleic acid in a target cell. The recombinant expression cassette can be incorporated into a plasmid, chromosome, mitochondrial DNA, plastid DNA, virus or nucleic acid fragment. Typically, the recombinant expression cassette portion of an expression vector includes, among other sequences, a nucleic acid to be transcribed and a promoter.

[0054] The terms “residue” or “amino acid residue” or “amino acid” are used interchangeably herein to refer to an amino acid that is incorporated into a protein, polypeptide, or peptide (collectively “protein”). The amino acid may be a naturally occurring amino acid and, unless otherwise limited, may encompass known analogs of natural amino acids that can function in a similar manner as naturally occurring amino acids.

[0055] The term “selectively hybridizes” includes reference to hybridization, under stringent hybridization conditions, of a nucleic acid sequence to a specified nucleic acid target sequence to a detectably greater degree (e.g., at least 2-fold over background) than its hybridization to non-target nucleic acid sequences and to the substantial exclusion of non-target nucleic acids. Selectively hybridizing sequences typically have about at least 40% sequence identity, preferably 60-90% sequence identity and most preferably 100% sequence identity (i.e., complementary) with each other.

[0056] The terms “stringent conditions” or “stringent hybridization conditions” include reference to conditions under which a probe will hybridize to its target sequence, to a detectably greater degree than other sequences (e.g., at least 2-fold over background).

[0057] Stringent conditions are sequence-dependent and will be different in different circumstances. By controlling the stringency of the hybridization and/or washing conditions, target sequences can be identified which can be up to 100% complementary to the probe (homologous probing). Alternatively, stringency conditions can be adjusted to allow some mismatching in sequences so that lower degrees of similarity are detected (heterologous probing). Optimally, the probe is approximately 500 nucleotides in length, but can vary greatly in length from less than 500 nucleotides to equal to the entire length of the target sequence.

[0058] Typically, stringent conditions will be those in which the salt concentration is less than about 1.5 M Na ion, typically about 0.01 to 1.0 M Na ion concentration (or other salts) at pH 7.0 to 8.3 and the temperature is at least about 30° C. for short probes (e.g., 10 to 50 nucleotides) and at least about 60° C. for long probes (e.g., greater than 50 nucleotides). Stringent conditions may also be achieved with the addition of destabilizing agents such as formamide or Denhardt's. Exemplary low stringency conditions include hybridization with a buffer solution of 30 to 35% formamide, 1 M NaCl, 1% SDS (sodium dodecyl sulphate) at 37° C., and a wash in 1× to 2×SSC (20×SSC=3.0 M NaCl/0.3 M trisodium citrate) at 50 to 55° C. Exemplary moderate stringency conditions include hybridization in 40 to 45% formamide, 1 M NaCl, 1% SDS at 37° C. and a wash in 0.5× to 1×SSC at 55 to 60° C. Exemplary high stringency conditions include hybridization in 50% formamide, 1 M NaCl, 1% SDS at 37° C. and a wash in 0.1×SSC at 60 to 65° C. Specificity is typically the function of post-hybridization washes, the critical factors being the ionic strength and temperature of the final wash solution. For DNA-DNA hybrids, the Tₘ can be approximated from the equation of Meinkoth and Wahl, (1984) Anal. Biochem. 138:267-84: Tₘ=81.5° C.+16.6 (log M)+0.41 (% GC)−0.61 (% form)−500/L; where M is the molarity of monovalent cations, % GC is the percentage of guanosine and cytosine nucleotides in the DNA, % form is the percentage of formamide in the hybridization solution and L is the length of the hybrid in base pairs. The Tₘ is the temperature (under defined ionic strength and pH) at which 50% of a complementary target sequence hybridizes to a perfectly matched probe. Tₘ is reduced by about 1° C. for each 1% of mismatching; thus, Tₘ, hybridization and/or wash conditions can be adjusted to hybridize to sequences of the desired identity. For example, if sequences with ≧90% identity are sought, the Tₘ can be decreased 10° C. Generally, stringent conditions are selected to be about 5° C. lower than the thermal melting point (Tₘ) for the specific sequence and its complement at a defined ionic strength and pH. However, severely stringent conditions can utilize a hybridization and/or wash at 1, 2, 3 or 4° C. lower than the thermal melting point (Tₘ); moderately stringent conditions can utilize a hybridization and/or wash at 6, 7, 8, 9 or 10° C. lower than the thermal melting point (Tₘ); low stringency conditions can utilize a hybridization and/or wash at 11, 12, 13, 14, 15 or 20° C. lower than the thermal melting point (Tₘ). Using the equation, hybridization and wash compositions, and desired Tₘ, those of ordinary skill will understand that variations in the stringency of hybridization and/or wash solutions are inherently described. If the desired degree of mismatching results in a Tₘ, of less than 45° C. (aqueous solution) or 32° C. (formamide solution) it is preferred to increase the SSC concentration so that a higher temperature can be used. An extensive guide to the hybridization of nucleic acids is found in Tijssen, LABORATORY TECHNIQUES IN BIOCHEMISTRY AND MOLECULAR BIOLOGY—HYBRIDIZATION WITH NUCLEIC ACID PROBES, part I, chapter 2, “Overview of principles of hybridization and the strategy of nucleic acid probe assays,” Elsevier, New York (1993) and CURRENT PROTOCOLS IN MOLECULAR BIOLOGY, chapter 2, Ausubel, et al., eds, Greene Publishing and Wiley-Interscience, New York (1995). Unless otherwise stated, in the present application high stringency is defined as hybridization in 4×SSC, 5×Denhardt's (5 g Ficoll, 5 g polyvinypyrrolidone, 5 g bovine serum albumin in 500 ml of water), 0.1 mg/ml boiled salmon sperm DNA, and 25 mM Na phosphate at 65° C., and a wash in 0.1×SSC, 0.1% SDS at 65° C.

[0059] As used herein, “transgenic plant” includes reference to a plant, which comprises within its genome a heterologous polynucleotide. Generally, the heterologous polynucleotide is stably integrated within the genome such that the polynucleotide is passed on to successive generations. The heterologous polynucleotide may be integrated into the genome alone or as part of a recombinant expression cassette. “Transgenic” is used herein to include any cell, cell line, callus, tissue, plant part or plant, the genotype of which has been altered by the presence of heterologous nucleic acid including those transgenics initially so altered as well as those created by sexual crosses or asexual propagation from the initial transgenic. The term “transgenic” as used herein does not encompass the alteration of the genome (chromosomal or extra-chromosomal) by conventional plant breeding methods or by naturally occurring events such as random cross-fertilization, non-recombinant viral infection, non-recombinant bacterial transformation, non-recombinant transposition or spontaneous mutation.

[0060] As used herein, “vector” includes reference to a nucleic acid used in transfection of a host cell and into which can be inserted a polynucleotide. Vectors are often replicons. Expression vectors permit transcription of a nucleic acid inserted therein.

[0061] The following terms are used to describe the sequence relationships between two or more nucleic acids or polynucleotides or polypeptides: (a) “reference sequence,” (b) “comparison window,” (c) “sequence identity,” (d) “percentage of sequence identity” and (e) “substantial identity.”

[0062] As used herein, “reference sequence” is a defined sequence used as a basis for sequence comparison. A reference sequence may be a subset or the entirety of a specified sequence; for example, as a segment of a full-length cDNA or gene sequence or the complete cDNA or gene sequence.

[0063] As used herein, “comparison window” means includes reference to a contiguous and specified segment of a polynucleotide sequence, wherein the polynucleotide sequence may be compared to a reference sequence and wherein the portion of the polynucleotide sequence in the comparison window may comprise additions or deletions (i.e., gaps) compared to the reference sequence (which does not comprise additions or deletions) for optimal alignment of the two sequences. Generally, the comparison window is at least 20 contiguous nucleotides in length, and optionally can be 30, 40, 50, 100 or longer. Those of skill in the art understand that to avoid a high similarity to a reference sequence due to inclusion of gaps in the polynucleotide sequence a gap penalty is typically introduced and is subtracted from the number of matches.

[0064] Methods of alignment of nucleotide and amino acid sequences for comparison are well known in the art. The local homology algorithm (BESTFIT) of Smith and Waterman, (1981) Adv. Appl. Math 2:482, may conduct optimal alignment of sequences for comparison; by the homology alignment algorithm (GAP) of Needleman and Wunsch, (1970) J. Mol. Biol. 48:443-53; by the search for similarity method (Tfasta and Fasta) of Pearson and Lipman, (1988) Proc. Natl. Acad. Sci. USA 85:2444; by computerized implementations of these algorithms, including, but not limited to: CLUSTAL in the PC/Gene program by Intelligenetics, Mountain View, Calif., GAP, BESTFIT, BLAST, FASTA, and TFASTA in the Wisconsin Genetics Software Package®, Version 8 (available from Genetics Computer Group (GCG® programs (Accelrys, Inc., San Diego, Calif.)). The CLUSTAL program is well described by Higgins and Sharp, (1988) Gene 73:237-44; Higgins and Sharp, (1989) CABIOS 5:151-3; Corpet, et al., (1988) Nucleic Acids Res. 16:10881-90; Huang, et al., (1992) Computer Applications in the Biosciences 8:155-65 and Pearson, et al., (1994) Meth. Mol. Biol. 24:307-31. The preferred program to use for optimal global alignment of multiple sequences is PileUp (Feng and Doolittle, (1987) J. Mol. Evol., 25:351-60 which is similar to the method described by Higgins and Sharp, (1989) CABIOS 5:151-53 and hereby incorporated by reference). The BLAST family of programs which can be used for database similarity searches includes: BLASTN for nucleotide query sequences against nucleotide database sequences; BLASTX for nucleotide query sequences against protein database sequences; BLASTP for protein query sequences against protein database sequences; TBLASTN for protein query sequences against nucleotide database sequences; and TBLASTX for nucleotide query sequences against nucleotide database sequences. See CURRENT PROTOCOLS IN MOLECULAR BIOLOGY, Chapter 19, Ausubel, et al., eds., Greene Publishing and Wiley-Interscience, New York (1995).

[0065] GAP uses the algorithm of Needleman and Wunsch, supra, to find the alignment of two complete sequences that maximizes the number of matches and minimizes the number of gaps. GAP considers all possible alignments and gap positions and creates the alignment with the largest number of matched bases and the fewest gaps. It allows for the provision of a gap creation penalty and a gap extension penalty in units of matched bases. GAP must make a profit of gap creation penalty number of matches for each gap it inserts. If a gap extension penalty greater than zero is chosen, GAP must, in addition, make a profit for each gap inserted of the length of the gap times the gap extension penalty. Default gap creation penalty values and gap extension penalty values in Version 10 of the Wisconsin Genetics Software Package® are 8 and 2, respectively. The gap creation and gap extension penalties can be expressed as an integer selected from the group of integers consisting of from 0 to 100. Thus, for example, the gap creation and gap extension penalties can be 0, 1, 2, 3, 4, 5, 6, 7, 8, 9, 10, 15, 20, 30, 40, 50 or greater.

[0066] GAP presents one member of the family of best alignments. There may be many members of this family, but no other member has a better quality. GAP displays four figures of merit for alignments: Quality, Ratio, Identity and Similarity. The Quality is the metric maximized in order to align the sequences. Ratio is the quality divided by the number of bases in the shorter segment. Percent Identity is the percent of the symbols that actually match. Percent Similarity is the percent of the symbols that are similar. Symbols that are across from gaps are ignored. A similarity is scored when the scoring matrix value for a pair of symbols is greater than or equal to 0.50, the similarity threshold. The scoring matrix used in Version 10 of the Wisconsin Genetics Software Package® is BLOSUM62 (see, Henikoff and Henikoff, (1989) Proc. Natl. Acad. Sci. USA 89:10915).

[0067] Unless otherwise stated, sequence identity/similarity values provided herein refer to the value obtained using the BLAST 2.0 suite of programs using default parameters (Altschul, et al., (1997) Nucleic Acids Res. 25:3389-402).

[0068] As those of ordinary skill in the art will understand, BLAST searches assume that proteins can be modeled as random sequences. However, many real proteins comprise regions of nonrandom sequences, which may be homopolymeric tracts, short-period repeats or regions enriched in one or more amino acids. Such low-complexity regions may be aligned between unrelated proteins even though other regions of the protein are entirely dissimilar. A number of low-complexity filter programs can be employed to reduce such low-complexity alignments. For example, the SEG (Wooten and Federhen, (1993) Comput. Chem. 17:149-63) and XNU (Claverie and States, (1993) Comput. Chem. 17:191-201) low-complexity filters can be employed alone or in combination.

[0069] As used herein, “sequence identity” or “identity” in the context of two nucleic acid or polypeptide sequences includes reference to the residues in the two sequences, which are the same when aligned for maximum correspondence over a specified comparison window. When percentage of sequence identity is used in reference to proteins it is recognized that residue positions which are not identical often differ by conservative amino acid substitutions, where amino acid residues are substituted for other amino acid residues with similar chemical properties (e.g., charge or hydrophobicity) and therefore do not change the functional properties of the molecule. Where sequences differ in conservative substitutions, the percent sequence identity may be adjusted upwards to correct for the conservative nature of the substitution. Sequences, which differ by such conservative substitutions, are said to have “sequence similarity” or “similarity.” Means for making this adjustment are well known to those of skill in the art. Typically this involves scoring a conservative substitution as a partial rather than a full mismatch, thereby increasing the percentage sequence identity. Thus, for example, where an identical amino acid is given a score of 1 and a non-conservative substitution is given a score of zero, a conservative substitution is given a score between zero and 1. The scoring of conservative substitutions is calculated, e.g., according to the algorithm of Meyers and Miller, (1988) Computer Applic. Biol. Sci. 4:11-17, e.g., as implemented in the program PC/GENE (Intelligenetics, Mountain View, Calif., USA).

[0070] As used herein, “percentage of sequence identity” means the value determined by comparing two optimally aligned sequences over a comparison window, wherein the portion of the polynucleotide sequence in the comparison window may comprise additions or deletions (i.e., gaps) as compared to the reference sequence (which does not comprise additions or deletions) for optimal alignment of the two sequences. The percentage is calculated by determining the number of positions at which the identical nucleic acid base or amino acid residue occurs in both sequences to yield the number of matched positions, dividing the number of matched positions by the total number of positions in the window of comparison and multiplying the result by 100 to yield the percentage of sequence identity.

[0071] The term “substantial identity” of polynucleotide sequences means that a polynucleotide comprises a sequence that has between 50-100% sequence identity, preferably at least 50% sequence identity, preferably at least 60% sequence identity, preferably at least 70%, more preferably at least 80%, more preferably at least 90% and most preferably at least 95%, compared to a reference sequence using one of the alignment programs described using standard parameters. One of skill will recognize that these values can be appropriately adjusted to determine corresponding identity of proteins encoded by two nucleotide sequences by taking into account codon degeneracy, amino acid similarity, reading frame positioning and the like. Substantial identity of amino acid sequences for these purposes normally means sequence identity of between 55-100%, preferably at least 55%, preferably at least 60%, more preferably at least 70%, 80%, 90% and most preferably at least 95%.

[0072] Another indication that nucleotide sequences are substantially identical is if two molecules hybridize to each other under stringent conditions. The degeneracy of the genetic code allows for many amino acids substitutions that lead to variety in the nucleotide sequence that code for the same amino acid, hence it is possible that the DNA sequence could code for the same polypeptide but not hybridize to each other under stringent conditions. This may occur, e.g., when a copy of a nucleic acid is created using the maximum codon degeneracy permitted by the genetic code. One indication that two nucleic acid sequences are substantially identical is that the polypeptide, which the first nucleic acid encodes, is immunologically cross reactive with the polypeptide encoded by the second nucleic acid.

[0073] The terms “substantial identity” in the context of a peptide indicates that a peptide comprises a sequence with between 55-100% sequence identity to a reference sequence preferably at least 55% sequence identity, preferably 60% preferably 70%, more preferably 80%, most preferably at least 90% or 95% sequence identity to the reference sequence over a specified comparison window. Preferably, optimal alignment is conducted using the homology alignment algorithm of Needleman and Wunsch, supra. An indication that two peptide sequences are substantially identical is that one peptide is immunologically reactive with antibodies raised against the second peptide. Thus, a peptide is substantially identical to a second peptide, for example, where the two peptides differ only by a conservative substitution. In addition, a peptide can be substantially identical to a second peptide when they differ by a non-conservative change if the epitope that the antibody recognizes is substantially identical. Peptides, which are “substantially similar” share sequences as, noted above except that residue positions, which are not identical, may differ by conservative amino acid changes.

[0074] The disclosure describes yield improvement polynucleotides and polypeptides. The novel nucleotides and proteins of the disclosure have an expression pattern which indicates that they regulate cell number and thus play an important role in plant development. The polynucleotides are expressed in various plant tissues. The polynucleotides and polypeptides thus provide an opportunity to manipulate plant development to alter seed and vegetative tissue development, timing or composition. This may be used to create a sterile plant, a seedless plant or a plant with altered endosperm composition.

### Nucleic Acids

[0075] The present disclosure provides, inter alia, isolated nucleic acids of RNA, DNA and analogs and/or chimeras thereof, comprising a yield improvement polynucleotide.

[0076] The present disclosure also includes polynucleotides optimized for expression in different organisms. For example, for expression of the polynucleotide in a maize plant, the sequence can be altered to account for specific codon preferences and to alter GC content as according to Murray, et al, supra. Maize codon usage for 28 genes from maize plants is listed in Table 4 of Murray, et al., supra.

[0077] The yield improvement nucleic acids of the present disclosure comprise isolated yield improvement polynucleotides which are inclusive of:
[0078] (a) a polynucleotide encoding a yield improvement polypeptide and conservatively modified and polymorphic variants thereof;
[0079] (b) a polynucleotide having at least 70% sequence identity with polynucleotides of (a) or (b);
[0080] (c) complementary sequences of polynucleotides of (a) or (b).

[0081] The following table, Table 1, lists the specific identities of the polynucleotides and polypeptides and disclosed herein.

TABLE 1

| | | | |
|---|---|---|---|
| RR10 | Sorghum | Polynucleotide | SEQ ID NO: 1 |
| | bicolor | Polypeptide | SEQ ID NO: 2 |
| | | Genomic | SEQ ID NO: 3405 |
| PTK1 | Sorghum | Polynucleotide | SEQ ID NO: 3 |
| | bicolor | Polypeptide | SEQ ID NO: 4 |
| | | Genomic | SEQ ID NO: 3406 |
| ARGOS | Sorghum | Polynucleotide | SEQ ID NO: 5 |
| | bicolor | Polypeptide | SEQ ID NO: 6 |
| | | Genomic | SEQ ID NO: 3407 |
| ARPK | Sorghum | Polynucleotide | SEQ ID NO: 7 |
| | bicolor | Polypeptide | SEQ ID NO: 8 |
| | | Genomic | SEQ ID NO: 3408 |
| BHLH | Sorghum | Polynucleotide | SEQ ID NO: 9 |
| | bicolor | Polypeptide | SEQ ID NO: 10 |
| | | Genomic | SEQ ID NO: 3409 |
| COXVIIa | Sorghum | Polynucleotide | SEQ ID NO: 11 |
| | bicolor | Polypeptide | SEQ ID NO: 12 |
| | | Genomic | SEQ ID NO: 3410 |
| GIRLPK | Sorghum | Polynucleotide | SEQ ID NO: 13 |
| | bicolor | Polypeptide | SEQ ID NO: 14 |
| | | Genomic | SEQ ID NO: 3411 |
| SEU1 | Sorghum | Polynucleotide | SEQ ID NO: 15 |
| | bicolor | Polypeptide | SEQ ID NO: 16 |
| | | Genomic | SEQ ID NO: 3412 |
| ERECTA | Sorghum | Polynucleotide | SEQ ID NO: 17 |
| | bicolor | Polypeptide | SEQ ID NO: 18 |
| | | Genomic | SEQ ID NO: 3413 |
| PHDF | Sorghum | Polynucleotide | SEQ ID NO: 19 |
| | bicolor | Polypeptide | SEQ ID NO: 20 |
| | | Genomic | SEQ ID NO: 3414 |
| TFL6 | Sorghum | Polynucleotide | SEQ ID NO: 21 |
| | bicolor | Polypeptide | SEQ ID NO: 22 |
| | | Genomic | SEQ ID NO: 3415 |
| TFL8 | Sorghum | Polynucleotide | SEQ ID NO: 23 |
| | bicolor | Polypeptide | SEQ ID NO: 24 |
| | | Genomic | SEQ ID NO: 3416 |
| FIE2 | Sorghum | Polynucleotide | SEQ ID NO: 25 |
| | bicolor | Polypeptide | SEQ ID NO: 26 |
| | | Genomic | SEQ ID NO: 3417 |
| MEZ2 | Sorghum | Polynucleotide | SEQ ID NO: 27 |
| | bicolor | Polypeptide | SEQ ID NO: 28 |
| | | Genomic | SEQ ID NO: 3418 |
| TPS1HA | Sorghum | Polynucleotide | SEQ ID NO: 29 |
| | bicolor | Polypeptide | SEQ ID NO: 30 |
| | | Genomic | SEQ ID NO: 3419 |
| SVP4 | Sorghum | Polynucleotide | SEQ ID NO: 31 |
| | bicolor | Polypeptide | SEQ ID NO: 32 |
| | | Genomic | SEQ ID NO: 3420 |
| SILKY1 | Sorghum | Polynucleotide | SEQ ID NO: 33 |
| | bicolor | Polypeptide | SEQ ID NO: 34 |
| | | Genomic | SEQ ID NO: 3421 |
| EBNA2 | Sorghum | Polynucleotide | SEQ ID NO: 35 |
| | bicolor | Polypeptide | SEQ ID NO: 36 |
| | | Genomic | SEQ ID NO: 3422 |
| MYB | Sorghum | Polynucleotide | SEQ ID NO: 37 |
| | bicolor | Polypeptide | SEQ ID NO: 38 |
| | | Genomic | SEQ ID NO: 3423 |
| ALF1 | Sorghum | Polynucleotide | SEQ ID NO: 39 |
| | bicolor | Polypeptide | SEQ ID NO: 40 |
| | | Genomic | SEQ ID NO: 3424 |
| ALF2 | Sorghum | Polynucleotide | SEQ ID NO: 41 |
| | bicolor | Polypeptide | SEQ ID NO: 42 |
| | | Genomic | SEQ ID NO: 3425 |
| NDK4 | Sorghum | Polynucleotide | SEQ ID NO: 43 |
| | bicolor | Polypeptide | SEQ ID NO: 44 |
| | | Genomic | SEQ ID NO: 3426 |
| PPBP1 | Sorghum | Polynucleotide | SEQ ID NO: 45 |
| | bicolor | Polypeptide | SEQ ID NO: 46 |
| | | Genomic | SEQ ID NO: 3427 |
| SPS | Sorghum | Polynucleotide | SEQ ID NO: 47 |
| | bicolor | Polypeptide | SEQ ID NO: 48 |
| | | Genomic | SEQ ID NO: 3428 |
| SIG2B | Sorghum | Polynucleotide | SEQ ID NO: 49 |
| | bicolor | Polypeptide | SEQ ID NO: 50 |
| | | Genomic | SEQ ID NO: 3429 |
| HAP32 | Sorghum | Polynucleotide | SEQ ID NO: 51 |
| | bicolor | Polypeptide | SEQ ID NO: 52 |
| | | Genomic | SEQ ID NO: 3430 |
| ARGOS3 | Sorghum | Polynucleotide | SEQ ID NO: 53 |
| | bicolor | Polypeptide | SEQ ID NO: 54 |
| | | Genomic | SEQ ID NO: 3431 |
| ARP6 | Sorghum | Polynucleotide | SEQ ID NO: 55 |
| | bicolor | Polypeptide | SEQ ID NO: 56 |
| | | Genomic | SEQ ID NO: 3432 |
| HAP3L3 | Sorghum | Polynucleotide | SEQ ID NO: 57 |
| | bicolor | Polypeptide | SEQ ID NO: 58 |
| | | Genomic | SEQ ID NO: 3433 |
| CBFA2 | Sorghum | Polynucleotide | SEQ ID NO: 59 |
| | bicolor | Polypeptide | SEQ ID NO: 60 |
| | | Genomic | SEQ ID NO: 3434 |
| TFL10 | Sorghum | Polynucleotide | SEQ ID NO: 61 |
| | bicolor | Polypeptide | SEQ ID NO: 62 |
| | | Genomic | SEQ ID NO: 3435 |
| TFL13 | Sorghum | Polynucleotide | SEQ ID NO: 63 |
| | bicolor | Polypeptide | SEQ ID NO: 64 |
| | | Genomic | SEQ ID NO: 3436 |
| SIG2A | Sorghum | Polynucleotide | SEQ ID NO: 65 |
| | bicolor | Polypeptide | SEQ ID NO: 66 |
| | | Genomic | SEQ ID NO: 3437 |
| ALAAT | Sorghum | Polynucleotide | SEQ ID NO: 67 |
| | bicolor | Polypeptide | SEQ ID NO: 68 |
| | | Genomic | SEQ ID NO: 3438 |
| FBA1 | Sorghum | Polynucleotide | SEQ ID NO: 69 |
| | bicolor | Polypeptide | SEQ ID NO: 70 |
| | | Genomic | SEQ ID NO: 3439 |
| SVP3 | Sorghum | Polynucleotide | SEQ ID NO: 71 |
| | bicolor | Polypeptide | SEQ ID NO: 72 |
| | | Genomic | SEQ ID NO: 3440 |
| CNR1 | Sorghum | Polynucleotide | SEQ ID NO: 73 |
| | bicolor | Polypeptide | SEQ ID NO: 74 |
| | | Genomic | SEQ ID NO: 3441 |
| POL | Sorghum | Polynucleotide | SEQ ID NO: 75 |
| | bicolor | Polypeptide | SEQ ID NO: 76 |
| | | Genomic | SEQ ID NO: 3442 |
| GIP | Sorghum | Polynucleotide | SEQ ID NO: 77 |
| | bicolor | Polypeptide | SEQ ID NO: 78 |
| | | Genomic | SEQ ID NO: 3443 |
| FT6 | Sorghum | Polynucleotide | SEQ ID NO: 79 |
| | bicolor | Polypeptide | SEQ ID NO: 80 |
| | | Genomic | SEQ ID NO: 3444 |
| NADHTR | Sorghum | Polynucleotide | SEQ ID NO: 81 |
| | bicolor | Polypeptide | SEQ ID NO: 82 |
| | | Genomic | SEQ ID NO: 3445 |
| RVDH | Sorghum | Polynucleotide | SEQ ID NO: 83 |
| | bicolor | Polypeptide | SEQ ID NO: 84 |
| | | Genomic | SEQ ID NO: 3446 |
| SENC | Sorghum | Polynucleotide | SEQ ID NO: 85 |
| | bicolor | Polypeptide | SEQ ID NO: 86 |
| | | Genomic | SEQ ID NO: 3447 |
| FT4 | Sorghum | Polynucleotide | SEQ ID NO: 87 |
| | bicolor | Polypeptide | SEQ ID NO: 88 |
| | | Genomic | SEQ ID NO: 3448 |
| SBP8 | Sorghum | Polynucleotide | SEQ ID NO: 89 |
| | bicolor | Polypeptide | SEQ ID NO: 90 |
| | | Genomic | SEQ ID NO: 3449 |
| NRP1 | Sorghum | Polynucleotide | SEQ ID NO: 91 |
| | bicolor | Polypeptide | SEQ ID NO: 92 |
| | | Genomic | SEQ ID NO: 3450 |
| TFL16 | Sorghum | Polynucleotide | SEQ ID NO: 93 |
| | bicolor | Polypeptide | SEQ ID NO: 94 |
| | | Genomic | SEQ ID NO: 3451 |
| PP2C | Sorghum | Polynucleotide | SEQ ID NO: 95 |
| | bicolor | Polypeptide | SEQ ID NO: 96 |
| | | Genomic | SEQ ID NO: 3452 |
| NUCPU3 | Sorghum | Polynucleotide | SEQ ID NO: 97 |
| | bicolor | Polypeptide | SEQ ID NO: 98 |
| | | Genomic | SEQ ID NO: 3453 |
| DTP7 | Arabidopsis | Polynucleotide | SEQ ID NO: 99 |
| | thaliana | Polypeptide | SEQ ID NO: 100 |
| | | Genomic | SEQ ID NO: 3454 |
| ARGOS6 | Sorghum | Polynucleotide | SEQ ID NO: 101 |
| | bicolor | Polypeptide | SEQ ID NO: 102 |
| | | Genomic | SEQ ID NO: 3455 |
| ARGOS8 | Zea mays | Polynucleotide | SEQ ID NO: 103 |
| | | Polypeptide | SEQ ID NO: 104 |
| | | Genomic | SEQ ID NO: 3456 |
| ARP7 | Sorghum | Polynucleotide | SEQ ID NO: 105 |
| | bicolor | Polypeptide | SEQ ID NO: 106 |
| | | Genomic | SEQ ID NO: 3457 |
| ARGOS9 | Sorghum | Polynucleotide | SEQ ID NO: 107 |
| | bicolor | Polypeptide | SEQ ID NO: 108 |
| | | Genomic | SEQ ID NO: 3458 |
| NUCPU7 | Sorghum | Polynucleotide | SEQ ID NO: 109 |
| | bicolor | Polypeptide | SEQ ID NO: 110 |
| | | Genomic | SEQ ID NO: 3459 |
| EBP1 | Sorghum | Polynucleotide | SEQ ID NO: 111 |
| | bicolor | Polypeptide | SEQ ID NO: 112 |
| | | Genomic | SEQ ID NO: 3460 |
| LRR | Sorghum | Polynucleotide | SEQ ID NO: 113 |
| | bicolor | Polypeptide | SEQ ID NO: 114 |
| | | Genomic | SEQ ID NO: 3461 |
| TFL26 | Sorghum | Polynucleotide | SEQ ID NO: 115 |
| | bicolor | Polypeptide | SEQ ID NO: 116 |
| | | Genomic | SEQ ID NO: 3462 |
| SINA | Sorghum | Polynucleotide | SEQ ID NO: 117 |
| | bicolor | Polypeptide | SEQ ID NO: 118 |
| | | Genomic | SEQ ID NO: 3463 |
| ALP | Sorghum | Polynucleotide | SEQ ID NO: 119 |
| | bicolor | Polypeptide | SEQ ID NO: 120 |
| | | Genomic | SEQ ID NO: 3464 |
| GSH1 | Sorghum | Polynucleotide | SEQ ID NO: 121 |
| | bicolor | Polypeptide | SEQ ID NO: 122 |
| | | Genomic | SEQ ID NO: 3465 |
| FBA1 | Sorghum | Polynucleotide | SEQ ID NO: 123 |
| | bicolor | Polypeptide | SEQ ID NO: 124 |
| | | Genomic | SEQ ID NO: 3466 |
| BZFP1 | Sorghum | Polynucleotide | SEQ ID NO: 125 |
| | bicolor | Polypeptide | SEQ ID NO: 126 |
| | | Genomic | SEQ ID NO: 3467 |
| TFL1 | Sorghum | Polynucleotide | SEQ ID NO: 127 |
| | bicolor | Polypeptide | SEQ ID NO: 128 |
| | | Genomic | SEQ ID NO: 3468 |
| TFL2 | Sorghum | Polynucleotide | SEQ ID NO: 129 |
| | bicolor | Polypeptide | SEQ ID NO: 130 |
| | | Genomic | SEQ ID NO: 3469 |
| TFL3 | Sorghum | Polynucleotide | SEQ ID NO: 131 |
| | bicolor | Polypeptide | SEQ ID NO: 132 |
| | | Genomic | SEQ ID NO: 3470 |
| YECPU1 | Sorghum | Polynucleotide | SEQ ID NO: 133 |
| | bicolor | Polypeptide | SEQ ID NO: 134 |
| | | Genomic | SEQ ID NO: 3471 |
| DZFP1 | Sorghum | Polynucleotide | SEQ ID NO: 135 |
| | bicolor | Polypeptide | SEQ ID NO: 136 |
| | | Genomic | SEQ ID NO: 3472 |
| YECPU2 | Sorghum | Polynucleotide | SEQ ID NO: 137 |
| | bicolor | Polypeptide | SEQ ID NO: 138 |
| | | Genomic | SEQ ID NO: 3473 |
| BPIRP1 | Sorghum | Polynucleotide | SEQ ID NO: 139 |
| | bicolor | Polypeptide | SEQ ID NO: 140 |
| | | Genomic | SEQ ID NO: 3474 |
| EREFTs | Sorghum | Polynucleotide | SEQ ID NO: 141 |
| | bicolor | Polypeptide | SEQ ID NO: 142 |
| | | Genomic | SEQ ID NO: 3475 |
| YECPU3 | Sorghum | Polynucleotide | SEQ ID NO: 143 |
| | bicolor | Polypeptide | SEQ ID NO: 144 |
| | | Genomic | SEQ ID NO: 3476 |
| PC4 | Sorghum | Polynucleotide | SEQ ID NO: 145 |
| | bicolor | Polypeptide | SEQ ID NO: 146 |
| | | Genomic | SEQ ID NO: 3477 |
| D9D8 | Sorghum | Polynucleotide | SEQ ID NO: 147 |
| | bicolor | Polypeptide | SEQ ID NO: 148 |
| | | Genomic | SEQ ID NO: 3478 |
| ARG4 | Sorghum | Polynucleotide | SEQ ID NO: 149 |
| | bicolor | Polypeptide | SEQ ID NO: 150 |
| | | Genomic | SEQ ID NO: 3479 |
| PKL1 | Sorghum | Polynucleotide | SEQ ID NO: 151 |
| | bicolor | Polypeptide | SEQ ID NO: 152 |
| | | Genomic | SEQ ID NO: 3480 |
| SERK2 | Sorghum | Polynucleotide | SEQ ID NO: 153 |
| | bicolor | Polypeptide | SEQ ID NO: 154 |
| | | Genomic | SEQ ID NO: 3481 |
| WSPL1 | Sorghum | Polynucleotide | SEQ ID NO: 155 |
| | bicolor | Polypeptide | SEQ ID NO: 156 |
| | | Genomic | SEQ ID NO: 3482 |
| ZFP1 | Sorghum | Polynucleotide | SEQ ID NO: 157 |
| | bicolor | Polypeptide | SEQ ID NO: 158 |
| | | Genomic | SEQ ID NO: 3483 |
| AP2L1 | Sorghum | Polynucleotide | SEQ ID NO: 159 |
| | bicolor | Polypeptide | SEQ ID NO: 160 |
| | | Genomic | SEQ ID NO: 3484 |
| HMG | Sorghum | Polynucleotide | SEQ ID NO: 161 |
| | bicolor | Polypeptide | SEQ ID NO: 162 |
| | | Genomic | SEQ ID NO: 3485 |
| CNGC | Sorghum | Polynucleotide | SEQ ID NO: 163 |
| | bicolor | Polypeptide | SEQ ID NO: 164 |
| | | Genomic | SEQ ID NO: 3486 |
| MEIIS5 | Sorghum | Polynucleotide | SEQ ID NO: 165 |
| | bicolor | Polypeptide | SEQ ID NO: 166 |
| | | Genomic | SEQ ID NO: 3487 |
| NDBP | Sorghum | Polynucleotide | SEQ ID NO: 167 |
| | bicolor | Polypeptide | SEQ ID NO: 168 |
| | | Genomic | SEQ ID NO: 3488 |
| RGDI | Sorghum | Polynucleotide | SEQ ID NO: 169 |
| | bicolor | Polypeptide | SEQ ID NO: 170 |
| | | Genomic | SEQ ID NO: 3489 |
| SBPPDK | Sorghum | Polynucleotide | SEQ ID NO: 171 |
| | bicolor | Polypeptide | SEQ ID NO: 172 |
| | | Genomic | SEQ ID NO: 3490 |
| SAMPU2 | Sorghum | Polynucleotide | SEQ ID NO: 173 |
| | bicolor | Polypeptide | SEQ ID NO: 174 |
| | | Genomic | SEQ ID NO: 3491 |
| CNR06RNAi | Sorghum | Polynucleotide | SEQ ID NO: 175 |
| | bicolor | Polypeptide | SEQ ID NO: 176 |
| | | Genomic | SEQ ID NO: 3492 |
| VRS1RNAi | Sorghum | Polynucleotide | SEQ ID NO: 177 |
| | bicolor | Polypeptide | SEQ ID NO: 178 |
| | | Genomic | SEQ ID NO: 3493 |
| FBL2 | Sorghum | Polynucleotide | SEQ ID NO: 179 |
| | bicolor | Polypeptide | SEQ ID NO: 180 |
| | | Genomic | SEQ ID NO: 3494 |
| UCP1 | Sorghum | Polynucleotide | SEQ ID NO: 181 |
| | bicolor | Polypeptide | SEQ ID NO: 182 |
| | | Genomic | SEQ ID NO: 3495 |
| CNR02RNAi | Sorghum | Polynucleotide | SEQ ID NO: 183 |
| | bicolor | Polypeptide | SEQ ID NO: 184 |
| | | Genomic | SEQ ID NO: 3496 |
| TTL1RNAi | Sorghum | Polynucleotide | SEQ ID NO: 185 |
| | bicolor | Polypeptide | SEQ ID NO: 186 |
| | | Genomic | SEQ ID NO: 3497 |
| PPDK | Sorghum | Polynucleotide | SEQ ID NO: 187 |
| | bicolor | Polypeptide | SEQ ID NO: 188 |
| | | Genomic | SEQ ID NO: 3498 |
| LEC1LIKERNAi | Sorghum | Polynucleotide | SEQ ID NO: 189 |
| | bicolor | Polypeptide | SEQ ID NO: 190 |
| | | Genomic | SEQ ID NO: 3499 |
| GW21 | Sorghum | Polynucleotide | SEQ ID NO: 191 |
| | bicolor | Polypeptide | SEQ ID NO: 192 |
| | | Genomic | SEQ ID NO: 3500 |
| GW22 | Sorghum | Polynucleotide | SEQ ID NO: 193 |
| | bicolor | Polypeptide | SEQ ID NO: 194 |
| | | Genomic | SEQ ID NO: 3501 |
| PCYS1 | Sorghum | Polynucleotide | SEQ ID NO: 195 |
| | bicolor | Polypeptide | SEQ ID NO: 196 |
| | | Genomic | SEQ ID NO: 3502 |
| SUMOE3 | Sorghum | Polynucleotide | SEQ ID NO: 197 |
| | bicolor | Polypeptide | SEQ ID NO: 198 |
| | | Genomic | SEQ ID NO: 3503 |
| M14 | Sorghum | Polynucleotide | SEQ ID NO: 199 |
| | bicolor | Polypeptide | SEQ ID NO: 200 |
| | | Genomic | SEQ ID NO: 3504 |
| EDCP647011 | Sorghum | Polynucleotide | SEQ ID NO: 201 |
| | bicolor | Polypeptide | SEQ ID NO: 202 |
| | | Genomic | SEQ ID NO: 3505 |
| SPL1 | Sorghum | Polynucleotide | SEQ ID NO: 203 |
| | bicolor | Polypeptide | SEQ ID NO: 204 |
| | | Genomic | SEQ ID NO: 3506 |
| ADA2 | Sorghum | Polynucleotide | SEQ ID NO: 205 |
| | bicolor | Polypeptide | SEQ ID NO: 206 |
| | | Genomic | SEQ ID NO: 3507 |
| LOBDP1 | Sorghum | Polynucleotide | SEQ ID NO: 207 |
| | bicolor | Polypeptide | SEQ ID NO: 208 |
| | | Genomic | SEQ ID NO: 3508 |
| YECP4 | Sorghum | Polynucleotide | SEQ ID NO: 209 |
| | bicolor | Polypeptide | SEQ ID NO: 210 |
| | | Genomic | SEQ ID NO: 3509 |
| SAUER2 | Sorghum | Polynucleotide | SEQ ID NO: 211 |
| | bicolor | Polypeptide | SEQ ID NO: 212 |
| | | Genomic | SEQ ID NO: 3510 |
| ET3 | Sorghum | Polynucleotide | SEQ ID NO: 213 |
| | bicolor | Polypeptide | SEQ ID NO: 214 |
| | | Genomic | SEQ ID NO: 3511 |
| PWWPDPL1 | Sorghum | Polynucleotide | SEQ ID NO: 215 |
| | bicolor | Polypeptide | SEQ ID NO: 216 |
| | | Genomic | SEQ ID NO: 3512 |
| GSH1 | Sorghum | Polynucleotide | SEQ ID NO: 217 |
| | bicolor | Polypeptide | SEQ ID NO: 218 |
| | | Genomic | SEQ ID NO: 3513 |
| NAC6 | Sorghum | Polynucleotide | SEQ ID NO: 219 |
| | bicolor | Polypeptide | SEQ ID NO: 220 |
| | | Genomic | SEQ ID NO: 3514 |
| M8 | Sorghum | Polynucleotide | SEQ ID NO: 221 |
| | bicolor | Polypeptide | SEQ ID NO: 222 |
| | | Genomic | SEQ ID NO: 3515 |
| CIPK1 | Sorghum | Polynucleotide | SEQ ID NO: 223 |
| | bicolor | Polypeptide | SEQ ID NO: 224 |
| | | Genomic | SEQ ID NO: 3516 |
| TD1 | Sorghum | Polynucleotide | SEQ ID NO: 225 |
| | bicolor | Polypeptide | SEQ ID NO: 226 |
| | | Genomic | SEQ ID NO: 3517 |
| ER1 | Sorghum | Polynucleotide | SEQ ID NO: 227 |
| | bicolor | Polypeptide | SEQ ID NO: 228 |
| | | Genomic | SEQ ID NO: 3518 |
| YABBY14 | Sorghum | Polynucleotide | SEQ ID NO: 229 |
| | bicolor | Polypeptide | SEQ ID NO: 230 |
| | | Genomic | SEQ ID NO: 3519 |
| PCRTC | Sorghum | Polynucleotide | SEQ ID NO: 231 |
| | bicolor | Polypeptide | SEQ ID NO: 232 |
| | | Genomic | SEQ ID NO: 3520 |
| CSZ1 | Sorghum | Polynucleotide | SEQ ID NO: 233 |
| | bicolor | Polypeptide | SEQ ID NO: 234 |
| | | Genomic | SEQ ID NO: 3521 |
| ZIMFP | Sorghum | Polynucleotide | SEQ ID NO: 235 |
| | bicolor | Polypeptide | SEQ ID NO: 236 |
| | | Genomic | SEQ ID NO: 3522 |
| WDRP | Sorghum | Polynucleotide | SEQ ID NO: 237 |
| | bicolor | Polypeptide | SEQ ID NO: 238 |
| | | Genomic | SEQ ID NO: 3523 |
| LEA | Sorghum | Polynucleotide | SEQ ID NO: 239 |
| | bicolor | Polypeptide | SEQ ID NO: 240 |
| | | Genomic | SEQ ID NO: 3524 |
| HSP | Sorghum | Polynucleotide | SEQ ID NO: 241 |
| | bicolor | Polypeptide | SEQ ID NO: 242 |
| | | Genomic | SEQ ID NO: 3525 |
| GmSRP | Sorghum | Polynucleotide | SEQ ID NO: 243 |
| | bicolor | Polypeptide | SEQ ID NO: 244 |
| | | Genomic | SEQ ID NO: 3526 |
| LTP | Sorghum | Polynucleotide | SEQ ID NO: 245 |
| | bicolor | Polypeptide | SEQ ID NO: 246 |
| | | Genomic | SEQ ID NO: 3527 |
| IRDR | Sorghum | Polynucleotide | SEQ ID NO: 247 |
| | bicolor | Polypeptide | SEQ ID NO: 248 |
| | | Genomic | SEQ ID NO: 3528 |
| KN1 | Sorghum | Polynucleotide | SEQ ID NO: 249 |
| | bicolor | Polypeptide | SEQ ID NO: 250 |
| | | Genomic | SEQ ID NO: 3529 |
| INCW2 | Sorghum | Polynucleotide | SEQ ID NO: 251 |
| | bicolor | Polypeptide | SEQ ID NO: 252 |
| | | Genomic | SEQ ID NO: 3530 |
| PPR1 | Sorghum | Polynucleotide | SEQ ID NO: 253 |
| | bicolor | Polypeptide | SEQ ID NO: 254 |
| | | Genomic | SEQ ID NO: 3531 |
| Sb01g004490 | Sorghum | Polynucleotide | SEQ ID NO: 255 |
| | bicolor | Polypeptide | SEQ ID NO: 256 |
| | | Genomic | SEQ ID NO: 3532 |
| YEP1 | Sorghum | Polynucleotide | SEQ ID NO: 257 |
| | bicolor | Polypeptide | SEQ ID NO: 258 |
| | | Genomic | SEQ ID NO: 3533 |
| YEP31 | Sorghum | Polynucleotide | SEQ ID NO: 259 |
| | bicolor | Polypeptide | SEQ ID NO: 260 |
| | | Genomic | SEQ ID NO: 3534 |
| LRR3 | Sorghum | Polynucleotide | SEQ ID NO: 261 |
| | bicolor | Polypeptide | SEQ ID NO: 262 |
| | | Genomic | SEQ ID NO: 3535 |
| UP | Sorghum | Polynucleotide | SEQ ID NO: 263 |
| | bicolor | Polypeptide | SEQ ID NO: 264 |
| | | Genomic | SEQ ID NO: 3536 |
| GRF5 | Sorghum | Polynucleotide | SEQ ID NO: 265 |
| | bicolor | Polypeptide | SEQ ID NO: 266 |
| | | Genomic | SEQ ID NO: 3537 |
| HSD1 | Sorghum | Polynucleotide | SEQ ID NO: 267 |
| | bicolor | Polypeptide | SEQ ID NO: 268 |
| | | Genomic | SEQ ID NO: 3538 |
| SDH | Sorghum | Polynucleotide | SEQ ID NO: 269 |
| | bicolor | Polypeptide | SEQ ID NO: 270 |
| | | Genomic | SEQ ID NO: 3539 |
| SUT1 | Sorghum | Polynucleotide | SEQ ID NO: 271 |
| | bicolor | Polypeptide | SEQ ID NO: 272 |
| | | Genomic | SEQ ID NO: 3540 |
| SPP1 | Sorghum | Polynucleotide | SEQ ID NO: 273 |
| | bicolor | Polypeptide | SEQ ID NO: 274 |
| | | Genomic | SEQ ID NO: 3541 |
| SCL | Sorghum | Polynucleotide | SEQ ID NO: 275 |
| | bicolor | Polypeptide | SEQ ID NO: 276 |
| | | Genomic | SEQ ID NO: 3542 |
| GRP5 | Sorghum | Polynucleotide | SEQ ID NO: 277 |
| | bicolor | Polypeptide | SEQ ID NO: 278 |
| | | Genomic | SEQ ID NO: 3543 |
| BA1 | Sorghum | Polynucleotide | SEQ ID NO: 279 |
| | bicolor | Polypeptide | SEQ ID NO: 280 |
| | | Genomic | SEQ ID NO: 3544 |
| Bif2 | Sorghum | Polynucleotide | SEQ ID NO: 281 |
| | bicolor | Polypeptide | SEQ ID NO: 282 |
| | | Genomic | SEQ ID NO: 3545 |
| Sb03g032340 | Sorghum | Polynucleotide | SEQ ID NO: 283 |
| | bicolor | Polypeptide | SEQ ID NO: 284 |
| | | Genomic | SEQ ID NO: 3546 |
| MIPS1 | Sorghum | Polynucleotide | SEQ ID NO: 285 |
| | bicolor | Polypeptide | SEQ ID NO: 286 |
| | | Genomic | SEQ ID NO: 3547 |
| TOR | Sorghum | Polynucleotide | SEQ ID NO: 287 |
| | bicolor | Polypeptide | SEQ ID NO: 288 |
| | | Genomic | SEQ ID NO: 3548 |
| Sb07g026630 | Sorghum | Polynucleotide | SEQ ID NO: 289 |
| | bicolor | Polypeptide | SEQ ID NO: 290 |
| | | Genomic | SEQ ID NO: 3549 |
| Sb04g029890 | Sorghum | Polynucleotide | SEQ ID NO: 291 |
| | bicolor | Polypeptide | SEQ ID NO: 292 |
| | | Genomic | SEQ ID NO: 3550 |
| Sb01g008730 | Sorghum | Polynucleotide | SEQ ID NO: 293 |
| | bicolor | Polypeptide | SEQ ID NO: 294 |
| | | Genomic | SEQ ID NO: 3551 |
| Sb01g007580 | Sorghum | Polynucleotide | SEQ ID NO: 295 |
| | bicolor | Polypeptide | SEQ ID NO: 296 |
| | | Genomic | SEQ ID NO: 3552 |
| Sb03g011680 | Sorghum | Polynucleotide | SEQ ID NO: 297 |
| | bicolor | Polypeptide | SEQ ID NO: 298 |
| | | Genomic | SEQ ID NO: 3553 |
| Sb09g025520 | Sorghum | Polynucleotide | SEQ ID NO: 299 |
| | bicolor | Polypeptide | SEQ ID NO: 300 |
| | | Genomic | SEQ ID NO: 3554 |
| Sb07g024970 | Sorghum | Polynucleotide | SEQ ID NO: 301 |
| | bicolor | Polypeptide | SEQ ID NO: 302 |
| | | Genomic | SEQ ID NO: 3555 |
| Sb07g025220 | Sorghum | Polynucleotide | SEQ ID NO: 303 |
| | bicolor | Polypeptide | SEQ ID NO: 304 |
| | | Genomic | SEQ ID NO: 3556 |
| Sb07g024890 | Sorghum | Polynucleotide | SEQ ID NO: 305 |
| | bicolor | Polypeptide | SEQ ID NO: 306 |
| | | Genomic | SEQ ID NO: 3557 |
| Sb05g022280 | Sorghum | Polynucleotide | SEQ ID NO: 307 |
| | bicolor | Polypeptide | SEQ ID NO: 308 |
| | | Genomic | SEQ ID NO: 3558 |
| Sb07g026630 | Sorghum | Polynucleotide | SEQ ID NO: 309 |
| | bicolor | Polypeptide | SEQ ID NO: 310 |
| | | Genomic | SEQ ID NO: 3559 |
| Sb04g031170 | Sorghum | Polynucleotide | SEQ ID NO: 311 |
| | bicolor | Polypeptide | SEQ ID NO: 312 |
| | | Genomic | SEQ ID NO: 3560 |
| Sb01g023750 | Sorghum | Polynucleotide | SEQ ID NO: 313 |
| | bicolor | Polypeptide | SEQ ID NO: 314 |
| | | Genomic | SEQ ID NO: 3561 |
| Sb10g006910 | Sorghum | Polynucleotide | SEQ ID NO: 315 |
| | bicolor | Polypeptide | SEQ ID NO: 316 |
| | | Genomic | SEQ ID NO: 3562 |
| Sb06g033870 | Sorghum | Polynucleotide | SEQ ID NO: 317 |
| | bicolor | Polypeptide | SEQ ID NO: 318 |
| | | Genomic | SEQ ID NO: 3563 |
| Sb03g034260 | Sorghum | Polynucleotide | SEQ ID NO: 319 |
| | bicolor | Polypeptide | SEQ ID NO: 320 |
| | | Genomic | SEQ ID NO: 3564 |
| Sb06g033840 | Sorghum | Polynucleotide | SEQ ID NO: 321 |
| | bicolor | Polypeptide | SEQ ID NO: 322 |
| | | Genomic | SEQ ID NO: 3565 |
| Sb04g006250 | Sorghum | Polynucleotide | SEQ ID NO: 323 |
| | bicolor | Polypeptide | SEQ ID NO: 324 |
| | | Genomic | SEQ ID NO: 3566 |
| Sb06g033970 | Sorghum | Polynucleotide | SEQ ID NO: 325 |
| | bicolor | Polypeptide | SEQ ID NO: 326 |
| | | Genomic | SEQ ID NO: 3567 |
| Sb01g023740 | Sorghum | Polynucleotide | SEQ ID NO: 327 |
| | bicolor | Polypeptide | SEQ ID NO: 328 |
| | | Genomic | SEQ ID NO: 3568 |
| Sb10g029510 | Sorghum | Polynucleotide | SEQ ID NO: 329 |
| | bicolor | Polypeptide | SEQ ID NO: 330 |
| | | Genomic | SEQ ID NO: 3569 |
| Sb04g003690 | Sorghum | Polynucleotide | SEQ ID NO: 331 |
| | bicolor | Polypeptide | SEQ ID NO: 332 |
| | | Genomic | SEQ ID NO: 3570 |
| Sb10g027830 | Sorghum | Polynucleotide | SEQ ID NO: 333 |
| | bicolor | Polypeptide | SEQ ID NO: 334 |
| | | Genomic | SEQ ID NO: 3571 |
| Sb10g027790 | Sorghum | Polynucleotide | SEQ ID NO: 335 |
| | bicolor | Polypeptide | SEQ ID NO: 336 |
| | | Genomic | SEQ ID NO: 3572 |
| Sb04g036060 | Sorghum | Polynucleotide | SEQ ID NO: 337 |
| | bicolor | Polypeptide | SEQ ID NO: 338 |
| | | Genomic | SEQ ID NO: 3573 |
| Sb06g001970 | Sorghum | Polynucleotide | SEQ ID NO: 339 |
| | bicolor | Polypeptide | SEQ ID NO: 340 |
| | | Genomic | SEQ ID NO: 3574 |
| Sb01g011700 | Sorghum | Polynucleotide | SEQ ID NO: 341 |
| | bicolor | Polypeptide | SEQ ID NO: 342 |
| | | Genomic | SEQ ID NO: 3575 |
| Sb01g006960 | Sorghum | Polynucleotide | SEQ ID NO: 343 |
| | bicolor | Polypeptide | SEQ ID NO: 344 |
| | | Genomic | SEQ ID NO: 3576 |
| Sb03g041740 | Sorghum | Polynucleotide | SEQ ID NO: 345 |
| | bicolor | Polypeptide | SEQ ID NO: 346 |
| | | Genomic | SEQ ID NO: 3577 |
| Sb01g011780 | Sorghum | Polynucleotide | SEQ ID NO: 347 |
| | bicolor | Polypeptide | SEQ ID NO: 348 |
| | | Genomic | SEQ ID NO: 3578 |
| Sb06g012520 | Sorghum | Polynucleotide | SEQ ID NO: 349 |
| | bicolor | Polypeptide | SEQ ID NO: 350 |
| | | Genomic | SEQ ID NO: 3579 |
| Sb09g029240 | Sorghum | Polynucleotide | SEQ ID NO: 351 |
| | bicolor | Polypeptide | SEQ ID NO: 352 |
| | | Genomic | SEQ ID NO: 3580 |
| Sb09g002810 | Sorghum | Polynucleotide | SEQ ID NO: 353 |
| | bicolor | Polypeptide | SEQ ID NO: 354 |
| | | Genomic | SEQ ID NO: 3581 |
| Sb01g049650 | Sorghum | Polynucleotide | SEQ ID NO: 355 |
| | bicolor | Polypeptide | SEQ ID NO: 356 |
| | | Genomic | SEQ ID NO: 3582 |
| Sb01g032250 | Sorghum | Polynucleotide | SEQ ID NO: 357 |
| | bicolor | Polypeptide | SEQ ID NO: 358 |
| | | Genomic | SEQ ID NO: 3583 |
| Sb07g003690 | Sorghum | Polynucleotide | SEQ ID NO: 359 |
| | bicolor | Polypeptide | SEQ ID NO: 360 |
| | | Genomic | SEQ ID NO: 3584 |
| Sb04g035410 | Sorghum | Polynucleotide | SEQ ID NO: 361 |
| | bicolor | Polypeptide | SEQ ID NO: 362 |
| | | Genomic | SEQ ID NO: 3585 |
| Sb01g030930 | Sorghum | Polynucleotide | SEQ ID NO: 363 |
| | bicolor | Polypeptide | SEQ ID NO: 364 |
| | | Genomic | SEQ ID NO: 3586 |
| Sb03g042440 | Sorghum | Polynucleotide | SEQ ID NO: 365 |
| | bicolor | Polypeptide | SEQ ID NO: 366 |
| | | Genomic | SEQ ID NO: 3587 |
| Sb10g002070 | Sorghum | Polynucleotide | SEQ ID NO: 367 |
| | bicolor | Polypeptide | SEQ ID NO: 368 |
| | | Genomic | SEQ ID NO: 3588 |
| Sb09g029110 | Sorghum | Polynucleotide | SEQ ID NO: 369 |
| | bicolor | Polypeptide | SEQ ID NO: 370 |
| | | Genomic | SEQ ID NO: 3589 |
| Sb05g004100 | Sorghum | Polynucleotide | SEQ ID NO: 371 |
| | bicolor | Polypeptide | SEQ ID NO: 372 |
| | | Genomic | SEQ ID NO: 3590 |
| Sb01g006100 | Sorghum | Polynucleotide | SEQ ID NO: 373 |
| | bicolor | Polypeptide | SEQ ID NO: 374 |
| | | Genomic | SEQ ID NO: 3591 |
| NIR1 | Sorghum | Polynucleotide | SEQ ID NO: 375 |
| | bicolor | Polypeptide | SEQ ID NO: 376 |
| | | Genomic | SEQ ID NO: 3592 |
| GLN1 | Sorghum | Polynucleotide | SEQ ID NO: 377 |
| | bicolor | Polypeptide | SEQ ID NO: 378 |
| | | Genomic | SEQ ID NO: 3593 |
| NR1 | Sorghum | Polynucleotide | SEQ ID NO: 379 |
| | bicolor | Polypeptide | SEQ ID NO: 380 |
| | | Genomic | SEQ ID NO: 3594 |
| Sb10g026570 | Sorghum | Polynucleotide | SEQ ID NO: 381 |
| | bicolor | Polypeptide | SEQ ID NO: 382 |
| | | Genomic | SEQ ID NO: 3595 |
| Sb01g028950 | Sorghum | Polynucleotide | SEQ ID NO: 383 |
| | bicolor | Polypeptide | SEQ ID NO: 384 |
| | | Genomic | SEQ ID NO: 3596 |
| NLM6 | Sorghum | Polynucleotide | SEQ ID NO: 385 |
| | bicolor | Polypeptide | SEQ ID NO: 386 |
| | | Genomic | SEQ ID NO: 3597 |
| NRT1 | Sorghum | Polynucleotide | SEQ ID NO: 387 |
| | bicolor | Polypeptide | SEQ ID NO: 388 |
| | | Genomic | SEQ ID NO: 3598 |
| NAC100 | Sorghum | Polynucleotide | SEQ ID NO: 389 |
| | bicolor | Polypeptide | SEQ ID NO: 390 |
| | | Genomic | SEQ ID NO: 3599 |
| PIP1E | Sorghum | Polynucleotide | SEQ ID NO: 391 |
| | bicolor | Polypeptide | SEQ ID NO: 392 |
| | | Genomic | SEQ ID NO: 3600 |
| Sb05g004100 | Sorghum | Polynucleotide | SEQ ID NO: 393 |
| | bicolor | Polypeptide | SEQ ID NO: 394 |
| | | Genomic | SEQ ID NO: 3601 |
| AMP1 | Sorghum | Polynucleotide | SEQ ID NO: 395 |
| | bicolor | Polypeptide | SEQ ID NO: 396 |
| | | Genomic | SEQ ID NO: 3602 |
| Sb03g036560 | Sorghum | Polynucleotide | SEQ ID NO: 397 |
| | bicolor | Polypeptide | SEQ ID NO: 398 |
| | | Genomic | SEQ ID NO: 3603 |
| MPK3 | Sorghum | Polynucleotide | SEQ ID NO: 399 |
| | bicolor | Polypeptide | SEQ ID NO: 400 |
| | | Genomic | SEQ ID NO: 3604 |
| ERD9 | Sorghum | Polynucleotide | SEQ ID NO: 401 |
| | bicolor | Polypeptide | SEQ ID NO: 402 |
| | | Genomic | SEQ ID NO: 3605 |
| Sb09g013790 | Sorghum | Polynucleotide | SEQ ID NO: 403 |
| | bicolor | Polypeptide | SEQ ID NO: 404 |
| | | Genomic | SEQ ID NO: 3606 |
| SEL1 | Sorghum | Polynucleotide | SEQ ID NO: 405 |
| | bicolor | Polypeptide | SEQ ID NO: 406 |
| | | Genomic | SEQ ID NO: 3607 |
| AKHSDH | Sorghum | Polynucleotide | SEQ ID NO: 407 |
| | bicolor | Polypeptide | SEQ ID NO: 408 |
| | | Genomic | SEQ ID NO: 3608 |
| Sb09g001560 | Sorghum | Polynucleotide | SEQ ID NO: 409 |
| | bicolor | Polypeptide | SEQ ID NO: 410 |
| | | Genomic | SEQ ID NO: 3609 |
| MAT2 | Sorghum | Polynucleotide | SEQ ID NO: 411 |
| | bicolor | Polypeptide | SEQ ID NO: 412 |
| | | Genomic | SEQ ID NO: 3610 |
| GLN1 | Sorghum | Polynucleotide | SEQ ID NO: 413 |
| | bicolor | Polypeptide | SEQ ID NO: 414 |
| | | Genomic | SEQ ID NO: 3611 |
| Sb03g028760 | Sorghum | Polynucleotide | SEQ ID NO: 415 |
| | bicolor | Polypeptide | SEQ ID NO: 416 |
| | | Genomic | SEQ ID NO: 3612 |
| Sb03g040180 | Sorghum | Polynucleotide | SEQ ID NO: 417 |
| | bicolor | Polypeptide | SEQ ID NO: 418 |
| | | Genomic | SEQ ID NO: 3613 |
| Sb09g006480 | Sorghum | Polynucleotide | SEQ ID NO: 419 |
| | bicolor | Polypeptide | SEQ ID NO: 420 |
| | | Genomic | SEQ ID NO: 3614 |
| Sb08g003730 | Sorghum | Polynucleotide | SEQ ID NO: 421 |
| | bicolor | Polypeptide | SEQ ID NO: 422 |
| | | Genomic | SEQ ID NO: 3615 |
| Sb03g031310 | Sorghum | Polynucleotide | SEQ ID NO: 423 |
| | bicolor | Polypeptide | SEQ ID NO: 424 |
| | | Genomic | SEQ ID NO: 3616 |
| Sb03g041220 | Sorghum | Polynucleotide | SEQ ID NO: 425 |
| | bicolor | Polypeptide | SEQ ID NO: 426 |
| | | Genomic | SEQ ID NO: 3617 |
| Sb01g044110 | Sorghum | Polynucleotide | SEQ ID NO: 427 |
| | bicolor | Polypeptide | SEQ ID NO: 428 |
| | | Genomic | SEQ ID NO: 3618 |
| Sb01g003680 | Sorghum | Polynucleotide | SEQ ID NO: 429 |
| | bicolor | Polypeptide | SEQ ID NO: 430 |
| | | Genomic | SEQ ID NO: 3619 |
| Sb01g042740 | Sorghum | Polynucleotide | SEQ ID NO: 431 |
| | bicolor | Polypeptide | SEQ ID NO: 432 |
| | | Genomic | SEQ ID NO: 3620 |
| Sb09g002840 | Sorghum | Polynucleotide | SEQ ID NO: 433 |
| | bicolor | Polypeptide | SEQ ID NO: 434 |
| | | Genomic | SEQ ID NO: 3621 |
| Sb01g003710 | Sorghum | Polynucleotide | SEQ ID NO: 435 |
| | bicolor | Polypeptide | SEQ ID NO: 436 |
| | | Genomic | SEQ ID NO: 3622 |
| Sb10g009590 | Sorghum | Polynucleotide | SEQ ID NO: 437 |
| | bicolor | Polypeptide | SEQ ID NO: 438 |
| | | Genomic | SEQ ID NO: 3623 |
| Sb10g029870 | Sorghum | Polynucleotide | SEQ ID NO: 439 |
| | bicolor | Polypeptide | SEQ ID NO: 440 |
| | | Genomic | SEQ ID NO: 3624 |
| Sb09g003830 | Sorghum | Polynucleotide | SEQ ID NO: 441 |
| | bicolor | Polypeptide | SEQ ID NO: 442 |
| | | Genomic | SEQ ID NO: 3625 |
| Sb01g042450 | Sorghum | Polynucleotide | SEQ ID NO: 443 |
| | bicolor | Polypeptide | SEQ ID NO: 444 |
| | | Genomic | SEQ ID NO: 3626 |
| Sb02g037580 | Sorghum | Polynucleotide | SEQ ID NO: 445 |
| | bicolor | Polypeptide | SEQ ID NO: 446 |
| | | Genomic | SEQ ID NO: 3627 |
| Sb03g031780 | Sorghum | Polynucleotide | SEQ ID NO: 447 |
| | bicolor | Polypeptide | SEQ ID NO: 448 |
| | | Genomic | SEQ ID NO: 3628 |
| Sb02g023230 | Sorghum | Polynucleotide | SEQ ID NO: 449 |
| | bicolor | Polypeptide | SEQ ID NO: 450 |
| | | Genomic | SEQ ID NO: 3629 |
| Sb02g001600 | Sorghum | Polynucleotide | SEQ ID NO: 451 |
| | bicolor | Polypeptide | SEQ ID NO: 452 |
| | | Genomic | SEQ ID NO: 3630 |
| Sb08g017630 | Sorghum | Polynucleotide | SEQ ID NO: 453 |
| | bicolor | Polypeptide | SEQ ID NO: 454 |
| | | Genomic | SEQ ID NO: 3631 |
| Sb04g037800 | Sorghum | Polynucleotide | SEQ ID NO: 455 |
| | bicolor | Polypeptide | SEQ ID NO: 456 |
| | | Genomic | SEQ ID NO: 3632 |
| Sb02g010830 | Sorghum | Polynucleotide | SEQ ID NO: 457 |
| | bicolor | Polypeptide | SEQ ID NO: 458 |
| | | Genomic | SEQ ID NO: 3633 |
| Sb09g022710 | Sorghum | Polynucleotide | SEQ ID NO: 459 |
| | bicolor | Polypeptide | SEQ ID NO: 460 |
| | | Genomic | SEQ ID NO: 3634 |
| Sb07g005200 | Sorghum | Polynucleotide | SEQ ID NO: 461 |
| | bicolor | Polypeptide | SEQ ID NO: 462 |
| | | Genomic | SEQ ID NO: 3635 |
| Sb01g017230 | Sorghum | Polynucleotide | SEQ ID NO: 463 |
| | bicolor | Polypeptide | SEQ ID NO: 464 |
| | | Genomic | SEQ ID NO: 3636 |
| Sb01g047140 | Sorghum | Polynucleotide | SEQ ID NO: 465 |
| | bicolor | Polypeptide | SEQ ID NO: 466 |
| | | Genomic | SEQ ID NO: 3637 |
| Sb02g010760 | Sorghum | Polynucleotide | SEQ ID NO: 467 |
| | bicolor | Polypeptide | SEQ ID NO: 468 |
| | | Genomic | SEQ ID NO: 3638 |
| Sb01g045720 | Sorghum | Polynucleotide | SEQ ID NO: 469 |
| | bicolor | Polypeptide | SEQ ID NO: 470 |
| | | Genomic | SEQ ID NO: 3639 |
| Sb04g030600 | Sorghum | Polynucleotide | SEQ ID NO: 471 |
| | bicolor | Polypeptide | SEQ ID NO: 472 |
| | | Genomic | SEQ ID NO: 3640 |
| Sb03g003100 | Sorghum | Polynucleotide | SEQ ID NO: 473 |
| | bicolor | Polypeptide | SEQ ID NO: 474 |
| | | Genomic | SEQ ID NO: 3641 |
| Sb08g015550 | Sorghum | Polynucleotide | SEQ ID NO: 475 |
| | bicolor | Polypeptide | SEQ ID NO: 476 |
| | | Genomic | SEQ ID NO: 3642 |
| Sb06g033310 | Sorghum | Polynucleotide | SEQ ID NO: 477 |
| | bicolor | Polypeptide | SEQ ID NO: 478 |
| | | Genomic | SEQ ID NO: 3643 |
| Sb03g011700 | Sorghum | Polynucleotide | SEQ ID NO: 479 |
| | bicolor | Polypeptide | SEQ ID NO: 480 |
| | | Genomic | SEQ ID NO: 3644 |
| Sb04g032900 | Sorghum | Polynucleotide | SEQ ID NO: 481 |
| | bicolor | Polypeptide | SEQ ID NO: 482 |
| | | Genomic | SEQ ID NO: 3645 |
| Sb02g010830 | Sorghum | Polynucleotide | SEQ ID NO: 483 |
| | bicolor | Polypeptide | SEQ ID NO: 484 |
| | | Genomic | SEQ ID NO: 3646 |
| Sb09g019740 | Sorghum | Polynucleotide | SEQ ID NO: 485 |
| | bicolor | Polypeptide | SEQ ID NO: 486 |
| | | Genomic | SEQ ID NO: 3647 |
| Sb06g033600 | Sorghum | Polynucleotide | SEQ ID NO: 487 |
| | bicolor | Polypeptide | SEQ ID NO: 488 |
| | | Genomic | SEQ ID NO: 3648 |
| Sb04g032430 | Sorghum | Polynucleotide | SEQ ID NO: 489 |
| | bicolor | Polypeptide | SEQ ID NO: 490 |
| | | Genomic | SEQ ID NO: 3649 |
| Sb01g041700 | Sorghum | Polynucleotide | SEQ ID NO: 491 |
| | bicolor | Polypeptide | SEQ ID NO: 492 |
| | | Genomic | SEQ ID NO: 3650 |
| Sb04g026650 | Sorghum | Polynucleotide | SEQ ID NO: 493 |
| | bicolor | Polypeptide | SEQ ID NO: 494 |
| | | Genomic | SEQ ID NO: 3651 |
| Sb04g024150 | Sorghum | Polynucleotide | SEQ ID NO: 495 |
| | bicolor | Polypeptide | SEQ ID NO: 496 |
| | | Genomic | SEQ ID NO: 3652 |
| Sb04g032900 | Sorghum | Polynucleotide | SEQ ID NO: 497 |
| | bicolor | Polypeptide | SEQ ID NO: 498 |
| | | Genomic | SEQ ID NO: 3653 |
| Sb03g003200 | Sorghum | Polynucleotide | SEQ ID NO: 499 |
| | bicolor | Polypeptide | SEQ ID NO: 500 |
| | | Genomic | SEQ ID NO: 3654 |
| Sb03g006420 | Sorghum | Polynucleotide | SEQ ID NO: 501 |
| | bicolor | Polypeptide | SEQ ID NO: 502 |
| | | Genomic | SEQ ID NO: 3655 |
| Sb01g002960 | Sorghum | Polynucleotide | SEQ ID NO: 503 |
| | bicolor | Polypeptide | SEQ ID NO: 504 |
| | | Genomic | SEQ ID NO: 3656 |
| Sb02g000780 | Sorghum | Polynucleotide | SEQ ID NO: 505 |
| | bicolor | Polypeptide | SEQ ID NO: 506 |
| | | Genomic | SEQ ID NO: 3657 |
| Sb10g009590 | Sorghum | Polynucleotide | SEQ ID NO: 507 |
| | bicolor | Polypeptide | SEQ ID NO: 508 |
| | | Genomic | SEQ ID NO: 3658 |
| Sb05g019500 | Sorghum | Polynucleotide | SEQ ID NO: 509 |
| | bicolor | Polypeptide | SEQ ID NO: 510 |
| | | Genomic | SEQ ID NO: 3659 |
| Sb08g007586 | Sorghum | Polynucleotide | SEQ ID NO: 511 |
| | bicolor | Polypeptide | SEQ ID NO: 512 |
| | | Genomic | SEQ ID NO: 3660 |
| Sb01g018430 | Sorghum | Polynucleotide | SEQ ID NO: 513 |
| | bicolor | Polypeptide | SEQ ID NO: 514 |
| | | Genomic | SEQ ID NO: 3661 |
| Sb03g034260 | Sorghum | Polynucleotide | SEQ ID NO: 515 |
| | bicolor | Polypeptide | SEQ ID NO: 516 |
| | | Genomic | SEQ ID NO: 3662 |
| Sb03g027360 | Sorghum | Polynucleotide | SEQ ID NO: 517 |
| | bicolor | Polypeptide | SEQ ID NO: 518 |
| | | Genomic | SEQ ID NO: 3663 |
| Sb10g027790 | Sorghum | Polynucleotide | SEQ ID NO: 519 |
| | bicolor | Polypeptide | SEQ ID NO: 520 |
| | | Genomic | SEQ ID NO: 3664 |
| Sb10g002890 | Sorghum | Polynucleotide | SEQ ID NO: 521 |
| | bicolor | Polypeptide | SEQ ID NO: 522 |
| | | Genomic | SEQ ID NO: 3665 |
| Sb06g024150 | Sorghum | Polynucleotide | SEQ ID NO: 523 |
| | bicolor | Polypeptide | SEQ ID NO: 524 |
| | | Genomic | SEQ ID NO: 3666 |
| Sb06g024150 | Sorghum | Polynucleotide | SEQ ID NO: 525 |
| | bicolor | Polypeptide | SEQ ID NO: 526 |
| | | Genomic | SEQ ID NO: 3667 |
| Sb10g027790 | Sorghum | Polynucleotide | SEQ ID NO: 527 |
| | bicolor | Polypeptide | SEQ ID NO: 528 |
| | | Genomic | SEQ ID NO: 3668 |
| Sb04g028020 | Sorghum | Polynucleotide | SEQ ID NO: 529 |
| | bicolor | Polypeptide | SEQ ID NO: 530 |
| | | Genomic | SEQ ID NO: 3669 |
| Sb10g008090 | Sorghum | Polynucleotide | SEQ ID NO: 531 |
| | bicolor | Polypeptide | SEQ ID NO: 532 |
| | | Genomic | SEQ ID NO: 3670 |
| RHS1 | Sorghum | Polynucleotide | SEQ ID NO: 533 |
| | bicolor | Polypeptide | SEQ ID NO: 534 |
| | | Genomic | SEQ ID NO: 3671 |
| RHS2 | Sorghum | Polynucleotide | SEQ ID NO: 535 |
| | bicolor | Polypeptide | SEQ ID NO: 536 |
| | | Genomic | SEQ ID NO: 3672 |
| RHS3 | Sorghum | Polynucleotide | SEQ ID NO: 537 |
| | bicolor | Polypeptide | SEQ ID NO: 538 |
| | | Genomic | SEQ ID NO: 3673 |
| RHS4 | Arabidopsis | Polynucleotide | SEQ ID NO: 539 |
| | thaliana | Polypeptide | SEQ ID NO: 540 |
| | | Genomic | SEQ ID NO: 3674 |
| RHS5 | Sorghum | Polynucleotide | SEQ ID NO: 541 |
| | bicolor | Polypeptide | SEQ ID NO: 542 |
| | | Genomic | SEQ ID NO: 3675 |
| RHS6 | Sorghum | Polynucleotide | SEQ ID NO: 543 |
| | bicolor | Polypeptide | SEQ ID NO: 544 |
| | | Genomic | SEQ ID NO: 3676 |
| RHS7 | Sorghum | Polynucleotide | SEQ ID NO: 545 |
| | bicolor | Polypeptide | SEQ ID NO: 546 |
| | | Genomic | SEQ ID NO: 3677 |
| RHS8 | Sorghum | Polynucleotide | SEQ ID NO: 547 |
| | bicolor | Polypeptide | SEQ ID NO: 548 |
| | | Genomic | SEQ ID NO: 3678 |
| RHS9 | Sorghum | Polynucleotide | SEQ ID NO: 549 |
| | bicolor | Polypeptide | SEQ ID NO: 550 |
| | | Genomic | SEQ ID NO: 3679 |
| Sb03g029150 | Sorghum | Polynucleotide | SEQ ID NO: 551 |
| | bicolor | Polypeptide | SEQ ID NO: 552 |
| | | Genomic | SEQ ID NO: 3680 |
| RHS10 | Sorghum | Polynucleotide | SEQ ID NO: 553 |
| | bicolor | Polypeptide | SEQ ID NO: 554 |
| | | Genomic | SEQ ID NO: 3681 |
| Sb01g015140 | Sorghum | Polynucleotide | SEQ ID NO: 555 |
| | bicolor | Polypeptide | SEQ ID NO: 556 |
| | | Genomic | SEQ ID NO: 3682 |
| RHS11 | Sorghum | Polynucleotide | SEQ ID NO: 557 |
| | bicolor | Polypeptide | SEQ ID NO: 558 |
| | | Genomic | SEQ ID NO: 3683 |
| RHS12 | Sorghum | Polynucleotide | SEQ ID NO: 559 |
| | bicolor | Polypeptide | SEQ ID NO: 560 |
| | | Genomic | SEQ ID NO: 3684 |
| Sb03g006140 | Sorghum | Polynucleotide | SEQ ID NO: 561 |
| | bicolor | Polypeptide | SEQ ID NO: 562 |
| | | Genomic | SEQ ID NO: 3685 |
| Sb07g019540 | Sorghum | Polynucleotide | SEQ ID NO: 563 |
| | bicolor | Polypeptide | SEQ ID NO: 564 |
| | | Genomic | SEQ ID NO: 3686 |
| RHS13 | Arabidopsis | Polynucleotide | SEQ ID NO: 565 |
| | thaliana | Polypeptide | SEQ ID NO: 566 |
| | | Genomic | SEQ ID NO: 3687 |
| At4g15740 | Arabidopsis | Polynucleotide | SEQ ID NO: 567 |
| | thaliana | Polypeptide | SEQ ID NO: 568 |
| | | Genomic | SEQ ID NO: 3688 |
| RHS14 | Sorghum | Polynucleotide | SEQ ID NO: 569 |
| | bicolor | Polypeptide | SEQ ID NO: 570 |
| | | Genomic | SEQ ID NO: 3689 |
| RHS15 | Sorghum | Polynucleotide | SEQ ID NO: 571 |
| | bicolor | Polypeptide | SEQ ID NO: 572 |
| | | Genomic | SEQ ID NO: 3690 |
| RHS16 | Sorghum | Polynucleotide | SEQ ID NO: 573 |
| | bicolor | Polypeptide | SEQ ID NO: 574 |
| | | Genomic | SEQ ID NO: 3691 |
| Sb07g023200 | Sorghum | Polynucleotide | SEQ ID NO: 575 |
| | bicolor | Polypeptide | SEQ ID NO: 576 |
| | | Genomic | SEQ ID NO: 3692 |
| Sb02g026818 | Sorghum | Polynucleotide | SEQ ID NO: 577 |
| | bicolor | Polypeptide | SEQ ID NO: 578 |
| | | Genomic | SEQ ID NO: 3693 |
| RHS17 | Sorghum | Polynucleotide | SEQ ID NO: 579 |
| | bicolor | Polypeptide | SEQ ID NO: 580 |
| | | Genomic | SEQ ID NO: 3694 |
| Sb04g010270 | Sorghum | Polynucleotide | SEQ ID NO: 581 |
| | bicolor | Polypeptide | SEQ ID NO: 582 |
| | | Genomic | SEQ ID NO: 3695 |
| RHS18 | Sorghum | Polynucleotide | SEQ ID NO: 583 |
| | bicolor | Polypeptide | SEQ ID NO: 584 |
| | | Genomic | SEQ ID NO: 3696 |
| Sb01g039360 | Sorghum | Polynucleotide | SEQ ID NO: 585 |
| | bicolor | Polypeptide | SEQ ID NO: 586 |
| | | Genomic | SEQ ID NO: 3697 |
| RHS19 | Sorghum | Polynucleotide | SEQ ID NO: 587 |
| | bicolor | Polypeptide | SEQ ID NO: 588 |
| | | Genomic | SEQ ID NO: 3698 |
| Sb04g003090 | Sorghum | Polynucleotide | SEQ ID NO: 589 |
| | bicolor | Polypeptide | SEQ ID NO: 590 |
| | | Genomic | SEQ ID NO: 3699 |
| Sb01g030590 | Sorghum | Polynucleotide | SEQ ID NO: 591 |
| | bicolor | Polypeptide | SEQ ID NO: 592 |
| | | Genomic | SEQ ID NO: 3700 |
| Sb04g003090 | Sorghum | Polynucleotide | SEQ ID NO: 593 |
| | bicolor | Polypeptide | SEQ ID NO: 594 |
| | | Genomic | SEQ ID NO: 3701 |
| Sb01g030590 | Sorghum | Polynucleotide | SEQ ID NO: 595 |
| | bicolor | Polypeptide | SEQ ID NO: 596 |
| | | Genomic | SEQ ID NO: 3702 |
| Sb02g034435 | Sorghum | Polynucleotide | SEQ ID NO: 597 |
| | bicolor | Polypeptide | SEQ ID NO: 598 |
| | | Genomic | SEQ ID NO: 3703 |
| At1g58270 | Arabidopsis | Polynucleotide | SEQ ID NO: 599 |
| | thaliana | Polypeptide | SEQ ID NO: 600 |
| | | Genomic | SEQ ID NO: 3704 |
| Sb04g026290 | Sorghum | Polynucleotide | SEQ ID NO: 601 |
| | bicolor | Polypeptide | SEQ ID NO: 602 |
| | | Genomic | SEQ ID NO: 3705 |
| Sb04g030020 | Sorghum | Polynucleotide | SEQ ID NO: 603 |
| | bicolor | Polypeptide | SEQ ID NO: 604 |
| | | Genomic | SEQ ID NO: 3706 |
| Sb03g043660 | Sorghum | Polynucleotide | SEQ ID NO: 605 |
| | bicolor | Polypeptide | SEQ ID NO: 606 |
| | | Genomic | SEQ ID NO: 3707 |
| At5g02330 | Arabidopsis | Polynucleotide | SEQ ID NO: 607 |
| | thaliana | Polypeptide | SEQ ID NO: 608 |
| | | Genomic | SEQ ID NO: 3708 |
| Sb02g020860 | Sorghum | Polynucleotide | SEQ ID NO: 609 |
| | bicolor | Polypeptide | SEQ ID NO: 610 |
| | | Genomic | SEQ ID NO: 3709 |
| Sb04g000750 | Sorghum | Polynucleotide | SEQ ID NO: 611 |
| | bicolor | Polypeptide | SEQ ID NO: 612 |
| | | Genomic | SEQ ID NO: 3710 |
| Sb02g005440 | Sorghum | Polynucleotide | SEQ ID NO: 613 |
| | bicolor | Polypeptide | SEQ ID NO: 614 |
| | | Genomic | SEQ ID NO: 3711 |
| Sb02g039410 | Sorghum | Polynucleotide | SEQ ID NO: 615 |
| | bicolor | Polypeptide | SEQ ID NO: 616 |
| | | Genomic | SEQ ID NO: 3712 |
| Sb01g039740 | Sorghum | Polynucleotide | SEQ ID NO: 617 |
| | bicolor | Polypeptide | SEQ ID NO: 618 |
| | | Genomic | SEQ ID NO: 3713 |
| Sb04g020690 | Sorghum | Polynucleotide | SEQ ID NO: 619 |
| | bicolor | Polypeptide | SEQ ID NO: 620 |
| | | Genomic | SEQ ID NO: 3714 |
| Sb04g002190 | Sorghum | Polynucleotide | SEQ ID NO: 621 |
| | bicolor | Polypeptide | SEQ ID NO: 622 |
| | | Genomic | SEQ ID NO: 3715 |
| Sb09g028680 | Sorghum | Polynucleotide | SEQ ID NO: 623 |
| | bicolor | Polypeptide | SEQ ID NO: 624 |
| | | Genomic | SEQ ID NO: 3716 |
| dpzm08g032000 | Zea mays | Polynucleotide | SEQ ID NO: 625 |
| | | Polypeptide | SEQ ID NO: 626 |
| | | Genomic | SEQ ID NO: 3717 |
| Sb03g041600 | Sorghum | Polynucleotide | SEQ ID NO: 627 |
| | bicolor | Polypeptide | SEQ ID NO: 628 |
| | | Genomic | SEQ ID NO: 3718 |
| Sb06g013820 | Sorghum | Polynucleotide | SEQ ID NO: 629 |
| | bicolor | Polypeptide | SEQ ID NO: 630 |
| | | Genomic | SEQ ID NO: 3719 |
| Sb03g023990 | Sorghum | Polynucleotide | SEQ ID NO: 631 |
| | bicolor | Polypeptide | SEQ ID NO: 632 |
| | | Genomic | SEQ ID NO: 3720 |
| Sb03g042970 | Sorghum | Polynucleotide | SEQ ID NO: 633 |
| | bicolor | Polypeptide | SEQ ID NO: 634 |
| | | Genomic | SEQ ID NO: 3721 |
| Sb06g006920 | Sorghum | Polynucleotide | SEQ ID NO: 635 |
| | bicolor | Polypeptide | SEQ ID NO: 636 |
| | | Genomic | SEQ ID NO: 3722 |
| Sb06g024150 | Sorghum | Polynucleotide | SEQ ID NO: 637 |
| | bicolor | Polypeptide | SEQ ID NO: 638 |
| | | Genomic | SEQ ID NO: 3723 |
| dpzm06g048910 | Zea mays | Polynucleotide | SEQ ID NO: 639 |
| | | Polypeptide | SEQ ID NO: 640 |
| | | Genomic | SEQ ID NO: 3724 |
| Sb09g028680 | Sorghum | Polynucleotide | SEQ ID NO: 641 |
| | bicolor | Polypeptide | SEQ ID NO: 642 |
| | | Genomic | SEQ ID NO: 3725 |
| Sb01g032930 | Sorghum | Polynucleotide | SEQ ID NO: 643 |
| | bicolor | Polypeptide | SEQ ID NO: 644 |
| | | Genomic | SEQ ID NO: 3726 |
| Sb02g039570 | Sorghum | Polynucleotide | SEQ ID NO: 645 |
| | bicolor | Polypeptide | SEQ ID NO: 646 |
| | | Genomic | SEQ ID NO: 3727 |
| Sb05g025900 | Sorghum | Polynucleotide | SEQ ID NO: 647 |
| | bicolor | Polypeptide | SEQ ID NO: 648 |
| | | Genomic | SEQ ID NO: 3728 |
| Sb03g036480 | Sorghum | Polynucleotide | SEQ ID NO: 649 |
| | bicolor | Polypeptide | SEQ ID NO: 650 |
| | | Genomic | SEQ ID NO: 3729 |
| dpzm00g103627 | Zea mays | Polynucleotide | SEQ ID NO: 651 |
| | | Polypeptide | SEQ ID NO: 652 |
| | | Genomic | SEQ ID NO: 3730 |
| Sb08g017080 | Sorghum | Polynucleotide | SEQ ID NO: 653 |
| | bicolor | Polypeptide | SEQ ID NO: 654 |
| | | Genomic | SEQ ID NO: 3731 |
| Sb04g034520 | Sorghum | Polynucleotide | SEQ ID NO: 655 |
| | bicolor | Polypeptide | SEQ ID NO: 656 |
| | | Genomic | SEQ ID NO: 3732 |
| Sb08g017660 | Sorghum | Polynucleotide | SEQ ID NO: 657 |
| | bicolor | Polypeptide | SEQ ID NO: 658 |
| | | Genomic | SEQ ID NO: 3733 |
| Sb03g036580 | Sorghum | Polynucleotide | SEQ ID NO: 659 |
| | bicolor | Polypeptide | SEQ ID NO: 660 |
| | | Genomic | SEQ ID NO: 3734 |
| Sb02g009340 | Sorghum | Polynucleotide | SEQ ID NO: 661 |
| | bicolor | Polypeptide | SEQ ID NO: 662 |
| | | Genomic | SEQ ID NO: 3735 |
| Sb07g021290 | Sorghum | Polynucleotide | SEQ ID NO: 663 |
| | bicolor | Polypeptide | SEQ ID NO: 664 |
| | | Genomic | SEQ ID NO: 3736 |
| Sb03g039790 | Sorghum | Polynucleotide | SEQ ID NO: 665 |
| | bicolor | Polypeptide | SEQ ID NO: 666 |
| | | Genomic | SEQ ID NO: 3737 |
| Sb06g032000 | Sorghum | Polynucleotide | SEQ ID NO: 667 |
| | bicolor | Polypeptide | SEQ ID NO: 668 |
| | | Genomic | SEQ ID NO: 3738 |
| Sb09g029126 | Sorghum | Polynucleotide | SEQ ID NO: 669 |
| | bicolor | Polypeptide | SEQ ID NO: 670 |
| | | Genomic | SEQ ID NO: 3739 |
| Sb02g024620 | Sorghum | Polynucleotide | SEQ ID NO: 671 |
| | bicolor | Polypeptide | SEQ ID NO: 672 |
| | | Genomic | SEQ ID NO: 3740 |
| Sb01g041100 | Sorghum | Polynucleotide | SEQ ID NO: 673 |
| | bicolor | Polypeptide | SEQ ID NO: 674 |
| | | Genomic | SEQ ID NO: 3741 |
| Sb01g038910 | Sorghum | Polynucleotide | SEQ ID NO: 675 |
| | bicolor | Polypeptide | SEQ ID NO: 676 |
| | | Genomic | SEQ ID NO: 3742 |
| Sb03g036480 | Sorghum | Polynucleotide | SEQ ID NO: 677 |
| | bicolor | Polypeptide | SEQ ID NO: 678 |
| | | Genomic | SEQ ID NO: 3743 |
| Sb08g021375 | Sorghum | Polynucleotide | SEQ ID NO: 679 |
| | bicolor | Polypeptide | SEQ ID NO: 680 |
| | | Genomic | SEQ ID NO: 3744 |
| Sb02g028255 | Sorghum | Polynucleotide | SEQ ID NO: 681 |
| | bicolor | Polypeptide | SEQ ID NO: 682 |
| | | Genomic | SEQ ID NO: 3745 |
| Sb04g020470 | Sorghum | Polynucleotide | SEQ ID NO: 683 |
| | bicolor | Polypeptide | SEQ ID NO: 684 |
| | | Genomic | SEQ ID NO: 3746 |
| Sb06g030230 | Sorghum | Polynucleotide | SEQ ID NO: 685 |
| | bicolor | Polypeptide | SEQ ID NO: 686 |
| | | Genomic | SEQ ID NO: 3747 |
| Sb03g041580 | Sorghum | Polynucleotide | SEQ ID NO: 687 |
| | bicolor | Polypeptide | SEQ ID NO: 688 |
| | | Genomic | SEQ ID NO: 3748 |
| Sb01g048640 | Sorghum | Polynucleotide | SEQ ID NO: 689 |
| | bicolor | Polypeptide | SEQ ID NO: 690 |
| | | Genomic | SEQ ID NO: 3749 |
| Sb01g026405 | Sorghum | Polynucleotide | SEQ ID NO: 691 |
| | bicolor | Polypeptide | SEQ ID NO: 692 |
| | | Genomic | SEQ ID NO: 3750 |
| Sb05g004850 | Sorghum | Polynucleotide | SEQ ID NO: 693 |
| | bicolor | Polypeptide | SEQ ID NO: 694 |
| | | Genomic | SEQ ID NO: 3751 |
| Sb09g017570 | Sorghum | Polynucleotide | SEQ ID NO: 695 |
| | bicolor | Polypeptide | SEQ ID NO: 696 |
| | | Genomic | SEQ ID NO: 3752 |
| Sb01g038910 | Sorghum | Polynucleotide | SEQ ID NO: 697 |
| | bicolor | Polypeptide | SEQ ID NO: 698 |
| | | Genomic | SEQ ID NO: 3753 |
| Sb09g021610 | Sorghum | Polynucleotide | SEQ ID NO: 699 |
| | bicolor | Polypeptide | SEQ ID NO: 700 |
| | | Genomic | SEQ ID NO: 3754 |
| Sb07g028600 | Sorghum | Polynucleotide | SEQ ID NO: 701 |
| | bicolor | Polypeptide | SEQ ID NO: 702 |
| | | Genomic | SEQ ID NO: 3755 |
| Sb10g022110 | Sorghum | Polynucleotide | SEQ ID NO: 703 |
| | bicolor | Polypeptide | SEQ ID NO: 704 |
| | | Genomic | SEQ ID NO: 3756 |
| Sb02g032815 | Sorghum | Polynucleotide | SEQ ID NO: 705 |
| | bicolor | Polypeptide | SEQ ID NO: 706 |
| | | Genomic | SEQ ID NO: 3757 |
| Sb08g002690 | Sorghum | Polynucleotide | SEQ ID NO: 707 |
| | bicolor | Polypeptide | SEQ ID NO: 708 |
| | | Genomic | SEQ ID NO: 3758 |
| Sb04g009200 | Sorghum | Polynucleotide | SEQ ID NO: 709 |
| | bicolor | Polypeptide | SEQ ID NO: 710 |
| | | Genomic | SEQ ID NO: 3759 |
| Sb01g045060 | Sorghum | Polynucleotide | SEQ ID NO: 711 |
| | bicolor | Polypeptide | SEQ ID NO: 712 |
| | | Genomic | SEQ ID NO: 3760 |
| Sb09g022260 | Sorghum | Polynucleotide | SEQ ID NO: 713 |
| | bicolor | Polypeptide | SEQ ID NO: 714 |
| | | Genomic | SEQ ID NO: 3761 |
| Sb04g007280 | Sorghum | Polynucleotide | SEQ ID NO: 715 |
| | bicolor | Polypeptide | SEQ ID NO: 716 |
| | | Genomic | SEQ ID NO: 3762 |
| Sb09g018630 | Sorghum | Polynucleotide | SEQ ID NO: 717 |
| | bicolor | Polypeptide | SEQ ID NO: 718 |
| | | Genomic | SEQ ID NO: 3763 |
| Sb03g031420 | Sorghum | Polynucleotide | SEQ ID NO: 719 |
| | bicolor | Polypeptide | SEQ ID NO: 720 |
| | | Genomic | SEQ ID NO: 3764 |
| Sb06g033030 | Sorghum | Polynucleotide | SEQ ID NO: 721 |
| | bicolor | Polypeptide | SEQ ID NO: 722 |
| | | Genomic | SEQ ID NO: 3765 |
| Sb06g030740 | Sorghum | Polynucleotide | SEQ ID NO: 723 |
| | bicolor | Polypeptide | SEQ ID NO: 724 |
| | | Genomic | SEQ ID NO: 3766 |
| Sb09g020780 | Sorghum | Polynucleotide | SEQ ID NO: 725 |
| | bicolor | Polypeptide | SEQ ID NO: 726 |
| | | Genomic | SEQ ID NO: 3767 |
| Sb03g004390 | Sorghum | Polynucleotide | SEQ ID NO: 727 |
| | bicolor | Polypeptide | SEQ ID NO: 728 |
| | | Genomic | SEQ ID NO: 3768 |
| Sb10g007830 | Sorghum | Polynucleotide | SEQ ID NO: 729 |
| | bicolor | Polypeptide | SEQ ID NO: 730 |
| | | Genomic | SEQ ID NO: 3769 |
| Sb03g042820 | Sorghum | Polynucleotide | SEQ ID NO: 731 |
| | bicolor | Polypeptide | SEQ ID NO: 732 |
| | | Genomic | SEQ ID NO: 3770 |
| Sb09g029600 | Sorghum | Polynucleotide | SEQ ID NO: 733 |
| | bicolor | Polypeptide | SEQ ID NO: 734 |
| | | Genomic | SEQ ID NO: 3771 |
| Sb0010s003120 | Sorghum | Polynucleotide | SEQ ID NO: 735 |
| | bicolor | Polypeptide | SEQ ID NO: 736 |
| | | Genomic | SEQ ID NO: 3772 |
| Sb0010s012040 | Sorghum | Polynucleotide | SEQ ID NO: 737 |
| | bicolor | Polypeptide | SEQ ID NO: 738 |
| | | Genomic | SEQ ID NO: 3773 |
| Sb0012s010440 | Sorghum | Polynucleotide | SEQ ID NO: 739 |
| | bicolor | Polypeptide | SEQ ID NO: 740 |
| | | Genomic | SEQ ID NO: 3774 |
| Sb0013s011130 | Sorghum | Polynucleotide | SEQ ID NO: 741 |
| | bicolor | Polypeptide | SEQ ID NO: 742 |
| | | Genomic | SEQ ID NO: 3775 |
| Sb0059s003070 | Sorghum | Polynucleotide | SEQ ID NO: 743 |
| | bicolor | Polypeptide | SEQ ID NO: 744 |
| | | Genomic | SEQ ID NO: 3776 |
| Sb0073s002030 | Sorghum | Polynucleotide | SEQ ID NO: 745 |
| | bicolor | Polypeptide | SEQ ID NO: 746 |
| | | Genomic | SEQ ID NO: 3777 |
| Sb0073s002040 | Sorghum | Polynucleotide | SEQ ID NO: 747 |
| | bicolor | Polypeptide | SEQ ID NO: 748 |
| | | Genomic | SEQ ID NO: 3778 |
| Sb01g000255 | Sorghum | Polynucleotide | SEQ ID NO: 749 |
| | bicolor | Polypeptide | SEQ ID NO: 750 |
| | | Genomic | SEQ ID NO: 3779 |
| Sb01g000430 | Sorghum | Polynucleotide | SEQ ID NO: 751 |
| | bicolor | Polypeptide | SEQ ID NO: 752 |
| | | Genomic | SEQ ID NO: 3780 |
| Sb01g000550 | Sorghum | Polynucleotide | SEQ ID NO: 753 |
| | bicolor | Polypeptide | SEQ ID NO: 754 |
| | | Genomic | SEQ ID NO: 3781 |
| Sb01g000725 | Sorghum | Polynucleotide | SEQ ID NO: 755 |
| | bicolor | Polypeptide | SEQ ID NO: 756 |
| | | Genomic | SEQ ID NO: 3782 |
| Sb01g001140 | Sorghum | Polynucleotide | SEQ ID NO: 757 |
| | bicolor | Polypeptide | SEQ ID NO: 758 |
| | | Genomic | SEQ ID NO: 3783 |
| Sb01g004400 | Sorghum | Polynucleotide | SEQ ID NO: 759 |
| | bicolor | Polypeptide | SEQ ID NO: 760 |
| | | Genomic | SEQ ID NO: 3784 |
| Sb01g001630 | Sorghum | Polynucleotide | SEQ ID NO: 761 |
| | bicolor | Polypeptide | SEQ ID NO: 762 |
| | | Genomic | SEQ ID NO: 3785 |
| Sb01g004670 | Sorghum | Polynucleotide | SEQ ID NO: 763 |
| | bicolor | Polypeptide | SEQ ID NO: 764 |
| | | Genomic | SEQ ID NO: 3786 |
| Sb01g002130 | Sorghum | Polynucleotide | SEQ ID NO: 765 |
| | bicolor | Polypeptide | SEQ ID NO: 766 |
| | | Genomic | SEQ ID NO: 3787 |
| Sb01g002240 | Sorghum | Polynucleotide | SEQ ID NO: 767 |
| | bicolor | Polypeptide | SEQ ID NO: 768 |
| | | Genomic | SEQ ID NO: 3788 |
| Sb01g005470 | Sorghum | Polynucleotide | SEQ ID NO: 769 |
| | bicolor | Polypeptide | SEQ ID NO: 770 |
| | | Genomic | SEQ ID NO: 3789 |
| Sb01g002520 | Sorghum | Polynucleotide | SEQ ID NO: 771 |
| | bicolor | Polypeptide | SEQ ID NO: 772 |
| | | Genomic | SEQ ID NO: 3790 |
| Sb01g002660 | Sorghum | Polynucleotide | SEQ ID NO: 773 |
| | bicolor | Polypeptide | SEQ ID NO: 774 |
| | | Genomic | SEQ ID NO: 3791 |
| Sb01g002760 | Sorghum | Polynucleotide | SEQ ID NO: 775 |
| | bicolor | Polypeptide | SEQ ID NO: 776 |
| | | Genomic | SEQ ID NO: 3792 |
| Sb01g002780 | Sorghum | Polynucleotide | SEQ ID NO: 777 |
| | bicolor | Polypeptide | SEQ ID NO: 778 |
| | | Genomic | SEQ ID NO: 3793 |
| Sb01g003210 | Sorghum | Polynucleotide | SEQ ID NO: 779 |
| | bicolor | Polypeptide | SEQ ID NO: 780 |
| | | Genomic | SEQ ID NO: 3794 |
| Sb01g003330 | Sorghum | Polynucleotide | SEQ ID NO: 781 |
| | bicolor | Polypeptide | SEQ ID NO: 782 |
| | | Genomic | SEQ ID NO: 3795 |
| Sb01g003430 | Sorghum | Polynucleotide | SEQ ID NO: 783 |
| | bicolor | Polypeptide | SEQ ID NO: 784 |
| | | Genomic | SEQ ID NO: 3796 |
| Sb01g003740 | Sorghum | Polynucleotide | SEQ ID NO: 785 |
| | bicolor | Polypeptide | SEQ ID NO: 786 |
| | | Genomic | SEQ ID NO: 3797 |
| Sb01g003840 | Sorghum | Polynucleotide | SEQ ID NO: 787 |
| | bicolor | Polypeptide | SEQ ID NO: 788 |
| | | Genomic | SEQ ID NO: 3798 |
| Sb01g003850 | Sorghum | Polynucleotide | SEQ ID NO: 789 |
| | bicolor | Polypeptide | SEQ ID NO: 790 |
| | | Genomic | SEQ ID NO: 3799 |
| Sb01g003960 | Sorghum | Polynucleotide | SEQ ID NO: 791 |
| | bicolor | Polypeptide | SEQ ID NO: 792 |
| | | Genomic | SEQ ID NO: 3800 |
| Sb01g004060 | Sorghum | Polynucleotide | SEQ ID NO: 793 |
| | bicolor | Polypeptide | SEQ ID NO: 794 |
| | | Genomic | SEQ ID NO: 3801 |
| Sb01g004240 | Sorghum | Polynucleotide | SEQ ID NO: 795 |
| | bicolor | Polypeptide | SEQ ID NO: 796 |
| | | Genomic | SEQ ID NO: 3802 |
| Sb01g004330 | Sorghum | Polynucleotide | SEQ ID NO: 797 |
| | bicolor | Polypeptide | SEQ ID NO: 798 |
| | | Genomic | SEQ ID NO: 3803 |
| Sb01g004360 | Sorghum | Polynucleotide | SEQ ID NO: 799 |
| | bicolor | Polypeptide | SEQ ID NO: 800 |
| | | Genomic | SEQ ID NO: 3804 |
| Sb01g004400 | Sorghum | Polynucleotide | SEQ ID NO: 801 |
| | bicolor | Polypeptide | SEQ ID NO: 802 |
| | | Genomic | SEQ ID NO: 3805 |
| Sb01g004550 | Sorghum | Polynucleotide | SEQ ID NO: 803 |
| | bicolor | Polypeptide | SEQ ID NO: 804 |
| | | Genomic | SEQ ID NO: 3806 |
| Sb01g004950 | Sorghum | Polynucleotide | SEQ ID NO: 805 |
| | bicolor | Polypeptide | SEQ ID NO: 806 |
| | | Genomic | SEQ ID NO: 3807 |
| Sb01g004980 | Sorghum | Polynucleotide | SEQ ID NO: 807 |
| | bicolor | Polypeptide | SEQ ID NO: 808 |
| | | Genomic | SEQ ID NO: 3808 |
| Sb01g005070 | Sorghum | Polynucleotide | SEQ ID NO: 809 |
| | bicolor | Polypeptide | SEQ ID NO: 810 |
| | | Genomic | SEQ ID NO: 3809 |
| Sb01g005110 | Sorghum | Polynucleotide | SEQ ID NO: 811 |
| | bicolor | Polypeptide | SEQ ID NO: 812 |
| | | Genomic | SEQ ID NO: 3810 |
| Sb01g005400 | Sorghum | Polynucleotide | SEQ ID NO: 813 |
| | bicolor | Polypeptide | SEQ ID NO: 814 |
| | | Genomic | SEQ ID NO: 3811 |
| Sb01g005420 | Sorghum | Polynucleotide | SEQ ID NO: 815 |
| | bicolor | Polypeptide | SEQ ID NO: 816 |
| | | Genomic | SEQ ID NO: 3812 |
| Sb01g005650 | Sorghum | Polynucleotide | SEQ ID NO: 817 |
| | bicolor | Polypeptide | SEQ ID NO: 818 |
| | | Genomic | SEQ ID NO: 3813 |
| Sb01g006200 | Sorghum | Polynucleotide | SEQ ID NO: 819 |
| | bicolor | Polypeptide | SEQ ID NO: 820 |
| | | Genomic | SEQ ID NO: 3814 |
| Sb01g006200 | Sorghum | Polynucleotide | SEQ ID NO: 821 |
| | bicolor | Polypeptide | SEQ ID NO: 822 |
| | | Genomic | SEQ ID NO: 3815 |
| Sb01g006220 | Sorghum | Polynucleotide | SEQ ID NO: 823 |
| | bicolor | Polypeptide | SEQ ID NO: 824 |
| | | Genomic | SEQ ID NO: 3816 |
| Sb01g006280 | Sorghum | Polynucleotide | SEQ ID NO: 825 |
| | bicolor | Polypeptide | SEQ ID NO: 826 |
| | | Genomic | SEQ ID NO: 3817 |
| Sb01g006340 | Sorghum | Polynucleotide | SEQ ID NO: 827 |
| | bicolor | Polypeptide | SEQ ID NO: 828 |
| | | Genomic | SEQ ID NO: 3818 |
| Sb01g006350 | Sorghum | Polynucleotide | SEQ ID NO: 829 |
| | bicolor | Polypeptide | SEQ ID NO: 830 |
| | | Genomic | SEQ ID NO: 3819 |
| Sb01g006410 | Sorghum | Polynucleotide | SEQ ID NO: 831 |
| | bicolor | Polypeptide | SEQ ID NO: 832 |
| | | Genomic | SEQ ID NO: 3820 |
| Sb01g006480 | Sorghum | Polynucleotide | SEQ ID NO: 833 |
| | bicolor | Polypeptide | SEQ ID NO: 834 |
| | | Genomic | SEQ ID NO: 3821 |
| Sb01g006630 | Sorghum | Polynucleotide | SEQ ID NO: 835 |
| | bicolor | Polypeptide | SEQ ID NO: 836 |
| | | Genomic | SEQ ID NO: 3822 |
| Sb01g006650 | Sorghum | Polynucleotide | SEQ ID NO: 837 |
| | bicolor | Polypeptide | SEQ ID NO: 838 |
| | | Genomic | SEQ ID NO: 3823 |
| Sb01g012050 | Sorghum | Polynucleotide | SEQ ID NO: 839 |
| | bicolor | Polypeptide | SEQ ID NO: 840 |
| | | Genomic | SEQ ID NO: 3824 |
| Sb01g007240 | Sorghum | Polynucleotide | SEQ ID NO: 841 |
| | bicolor | Polypeptide | SEQ ID NO: 842 |
| | | Genomic | SEQ ID NO: 3825 |
| Sb01g007290 | Sorghum | Polynucleotide | SEQ ID NO: 843 |
| | bicolor | Polypeptide | SEQ ID NO: 844 |
| | | Genomic | SEQ ID NO: 3826 |
| Sb01g007430 | Sorghum | Polynucleotide | SEQ ID NO: 845 |
| | bicolor | Polypeptide | SEQ ID NO: 846 |
| | | Genomic | SEQ ID NO: 3827 |
| Sb01g007550 | Sorghum | Polynucleotide | SEQ ID NO: 847 |
| | bicolor | Polypeptide | SEQ ID NO: 848 |
| | | Genomic | SEQ ID NO: 3828 |
| Sb01g007760 | Sorghum | Polynucleotide | SEQ ID NO: 849 |
| | bicolor | Polypeptide | SEQ ID NO: 850 |
| | | Genomic | SEQ ID NO: 3829 |
| Sb01g007780 | Sorghum | Polynucleotide | SEQ ID NO: 851 |
| | bicolor | Polypeptide | SEQ ID NO: 852 |
| | | Genomic | SEQ ID NO: 3830 |
| Sb01g007850 | Sorghum | Polynucleotide | SEQ ID NO: 853 |
| | bicolor | Polypeptide | SEQ ID NO: 854 |
| | | Genomic | SEQ ID NO: 3831 |
| Sb01g008290 | Sorghum | Polynucleotide | SEQ ID NO: 855 |
| | bicolor | Polypeptide | SEQ ID NO: 856 |
| | | Genomic | SEQ ID NO: 3832 |
| Sb10g005120 | Sorghum | Polynucleotide | SEQ ID NO: 857 |
| | bicolor | Polypeptide | SEQ ID NO: 858 |
| | | Genomic | SEQ ID NO: 3833 |
| Sb01g008695 | Sorghum | Polynucleotide | SEQ ID NO: 859 |
| | bicolor | Polypeptide | SEQ ID NO: 860 |
| | | Genomic | SEQ ID NO: 3834 |
| Sb01g008740 | Sorghum | Polynucleotide | SEQ ID NO: 861 |
| | bicolor | Polypeptide | SEQ ID NO: 862 |
| | | Genomic | SEQ ID NO: 3835 |
| Sb01g009480 | Sorghum | Polynucleotide | SEQ ID NO: 863 |
| | bicolor | Polypeptide | SEQ ID NO: 864 |
| | | Genomic | SEQ ID NO: 3836 |
| Sb01g009560 | Sorghum | Polynucleotide | SEQ ID NO: 865 |
| | bicolor | Polypeptide | SEQ ID NO: 866 |
| | | Genomic | SEQ ID NO: 3837 |
| Sb01g009620 | Sorghum | Polynucleotide | SEQ ID NO: 867 |
| | bicolor | Polypeptide | SEQ ID NO: 868 |
| | | Genomic | SEQ ID NO: 3838 |
| Sb01g009950 | Sorghum | Polynucleotide | SEQ ID NO: 869 |
| | bicolor | Polypeptide | SEQ ID NO: 870 |
| | | Genomic | SEQ ID NO: 3839 |
| Sb01g009970 | Sorghum | Polynucleotide | SEQ ID NO: 871 |
| | bicolor | Polypeptide | SEQ ID NO: 872 |
| | | Genomic | SEQ ID NO: 3840 |
| Sb01g010050 | Sorghum | Polynucleotide | SEQ ID NO: 873 |
| | bicolor | Polypeptide | SEQ ID NO: 874 |
| | | Genomic | SEQ ID NO: 3841 |
| Sb01g010250 | Sorghum | Polynucleotide | SEQ ID NO: 875 |
| | bicolor | Polypeptide | SEQ ID NO: 876 |
| | | Genomic | SEQ ID NO: 3842 |
| Sb01g010310 | Sorghum | Polynucleotide | SEQ ID NO: 877 |
| | bicolor | Polypeptide | SEQ ID NO: 878 |
| | | Genomic | SEQ ID NO: 3843 |
| Sb01g010480 | Sorghum | Polynucleotide | SEQ ID NO: 879 |
| | bicolor | Polypeptide | SEQ ID NO: 880 |
| | | Genomic | SEQ ID NO: 3844 |
| Sb01g010610 | Sorghum | Polynucleotide | SEQ ID NO: 881 |
| | bicolor | Polypeptide | SEQ ID NO: 882 |
| | | Genomic | SEQ ID NO: 3845 |
| Sb01g010840 | Sorghum | Polynucleotide | SEQ ID NO: 883 |
| | bicolor | Polypeptide | SEQ ID NO: 884 |
| | | Genomic | SEQ ID NO: 3846 |
| Sb01g010920 | Sorghum | Polynucleotide | SEQ ID NO: 885 |
| | bicolor | Polypeptide | SEQ ID NO: 886 |
| | | Genomic | SEQ ID NO: 3847 |
| Sb01g010990 | Sorghum | Polynucleotide | SEQ ID NO: 887 |
| | bicolor | Polypeptide | SEQ ID NO: 888 |
| | | Genomic | SEQ ID NO: 3848 |
| Sb01g018330 | Sorghum | Polynucleotide | SEQ ID NO: 889 |
| | bicolor | Polypeptide | SEQ ID NO: 890 |
| | | Genomic | SEQ ID NO: 3849 |
| Sb01g011080 | Sorghum | Polynucleotide | SEQ ID NO: 891 |
| | bicolor | Polypeptide | SEQ ID NO: 892 |
| | | Genomic | SEQ ID NO: 3850 |
| Sb01g011240 | Sorghum | Polynucleotide | SEQ ID NO: 893 |
| | bicolor | Polypeptide | SEQ ID NO: 894 |
| | | Genomic | SEQ ID NO: 3851 |
| Sb01g011360 | Sorghum | Polynucleotide | SEQ ID NO: 895 |
| | bicolor | Polypeptide | SEQ ID NO: 896 |
| | | Genomic | SEQ ID NO: 3852 |
| Sb01g011520 | Sorghum | Polynucleotide | SEQ ID NO: 897 |
| | bicolor | Polypeptide | SEQ ID NO: 898 |
| | | Genomic | SEQ ID NO: 3853 |
| Sb01g019490 | Sorghum | Polynucleotide | SEQ ID NO: 899 |
| | bicolor | Polypeptide | SEQ ID NO: 900 |
| | | Genomic | SEQ ID NO: 3854 |
| Sb01g011810 | Sorghum | Polynucleotide | SEQ ID NO: 901 |
| | bicolor | Polypeptide | SEQ ID NO: 902 |
| | | Genomic | SEQ ID NO: 3855 |
| Sb01g012250 | Sorghum | Polynucleotide | SEQ ID NO: 903 |
| | bicolor | Polypeptide | SEQ ID NO: 904 |
| | | Genomic | SEQ ID NO: 3856 |
| Sb01g012260 | Sorghum | Polynucleotide | SEQ ID NO: 905 |
| | bicolor | Polypeptide | SEQ ID NO: 906 |
| | | Genomic | SEQ ID NO: 3857 |
| Sb01g012780 | Sorghum | Polynucleotide | SEQ ID NO: 907 |
| | bicolor | Polypeptide | SEQ ID NO: 908 |
| | | Genomic | SEQ ID NO: 3858 |
| Sb01g013070 | Sorghum | Polynucleotide | SEQ ID NO: 909 |
| | bicolor | Polypeptide | SEQ ID NO: 910 |
| | | Genomic | SEQ ID NO: 3859 |
| Sb01g013160 | Sorghum | Polynucleotide | SEQ ID NO: 911 |
| | bicolor | Polypeptide | SEQ ID NO: 912 |
| | | Genomic | SEQ ID NO: 3860 |
| Sb01g013180 | Sorghum | Polynucleotide | SEQ ID NO: 913 |
| | bicolor | Polypeptide | SEQ ID NO: 914 |
| | | Genomic | SEQ ID NO: 3861 |
| Sb01g013340 | Sorghum | Polynucleotide | SEQ ID NO: 915 |
| | bicolor | Polypeptide | SEQ ID NO: 916 |
| | | Genomic | SEQ ID NO: 3862 |
| Sb01g013560 | Sorghum | Polynucleotide | SEQ ID NO: 917 |
| | bicolor | Polypeptide | SEQ ID NO: 918 |
| | | Genomic | SEQ ID NO: 3863 |
| Sb01g013700 | Sorghum | Polynucleotide | SEQ ID NO: 919 |
| | bicolor | Polypeptide | SEQ ID NO: 920 |
| | | Genomic | SEQ ID NO: 3864 |
| Sb01g013810 | Sorghum | Polynucleotide | SEQ ID NO: 921 |
| | bicolor | Polypeptide | SEQ ID NO: 922 |
| | | Genomic | SEQ ID NO: 3865 |
| Sb01g014290 | Sorghum | Polynucleotide | SEQ ID NO: 923 |
| | bicolor | Polypeptide | SEQ ID NO: 924 |
| | | Genomic | SEQ ID NO: 3866 |
| Sb01g014370 | Sorghum | Polynucleotide | SEQ ID NO: 925 |
| | bicolor | Polypeptide | SEQ ID NO: 926 |
| | | Genomic | SEQ ID NO: 3867 |
| Sb01g014910 | Sorghum | Polynucleotide | SEQ ID NO: 927 |
| | bicolor | Polypeptide | SEQ ID NO: 928 |
| | | Genomic | SEQ ID NO: 3868 |
| Sb01g025600 | Sorghum | Polynucleotide | SEQ ID NO: 929 |
| | bicolor | Polypeptide | SEQ ID NO: 930 |
| | | Genomic | SEQ ID NO: 3869 |
| Sb01g025610 | Sorghum | Polynucleotide | SEQ ID NO: 931 |
| | bicolor | Polypeptide | SEQ ID NO: 932 |
| | | Genomic | SEQ ID NO: 3870 |
| Sb01g015040 | Sorghum | Polynucleotide | SEQ ID NO: 933 |
| | bicolor | Polypeptide | SEQ ID NO: 934 |
| | | Genomic | SEQ ID NO: 3871 |
| Sb01g015210 | Sorghum | Polynucleotide | SEQ ID NO: 935 |
| | bicolor | Polypeptide | SEQ ID NO: 936 |
| | | Genomic | SEQ ID NO: 3872 |
| Sb01g015240 | Sorghum | Polynucleotide | SEQ ID NO: 937 |
| | bicolor | Polypeptide | SEQ ID NO: 938 |
| | | Genomic | SEQ ID NO: 3873 |
| Sb07g008201 | Sorghum | Polynucleotide | SEQ ID NO: 939 |
| | bicolor | Polypeptide | SEQ ID NO: 940 |
| | | Genomic | SEQ ID NO: 3874 |
| Sb01g015770 | Sorghum | Polynucleotide | SEQ ID NO: 941 |
| | bicolor | Polypeptide | SEQ ID NO: 942 |
| | | Genomic | SEQ ID NO: 3875 |
| Sb01g015970 | Sorghum | Polynucleotide | SEQ ID NO: 943 |
| | bicolor | Polypeptide | SEQ ID NO: 944 |
| | | Genomic | SEQ ID NO: 3876 |
| Sb01g016020 | Sorghum | Polynucleotide | SEQ ID NO: 945 |
| | bicolor | Polypeptide | SEQ ID NO: 946 |
| | | Genomic | SEQ ID NO: 3877 |
| Sb01g016170 | Sorghum | Polynucleotide | SEQ ID NO: 947 |
| | bicolor | Polypeptide | SEQ ID NO: 948 |
| | | Genomic | SEQ ID NO: 3878 |
| Sb01g016490 | Sorghum | Polynucleotide | SEQ ID NO: 949 |
| | bicolor | Polypeptide | SEQ ID NO: 950 |
| | | Genomic | SEQ ID NO: 3879 |
| Sb01g016600 | Sorghum | Polynucleotide | SEQ ID NO: 951 |
| | bicolor | Polypeptide | SEQ ID NO: 952 |
| | | Genomic | SEQ ID NO: 3880 |
| Sb01g030990 | Sorghum | Polynucleotide | SEQ ID NO: 953 |
| | bicolor | Polypeptide | SEQ ID NO: 954 |
| | | Genomic | SEQ ID NO: 3881 |
| Sb01g017230 | Sorghum | Polynucleotide | SEQ ID NO: 955 |
| | bicolor | Polypeptide | SEQ ID NO: 956 |
| | | Genomic | SEQ ID NO: 3882 |
| Sb01g017450 | Sorghum | Polynucleotide | SEQ ID NO: 957 |
| | bicolor | Polypeptide | SEQ ID NO: 958 |
| | | Genomic | SEQ ID NO: 3883 |
| Sb01g017460 | Sorghum | Polynucleotide | SEQ ID NO: 959 |
| | bicolor | Polypeptide | SEQ ID NO: 960 |
| | | Genomic | SEQ ID NO: 3884 |
| Sb01g017540 | Sorghum | Polynucleotide | SEQ ID NO: 961 |
| | bicolor | Polypeptide | SEQ ID NO: 962 |
| | | Genomic | SEQ ID NO: 3885 |
| Sb01g017560 | Sorghum | Polynucleotide | SEQ ID NO: 963 |
| | bicolor | Polypeptide | SEQ ID NO: 964 |
| | | Genomic | SEQ ID NO: 3886 |
| Sb01g032390 | Sorghum | Polynucleotide | SEQ ID NO: 965 |
| | bicolor | Polypeptide | SEQ ID NO: 966 |
| | | Genomic | SEQ ID NO: 3887 |
| Sb01g017720 | Sorghum | Polynucleotide | SEQ ID NO: 967 |
| | bicolor | Polypeptide | SEQ ID NO: 968 |
| | | Genomic | SEQ ID NO: 3888 |
| Sb01g018600 | Sorghum | Polynucleotide | SEQ ID NO: 969 |
| | bicolor | Polypeptide | SEQ ID NO: 970 |
| | | Genomic | SEQ ID NO: 3889 |
| Sb01g018700 | Sorghum | Polynucleotide | SEQ ID NO: 971 |
| | bicolor | Polypeptide | SEQ ID NO: 972 |
| | | Genomic | SEQ ID NO: 3890 |
| Sb01g018910 | Sorghum | Polynucleotide | SEQ ID NO: 973 |
| | bicolor | Polypeptide | SEQ ID NO: 974 |
| | | Genomic | SEQ ID NO: 3891 |
| Sb01g018950 | Sorghum | Polynucleotide | SEQ ID NO: 975 |
| | bicolor | Polypeptide | SEQ ID NO: 976 |
| | | Genomic | SEQ ID NO: 3892 |
| Sb01g019100 | Sorghum | Polynucleotide | SEQ ID NO: 977 |
| | bicolor | Polypeptide | SEQ ID NO: 978 |
| | | Genomic | SEQ ID NO: 3893 |
| Sb01g019230 | Sorghum | Polynucleotide | SEQ ID NO: 979 |
| | bicolor | Polypeptide | SEQ ID NO: 980 |
| | | Genomic | SEQ ID NO: 3894 |
| Sb01g019330 | Sorghum | Polynucleotide | SEQ ID NO: 981 |
| | bicolor | Polypeptide | SEQ ID NO: 982 |
| | | Genomic | SEQ ID NO: 3895 |
| Sb01g019510 | Sorghum | Polynucleotide | SEQ ID NO: 983 |
| | bicolor | Polypeptide | SEQ ID NO: 984 |
| | | Genomic | SEQ ID NO: 3896 |
| Sb01g019540 | Sorghum | Polynucleotide | SEQ ID NO: 985 |
| | bicolor | Polypeptide | SEQ ID NO: 986 |
| | | Genomic | SEQ ID NO: 3897 |
| Sb01g019580 | Sorghum | Polynucleotide | SEQ ID NO: 987 |
| | bicolor | Polypeptide | SEQ ID NO: 988 |
| | | Genomic | SEQ ID NO: 3898 |
| Sb01g019840 | Sorghum | Polynucleotide | SEQ ID NO: 989 |
| | bicolor | Polypeptide | SEQ ID NO: 990 |
| | | Genomic | SEQ ID NO: 3899 |
| Sb01g019860 | Sorghum | Polynucleotide | SEQ ID NO: 991 |
| | bicolor | Polypeptide | SEQ ID NO: 992 |
| | | Genomic | SEQ ID NO: 3900 |
| Sb01g019970 | Sorghum | Polynucleotide | SEQ ID NO: 993 |
| | bicolor | Polypeptide | SEQ ID NO: 994 |
| | | Genomic | SEQ ID NO: 3901 |
| Sb01g020180 | Sorghum | Polynucleotide | SEQ ID NO: 995 |
| | bicolor | Polypeptide | SEQ ID NO: 996 |
| | | Genomic | SEQ ID NO: 3902 |
| Sb01g020810 | Sorghum | Polynucleotide | SEQ ID NO: 997 |
| | bicolor | Polypeptide | SEQ ID NO: 998 |
| | | Genomic | SEQ ID NO: 3903 |
| Sb01g045010 | Sorghum | Polynucleotide | SEQ ID NO: 999 |
| | bicolor | Polypeptide | SEQ ID NO: 1000 |
| | | Genomic | SEQ ID NO: 3904 |
| Sb01g021030 | Sorghum | Polynucleotide | SEQ ID NO: 1001 |
| | bicolor | Polypeptide | SEQ ID NO: 1002 |
| | | Genomic | SEQ ID NO: 3905 |
| Sb01g021080 | Sorghum | Polynucleotide | SEQ ID NO: 1003 |
| | bicolor | Polypeptide | SEQ ID NO: 1004 |
| | | Genomic | SEQ ID NO: 3906 |
| Sb01g021680 | Sorghum | Polynucleotide | SEQ ID NO: 1005 |
| | bicolor | Polypeptide | SEQ ID NO: 1006 |
| | | Genomic | SEQ ID NO: 3907 |
| Sb01g021760 | Sorghum | Polynucleotide | SEQ ID NO: 1007 |
| | bicolor | Polypeptide | SEQ ID NO: 1008 |
| | | Genomic | SEQ ID NO: 3908 |
| Sb01g021890 | Sorghum | Polynucleotide | SEQ ID NO: 1009 |
| | bicolor | Polypeptide | SEQ ID NO: 1010 |
| | | Genomic | SEQ ID NO: 3909 |
| Sb01g022210 | Sorghum | Polynucleotide | SEQ ID NO: 1011 |
| | bicolor | Polypeptide | SEQ ID NO: 1012 |
| | | Genomic | SEQ ID NO: 3910 |
| Sb01g080950 | Sorghum | Polynucleotide | SEQ ID NO: 1013 |
| | bicolor | Polypeptide | SEQ ID NO: 1014 |
| | | Genomic | SEQ ID NO: 3911 |
| Sb01g025290 | Sorghum | Polynucleotide | SEQ ID NO: 1015 |
| | bicolor | Polypeptide | SEQ ID NO: 1016 |
| | | Genomic | SEQ ID NO: 3912 |
| Sb01g025310 | Sorghum | Polynucleotide | SEQ ID NO: 1017 |
| | bicolor | Polypeptide | SEQ ID NO: 1018 |
| | | Genomic | SEQ ID NO: 3913 |
| Sb01g026660 | Sorghum | Polynucleotide | SEQ ID NO: 1019 |
| | bicolor | Polypeptide | SEQ ID NO: 1020 |
| | | Genomic | SEQ ID NO: 3914 |
| Sb01g026700 | Sorghum | Polynucleotide | SEQ ID NO: 1021 |
| | bicolor | Polypeptide | SEQ ID NO: 1022 |
| | | Genomic | SEQ ID NO: 3915 |
| Sb01g027010 | Sorghum | Polynucleotide | SEQ ID NO: 1023 |
| | bicolor | Polypeptide | SEQ ID NO: 1024 |
| | | Genomic | SEQ ID NO: 3916 |
| Sb01g027250 | Sorghum | Polynucleotide | SEQ ID NO: 1025 |
| | bicolor | Polypeptide | SEQ ID NO: 1026 |
| | | Genomic | SEQ ID NO: 3917 |
| Sb01g110910 | Sorghum | Polynucleotide | SEQ ID NO: 1027 |
| | bicolor | Polypeptide | SEQ ID NO: 1028 |
| | | Genomic | SEQ ID NO: 3918 |
| Sb01g027330 | Sorghum | Polynucleotide | SEQ ID NO: 1029 |
| | bicolor | Polypeptide | SEQ ID NO: 1030 |
| | | Genomic | SEQ ID NO: 3919 |
| Sb01g027490 | Sorghum | Polynucleotide | SEQ ID NO: 1031 |
| | bicolor | Polypeptide | SEQ ID NO: 1032 |
| | | Genomic | SEQ ID NO: 3920 |
| Sb01g027680 | Sorghum | Polynucleotide | SEQ ID NO: 1033 |
| | bicolor | Polypeptide | SEQ ID NO: 1034 |
| | | Genomic | SEQ ID NO: 3921 |
| Sb01g027790 | Sorghum | Polynucleotide | SEQ ID NO: 1035 |
| | bicolor | Polypeptide | SEQ ID NO: 1036 |
| | | Genomic | SEQ ID NO: 3922 |
| Sb01g027920 | Sorghum | Polynucleotide | SEQ ID NO: 1037 |
| | bicolor | Polypeptide | SEQ ID NO: 1038 |
| | | Genomic | SEQ ID NO: 3923 |
| Sb01g028100 | Sorghum | Polynucleotide | SEQ ID NO: 1039 |
| | bicolor | Polypeptide | SEQ ID NO: 1040 |
| | | Genomic | SEQ ID NO: 3924 |
| Sb01g028280 | Sorghum | Polynucleotide | SEQ ID NO: 1041 |
| | bicolor | Polypeptide | SEQ ID NO: 1042 |
| | | Genomic | SEQ ID NO: 3925 |
| Sb01g028340 | Sorghum | Polynucleotide | SEQ ID NO: 1043 |
| | bicolor | Polypeptide | SEQ ID NO: 1044 |
| | | Genomic | SEQ ID NO: 3926 |
| Sb01g117430 | Sorghum | Polynucleotide | SEQ ID NO: 1045 |
| | bicolor | Polypeptide | SEQ ID NO: 1046 |
| | | Genomic | SEQ ID NO: 3927 |
| Sb01g028390 | Sorghum | Polynucleotide | SEQ ID NO: 1047 |
| | bicolor | Polypeptide | SEQ ID NO: 1048 |
| | | Genomic | SEQ ID NO: 3928 |
| Sb01g028760 | Sorghum | Polynucleotide | SEQ ID NO: 1049 |
| | bicolor | Polypeptide | SEQ ID NO: 1050 |
| | | Genomic | SEQ ID NO: 3929 |
| Sb01g028770 | Sorghum | Polynucleotide | SEQ ID NO: 1051 |
| | bicolor | Polypeptide | SEQ ID NO: 1052 |
| | | Genomic | SEQ ID NO: 3930 |
| Sb01g029020 | Sorghum | Polynucleotide | SEQ ID NO: 1053 |
| | bicolor | Polypeptide | SEQ ID NO: 1054 |
| | | Genomic | SEQ ID NO: 3931 |
| Sb01g029250 | Sorghum | Polynucleotide | SEQ ID NO: 1055 |
| | bicolor | Polypeptide | SEQ ID NO: 1056 |
| | | Genomic | SEQ ID NO: 3932 |
| Sb01g029350 | Sorghum | Polynucleotide | SEQ ID NO: 1057 |
| | bicolor | Polypeptide | SEQ ID NO: 1058 |
| | | Genomic | SEQ ID NO: 3933 |
| Sb01g029550 | Sorghum | Polynucleotide | SEQ ID NO: 1059 |
| | bicolor | Polypeptide | SEQ ID NO: 1060 |
| | | Genomic | SEQ ID NO: 3934 |
| Sb01g031335 | Sorghum | Polynucleotide | SEQ ID NO: 1061 |
| | bicolor | Polypeptide | SEQ ID NO: 1062 |
| | | Genomic | SEQ ID NO: 3935 |
| Sb01g031340 | Sorghum | Polynucleotide | SEQ ID NO: 1063 |
| | bicolor | Polypeptide | SEQ ID NO: 1064 |
| | | Genomic | SEQ ID NO: 3936 |
| Sb01g031580 | Sorghum | Polynucleotide | SEQ ID NO: 1065 |
| | bicolor | Polypeptide | SEQ ID NO: 1066 |
| | | Genomic | SEQ ID NO: 3937 |
| Sb01g031920 | Sorghum | Polynucleotide | SEQ ID NO: 1067 |
| | bicolor | Polypeptide | SEQ ID NO: 1068 |
| | | Genomic | SEQ ID NO: 3938 |
| Sb01g126250 | Sorghum | Polynucleotide | SEQ ID NO: 1069 |
| | bicolor | Polypeptide | SEQ ID NO: 1070 |
| | | Genomic | SEQ ID NO: 3939 |
| Sb01g032360 | Sorghum | Polynucleotide | SEQ ID NO: 1071 |
| | bicolor | Polypeptide | SEQ ID NO: 1072 |
| | | Genomic | SEQ ID NO: 3940 |
| Sb01g032875 | Sorghum | Polynucleotide | SEQ ID NO: 1073 |
| | bicolor | Polypeptide | SEQ ID NO: 1074 |
| | | Genomic | SEQ ID NO: 3941 |
| Sb01g033250 | Sorghum | Polynucleotide | SEQ ID NO: 1075 |
| | bicolor | Polypeptide | SEQ ID NO: 1076 |
| | | Genomic | SEQ ID NO: 3942 |
| Sb01g033340 | Sorghum | Polynucleotide | SEQ ID NO: 1077 |
| | bicolor | Polypeptide | SEQ ID NO: 1078 |
| | | Genomic | SEQ ID NO: 3943 |
| Sb01g129200 | Sorghum | Polynucleotide | SEQ ID NO: 1079 |
| | bicolor | Polypeptide | SEQ ID NO: 1080 |
| | | Genomic | SEQ ID NO: 3944 |
| Sb01g129450 | Sorghum | Polynucleotide | SEQ ID NO: 1081 |
| | bicolor | Polypeptide | SEQ ID NO: 1082 |
| | | Genomic | SEQ ID NO: 3945 |
| Sb01g033620 | Sorghum | Polynucleotide | SEQ ID NO: 1083 |
| | bicolor | Polypeptide | SEQ ID NO: 1084 |
| | | Genomic | SEQ ID NO: 3946 |
| Sb01g033880 | Sorghum | Polynucleotide | SEQ ID NO: 1085 |
| | bicolor | Polypeptide | SEQ ID NO: 1086 |
| | | Genomic | SEQ ID NO: 3947 |
| Sb01g034290 | Sorghum | Polynucleotide | SEQ ID NO: 1087 |
| | bicolor | Polypeptide | SEQ ID NO: 1088 |
| | | Genomic | SEQ ID NO: 3948 |
| Sb01g034300 | Sorghum | Polynucleotide | SEQ ID NO: 1089 |
| | bicolor | Polypeptide | SEQ ID NO: 1090 |
| | | Genomic | SEQ ID NO: 3949 |
| Sb01g034390 | Sorghum | Polynucleotide | SEQ ID NO: 1091 |
| | bicolor | Polypeptide | SEQ ID NO: 1092 |
| | | Genomic | SEQ ID NO: 3950 |
| Sb01g034540 | Sorghum | Polynucleotide | SEQ ID NO: 1093 |
| | bicolor | Polypeptide | SEQ ID NO: 1094 |
| | | Genomic | SEQ ID NO: 3951 |
| Sb01g034710 | Sorghum | Polynucleotide | SEQ ID NO: 1095 |
| | bicolor | Polypeptide | SEQ ID NO: 1096 |
| | | Genomic | SEQ ID NO: 3952 |
| Sb01g034890 | Sorghum | Polynucleotide | SEQ ID NO: 1097 |
| | bicolor | Polypeptide | SEQ ID NO: 1098 |
| | | Genomic | SEQ ID NO: 3953 |
| Sb01g131900 | Sorghum | Polynucleotide | SEQ ID NO: 1099 |
| | bicolor | Polypeptide | SEQ ID NO: 1100 |
| | | Genomic | SEQ ID NO: 3954 |
| Sb09g004883 | Sorghum | Polynucleotide | SEQ ID NO: 1101 |
| | bicolor | Polypeptide | SEQ ID NO: 1102 |
| | | Genomic | SEQ ID NO: 3955 |
| Sb01g035860 | Sorghum | Polynucleotide | SEQ ID NO: 1103 |
| | bicolor | Polypeptide | SEQ ID NO: 1104 |
| | | Genomic | SEQ ID NO: 3956 |
| Sb01g036180 | Sorghum | Polynucleotide | SEQ ID NO: 1105 |
| | bicolor | Polypeptide | SEQ ID NO: 1106 |
| | | Genomic | SEQ ID NO: 3957 |
| Sb01g036220 | Sorghum | Polynucleotide | SEQ ID NO: 1107 |
| | bicolor | Polypeptide | SEQ ID NO: 1108 |
| | | Genomic | SEQ ID NO: 3958 |
| Sb01g036350 | Sorghum | Polynucleotide | SEQ ID NO: 1109 |
| | bicolor | Polypeptide | SEQ ID NO: 1110 |
| | | Genomic | SEQ ID NO: 3959 |
| Sb01g037380 | Sorghum | Polynucleotide | SEQ ID NO: 1111 |
| | bicolor | Polypeptide | SEQ ID NO: 1112 |
| | | Genomic | SEQ ID NO: 3960 |
| Sb01g037420 | Sorghum | Polynucleotide | SEQ ID NO: 1113 |
| | bicolor | Polypeptide | SEQ ID NO: 1114 |
| | | Genomic | SEQ ID NO: 3961 |
| Sb01g037510 | Sorghum | Polynucleotide | SEQ ID NO: 1115 |
| | bicolor | Polypeptide | SEQ ID NO: 1116 |
| | | Genomic | SEQ ID NO: 3962 |
| Sb01g037710 | Sorghum | Polynucleotide | SEQ ID NO: 1117 |
| | bicolor | Polypeptide | SEQ ID NO: 1118 |
| | | Genomic | SEQ ID NO: 3963 |
| Sb01g037720 | Sorghum | Polynucleotide | SEQ ID NO: 1119 |
| | bicolor | Polypeptide | SEQ ID NO: 1120 |
| | | Genomic | SEQ ID NO: 3964 |
| Sb01g037890 | Sorghum | Polynucleotide | SEQ ID NO: 1121 |
| | bicolor | Polypeptide | SEQ ID NO: 1122 |
| | | Genomic | SEQ ID NO: 3965 |
| Sb01g037900 | Sorghum | Polynucleotide | SEQ ID NO: 1123 |
| | bicolor | Polypeptide | SEQ ID NO: 1124 |
| | | Genomic | SEQ ID NO: 3966 |
| Sb01g137540 | Sorghum | Polynucleotide | SEQ ID NO: 1125 |
| | bicolor | Polypeptide | SEQ ID NO: 1126 |
| | | Genomic | SEQ ID NO: 3967 |
| Sb01g038010 | Sorghum | Polynucleotide | SEQ ID NO: 1127 |
| | bicolor | Polypeptide | SEQ ID NO: 1128 |
| | | Genomic | SEQ ID NO: 3968 |
| Sb01g038070 | Sorghum | Polynucleotide | SEQ ID NO: 1129 |
| | bicolor | Polypeptide | SEQ ID NO: 1130 |
| | | Genomic | SEQ ID NO: 3969 |
| Sb01g038160 | Sorghum | Polynucleotide | SEQ ID NO: 1131 |
| | bicolor | Polypeptide | SEQ ID NO: 1132 |
| | | Genomic | SEQ ID NO: 3970 |
| Sb01g038300 | Sorghum | Polynucleotide | SEQ ID NO: 1133 |
| | bicolor | Polypeptide | SEQ ID NO: 1134 |
| | | Genomic | SEQ ID NO: 3971 |
| Sb01g038350 | Sorghum | Polynucleotide | SEQ ID NO: 1135 |
| | bicolor | Polypeptide | SEQ ID NO: 1136 |
| | | Genomic | SEQ ID NO: 3972 |
| Sb01g038400 | Sorghum | Polynucleotide | SEQ ID NO: 1137 |
| | bicolor | Polypeptide | SEQ ID NO: 1138 |
| | | Genomic | SEQ ID NO: 3973 |
| Sb01g038800 | Sorghum | Polynucleotide | SEQ ID NO: 1139 |
| | bicolor | Polypeptide | SEQ ID NO: 1140 |
| | | Genomic | SEQ ID NO: 3974 |
| Sb01g038830 | Sorghum | Polynucleotide | SEQ ID NO: 1141 |
| | bicolor | Polypeptide | SEQ ID NO: 1142 |
| | | Genomic | SEQ ID NO: 3975 |
| Sb01g039010 | Sorghum | Polynucleotide | SEQ ID NO: 1143 |
| | bicolor | Polypeptide | SEQ ID NO: 1144 |
| | | Genomic | SEQ ID NO: 3976 |
| Sb01g039230 | Sorghum | Polynucleotide | SEQ ID NO: 1145 |
| | bicolor | Polypeptide | SEQ ID NO: 1146 |
| | | Genomic | SEQ ID NO: 3977 |
| Sb01g039250 | Sorghum | Polynucleotide | SEQ ID NO: 1147 |
| | bicolor | Polypeptide | SEQ ID NO: 1148 |
| | | Genomic | SEQ ID NO: 3978 |
| Sb01g039550 | Sorghum | Polynucleotide | SEQ ID NO: 1149 |
| | bicolor | Polypeptide | SEQ ID NO: 1150 |
| | | Genomic | SEQ ID NO: 3979 |
| Sb01g039710 | Sorghum | Polynucleotide | SEQ ID NO: 1151 |
| | bicolor | Polypeptide | SEQ ID NO: 1152 |
| | | Genomic | SEQ ID NO: 3980 |
| Sb01g039720 | Sorghum | Polynucleotide | SEQ ID NO: 1153 |
| | bicolor | Polypeptide | SEQ ID NO: 1154 |
| | | Genomic | SEQ ID NO: 3981 |
| Sb01g039830 | Sorghum | Polynucleotide | SEQ ID NO: 1155 |
| | bicolor | Polypeptide | SEQ ID NO: 1156 |
| | | Genomic | SEQ ID NO: 3982 |
| Sb01g040110 | Sorghum | Polynucleotide | SEQ ID NO: 1157 |
| | bicolor | Polypeptide | SEQ ID NO: 1158 |
| | | Genomic | SEQ ID NO: 3983 |
| Sb01g040430 | Sorghum | Polynucleotide | SEQ ID NO: 1159 |
| | bicolor | Polypeptide | SEQ ID NO: 1160 |
| | | Genomic | SEQ ID NO: 3984 |
| Sb01g040660 | Sorghum | Polynucleotide | SEQ ID NO: 1161 |
| | bicolor | Polypeptide | SEQ ID NO: 1162 |
| | | Genomic | SEQ ID NO: 3985 |
| Sb01g040960 | Sorghum | Polynucleotide | SEQ ID NO: 1163 |
| | bicolor | Polypeptide | SEQ ID NO: 1164 |
| | | Genomic | SEQ ID NO: 3986 |
| Sb01g040980 | Sorghum | Polynucleotide | SEQ ID NO: 1165 |
| | bicolor | Polypeptide | SEQ ID NO: 1166 |
| | | Genomic | SEQ ID NO: 3987 |
| Sb01g041120 | Sorghum | Polynucleotide | SEQ ID NO: 1167 |
| | bicolor | Polypeptide | SEQ ID NO: 1168 |
| | | Genomic | SEQ ID NO: 3988 |
| Sb01g041230 | Sorghum | Polynucleotide | SEQ ID NO: 1169 |
| | bicolor | Polypeptide | SEQ ID NO: 1170 |
| | | Genomic | SEQ ID NO: 3989 |
| Sb01g142330 | Sorghum | Polynucleotide | SEQ ID NO: 1171 |
| | bicolor | Polypeptide | SEQ ID NO: 1172 |
| | | Genomic | SEQ ID NO: 3990 |
| Sb01g041480 | Sorghum | Polynucleotide | SEQ ID NO: 1173 |
| | bicolor | Polypeptide | SEQ ID NO: 1174 |
| | | Genomic | SEQ ID NO: 3991 |
| Sb01g041850 | Sorghum | Polynucleotide | SEQ ID NO: 1175 |
| | bicolor | Polypeptide | SEQ ID NO: 1176 |
| | | Genomic | SEQ ID NO: 3992 |
| Sb01g042200 | Sorghum | Polynucleotide | SEQ ID NO: 1177 |
| | bicolor | Polypeptide | SEQ ID NO: 1178 |
| | | Genomic | SEQ ID NO: 3993 |
| Sb01g042230 | Sorghum | Polynucleotide | SEQ ID NO: 1179 |
| | bicolor | Polypeptide | SEQ ID NO: 1180 |
| | | Genomic | SEQ ID NO: 3994 |
| Sb01g042450 | Sorghum | Polynucleotide | SEQ ID NO: 1181 |
| | bicolor | Polypeptide | SEQ ID NO: 1182 |
| | | Genomic | SEQ ID NO: 3995 |
| Sb01g042490 | Sorghum | Polynucleotide | SEQ ID NO: 1183 |
| | bicolor | Polypeptide | SEQ ID NO: 1184 |
| | | Genomic | SEQ ID NO: 3996 |
| Sb01g042735 | Sorghum | Polynucleotide | SEQ ID NO: 1185 |
| | bicolor | Polypeptide | SEQ ID NO: 1186 |
| | | Genomic | SEQ ID NO: 3997 |
| Sb01g042840 | Sorghum | Polynucleotide | SEQ ID NO: 1187 |
| | bicolor | Polypeptide | SEQ ID NO: 1188 |
| | | Genomic | SEQ ID NO: 3998 |
| Sb01g042890 | Sorghum | Polynucleotide | SEQ ID NO: 1189 |
| | bicolor | Polypeptide | SEQ ID NO: 1190 |
| | | Genomic | SEQ ID NO: 3999 |
| Sb01g043190 | Sorghum | Polynucleotide | SEQ ID NO: 1191 |
| | bicolor | Polypeptide | SEQ ID NO: 1192 |
| | | Genomic | SEQ ID NO: 4000 |
| Sb01g043280 | Sorghum | Polynucleotide | SEQ ID NO: 1193 |
| | bicolor | Polypeptide | SEQ ID NO: 1194 |
| | | Genomic | SEQ ID NO: 4001 |
| Sb01g043340 | Sorghum | Polynucleotide | SEQ ID NO: 1195 |
| | bicolor | Polypeptide | SEQ ID NO: 1196 |
| | | Genomic | SEQ ID NO: 4002 |
| Sb01g043370 | Sorghum | Polynucleotide | SEQ ID NO: 1197 |
| | bicolor | Polypeptide | SEQ ID NO: 1198 |
| | | Genomic | SEQ ID NO: 4003 |
| Sb01g043420 | Sorghum | Polynucleotide | SEQ ID NO: 1199 |
| | bicolor | Polypeptide | SEQ ID NO: 1200 |
| | | Genomic | SEQ ID NO: 4004 |
| Sb01g043570 | Sorghum | Polynucleotide | SEQ ID NO: 1201 |
| | bicolor | Polypeptide | SEQ ID NO: 1202 |
| | | Genomic | SEQ ID NO: 4005 |
| Sb01g043840 | Sorghum | Polynucleotide | SEQ ID NO: 1203 |
| | bicolor | Polypeptide | SEQ ID NO: 1204 |
| | | Genomic | SEQ ID NO: 4006 |
| Sb01g145860 | Sorghum | Polynucleotide | SEQ ID NO: 1205 |
| | bicolor | Polypeptide | SEQ ID NO: 1206 |
| | | Genomic | SEQ ID NO: 4007 |
| Sb01g044100 | Sorghum | Polynucleotide | SEQ ID NO: 1207 |
| | bicolor | Polypeptide | SEQ ID NO: 1208 |
| | | Genomic | SEQ ID NO: 4008 |
| Sb01g044180 | Sorghum | Polynucleotide | SEQ ID NO: 1209 |
| | bicolor | Polypeptide | SEQ ID NO: 1210 |
| | | Genomic | SEQ ID NO: 4009 |
| Sb01g044340 | Sorghum | Polynucleotide | SEQ ID NO: 1211 |
| | bicolor | Polypeptide | SEQ ID NO: 1212 |
| | | Genomic | SEQ ID NO: 4010 |
| Sb01g044450 | Sorghum | Polynucleotide | SEQ ID NO: 1213 |
| | bicolor | Polypeptide | SEQ ID NO: 1214 |
| | | Genomic | SEQ ID NO: 4011 |
| Sb01g146630 | Sorghum | Polynucleotide | SEQ ID NO: 1215 |
| | bicolor | Polypeptide | SEQ ID NO: 1216 |
| | | Genomic | SEQ ID NO: 4012 |
| Sb01g147260 | Sorghum | Polynucleotide | SEQ ID NO: 1217 |
| | bicolor | Polypeptide | SEQ ID NO: 1218 |
| | | Genomic | SEQ ID NO: 4013 |
| Sb01g044910 | Sorghum | Polynucleotide | SEQ ID NO: 1219 |
| | bicolor | Polypeptide | SEQ ID NO: 1220 |
| | | Genomic | SEQ ID NO: 4014 |
| Sb01g045110 | Sorghum | Polynucleotide | SEQ ID NO: 1221 |
| | bicolor | Polypeptide | SEQ ID NO: 1222 |
| | | Genomic | SEQ ID NO: 4015 |
| Sb01g045380 | Sorghum | Polynucleotide | SEQ ID NO: 1223 |
| | bicolor | Polypeptide | SEQ ID NO: 1224 |
| | | Genomic | SEQ ID NO: 4016 |
| Sb01g045390 | Sorghum | Polynucleotide | SEQ ID NO: 1225 |
| | bicolor | Polypeptide | SEQ ID NO: 1226 |
| | | Genomic | SEQ ID NO: 4017 |
| Sb01g148370 | Sorghum | Polynucleotide | SEQ ID NO: 1227 |
| | bicolor | Polypeptide | SEQ ID NO: 1228 |
| | | Genomic | SEQ ID NO: 4018 |
| Sb01g045850 | Sorghum | Polynucleotide | SEQ ID NO: 1229 |
| | bicolor | Polypeptide | SEQ ID NO: 1230 |
| | | Genomic | SEQ ID NO: 4019 |
| Sb01g046040 | Sorghum | Polynucleotide | SEQ ID NO: 1231 |
| | bicolor | Polypeptide | SEQ ID NO: 1232 |
| | | Genomic | SEQ ID NO: 4020 |
| Sb01g046160 | Sorghum | Polynucleotide | SEQ ID NO: 1233 |
| | bicolor | Polypeptide | SEQ ID NO: 1234 |
| | | Genomic | SEQ ID NO: 4021 |
| Sb01g046210 | Sorghum | Polynucleotide | SEQ ID NO: 1235 |
| | bicolor | Polypeptide | SEQ ID NO: 1236 |
| | | Genomic | SEQ ID NO: 4022 |
| Sb01g046520 | Sorghum | Polynucleotide | SEQ ID NO: 1237 |
| | bicolor | Polypeptide | SEQ ID NO: 1238 |
| | | Genomic | SEQ ID NO: 4023 |
| Sb01g046550 | Sorghum | Polynucleotide | SEQ ID NO: 1239 |
| | bicolor | Polypeptide | SEQ ID NO: 1240 |
| | | Genomic | SEQ ID NO: 4024 |
| Sb01g046980 | Sorghum | Polynucleotide | SEQ ID NO: 1241 |
| | bicolor | Polypeptide | SEQ ID NO: 1242 |
| | | Genomic | SEQ ID NO: 4025 |
| Sb01g047170 | Sorghum | Polynucleotide | SEQ ID NO: 1243 |
| | bicolor | Polypeptide | SEQ ID NO: 1244 |
| | | Genomic | SEQ ID NO: 4026 |
| Sb01g047620 | Sorghum | Polynucleotide | SEQ ID NO: 1245 |
| | bicolor | Polypeptide | SEQ ID NO: 1246 |
| | | Genomic | SEQ ID NO: 4027 |
| Sb01g047980 | Sorghum | Polynucleotide | SEQ ID NO: 1247 |
| | bicolor | Polypeptide | SEQ ID NO: 1248 |
| | | Genomic | SEQ ID NO: 4028 |
| Sb01g048040 | Sorghum | Polynucleotide | SEQ ID NO: 1249 |
| | bicolor | Polypeptide | SEQ ID NO: 1250 |
| | | Genomic | SEQ ID NO: 4029 |
| Sb01g048280 | Sorghum | Polynucleotide | SEQ ID NO: 1251 |
| | bicolor | Polypeptide | SEQ ID NO: 1252 |
| | | Genomic | SEQ ID NO: 4030 |
| Sb01g048590 | Sorghum | Polynucleotide | SEQ ID NO: 1253 |
| | bicolor | Polypeptide | SEQ ID NO: 1254 |
| | | Genomic | SEQ ID NO: 4031 |
| Sb01g048810 | Sorghum | Polynucleotide | SEQ ID NO: 1255 |
| | bicolor | Polypeptide | SEQ ID NO: 1256 |
| | | Genomic | SEQ ID NO: 4032 |
| Sb01g049190 | Sorghum | Polynucleotide | SEQ ID NO: 1257 |
| | bicolor | Polypeptide | SEQ ID NO: 1258 |
| | | Genomic | SEQ ID NO: 4033 |
| Sb01g049210 | Sorghum | Polynucleotide | SEQ ID NO: 1259 |
| | bicolor | Polypeptide | SEQ ID NO: 1260 |
| | | Genomic | SEQ ID NO: 4034 |
| Sb01g154600 | Sorghum | Polynucleotide | SEQ ID NO: 1261 |
| | bicolor | Polypeptide | SEQ ID NO: 1262 |
| | | Genomic | SEQ ID NO: 4035 |
| Sb01g049970 | Sorghum | Polynucleotide | SEQ ID NO: 1263 |
| | bicolor | Polypeptide | SEQ ID NO: 1264 |
| | | Genomic | SEQ ID NO: 4036 |
| Sb01g050070 | Sorghum | Polynucleotide | SEQ ID NO: 1265 |
| | bicolor | Polypeptide | SEQ ID NO: 1266 |
| | | Genomic | SEQ ID NO: 4037 |
| Sb01g050190 | Sorghum | Polynucleotide | SEQ ID NO: 1267 |
| | bicolor | Polypeptide | SEQ ID NO: 1268 |
| | | Genomic | SEQ ID NO: 4038 |
| Sb01g050670 | Sorghum | Polynucleotide | SEQ ID NO: 1269 |
| | bicolor | Polypeptide | SEQ ID NO: 1270 |
| | | Genomic | SEQ ID NO: 4039 |
| Sb01g050680 | Sorghum | Polynucleotide | SEQ ID NO: 1271 |
| | bicolor | Polypeptide | SEQ ID NO: 1272 |
| | | Genomic | SEQ ID NO: 4040 |
| Sb0224s002010 | Sorghum | Polynucleotide | SEQ ID NO: 1273 |
| | bicolor | Polypeptide | SEQ ID NO: 1274 |
| | | Genomic | SEQ ID NO: 4041 |
| Sb02g000230 | Sorghum | Polynucleotide | SEQ ID NO: 1275 |
| | bicolor | Polypeptide | SEQ ID NO: 1276 |
| | | Genomic | SEQ ID NO: 4042 |
| Sb02g000280 | Sorghum | Polynucleotide | SEQ ID NO: 1277 |
| | bicolor | Polypeptide | SEQ ID NO: 1278 |
| | | Genomic | SEQ ID NO: 4043 |
| Sb02g000370 | Sorghum | Polynucleotide | SEQ ID NO: 1279 |
| | bicolor | Polypeptide | SEQ ID NO: 1280 |
| | | Genomic | SEQ ID NO: 4044 |
| Sb02g000380 | Sorghum | Polynucleotide | SEQ ID NO: 1281 |
| | bicolor | Polypeptide | SEQ ID NO: 1282 |
| | | Genomic | SEQ ID NO: 4045 |
| Sb02g000620 | Sorghum | Polynucleotide | SEQ ID NO: 1283 |
| | bicolor | Polypeptide | SEQ ID NO: 1284 |
| | | Genomic | SEQ ID NO: 4046 |
| Sb02g000830 | Sorghum | Polynucleotide | SEQ ID NO: 1285 |
| | bicolor | Polypeptide | SEQ ID NO: 1286 |
| | | Genomic | SEQ ID NO: 4047 |
| Sb02g001300 | Sorghum | Polynucleotide | SEQ ID NO: 1287 |
| | bicolor | Polypeptide | SEQ ID NO: 1288 |
| | | Genomic | SEQ ID NO: 4048 |
| Sb01g000443 | Sorghum | Polynucleotide | SEQ ID NO: 1289 |
| | bicolor | Polypeptide | SEQ ID NO: 1290 |
| | | Genomic | SEQ ID NO: 4049 |
| Sb02g001658 | Sorghum | Polynucleotide | SEQ ID NO: 1291 |
| | bicolor | Polypeptide | SEQ ID NO: 1292 |
| | | Genomic | SEQ ID NO: 4050 |
| Sb02g002200 | Sorghum | Polynucleotide | SEQ ID NO: 1293 |
| | bicolor | Polypeptide | SEQ ID NO: 1294 |
| | | Genomic | SEQ ID NO: 4051 |
| Sb02g002600 | Sorghum | Polynucleotide | SEQ ID NO: 1295 |
| | bicolor | Polypeptide | SEQ ID NO: 1296 |
| | | Genomic | SEQ ID NO: 4052 |
| Sb02g002750 | Sorghum | Polynucleotide | SEQ ID NO: 1297 |
| | bicolor | Polypeptide | SEQ ID NO: 1298 |
| | | Genomic | SEQ ID NO: 4053 |
| Sb02g003260 | Sorghum | Polynucleotide | SEQ ID NO: 1299 |
| | bicolor | Polypeptide | SEQ ID NO: 1300 |
| | | Genomic | SEQ ID NO: 4054 |
| Sb02g003400 | Sorghum | Polynucleotide | SEQ ID NO: 1301 |
| | bicolor | Polypeptide | SEQ ID NO: 1302 |
| | | Genomic | SEQ ID NO: 4055 |
| Sb02g003440 | Sorghum | Polynucleotide | SEQ ID NO: 1303 |
| | bicolor | Polypeptide | SEQ ID NO: 1304 |
| | | Genomic | SEQ ID NO: 4056 |
| Sb02g003450 | Sorghum | Polynucleotide | SEQ ID NO: 1305 |
| | bicolor | Polypeptide | SEQ ID NO: 1306 |
| | | Genomic | SEQ ID NO: 4057 |
| Sb02g003710 | Sorghum | Polynucleotide | SEQ ID NO: 1307 |
| | bicolor | Polypeptide | SEQ ID NO: 1308 |
| | | Genomic | SEQ ID NO: 4058 |
| Sb02g004830 | Sorghum | Polynucleotide | SEQ ID NO: 1309 |
| | bicolor | Polypeptide | SEQ ID NO: 1310 |
| | | Genomic | SEQ ID NO: 4059 |
| Sb02g005160 | Sorghum | Polynucleotide | SEQ ID NO: 1311 |
| | bicolor | Polypeptide | SEQ ID NO: 1312 |
| | | Genomic | SEQ ID NO: 4060 |
| Sb02g005950 | Sorghum | Polynucleotide | SEQ ID NO: 1313 |
| | bicolor | Polypeptide | SEQ ID NO: 1314 |
| | | Genomic | SEQ ID NO: 4061 |
| Sb02g006000 | Sorghum | Polynucleotide | SEQ ID NO: 1315 |
| | bicolor | Polypeptide | SEQ ID NO: 1316 |
| | | Genomic | SEQ ID NO: 4062 |
| Sb02g006130 | Sorghum | Polynucleotide | SEQ ID NO: 1317 |
| | bicolor | Polypeptide | SEQ ID NO: 1318 |
| | | Genomic | SEQ ID NO: 4063 |
| Sb02g006450 | Sorghum | Polynucleotide | SEQ ID NO: 1319 |
| | bicolor | Polypeptide | SEQ ID NO: 1320 |
| | | Genomic | SEQ ID NO: 4064 |
| Sb02g006570 | Sorghum | Polynucleotide | SEQ ID NO: 1321 |
| | bicolor | Polypeptide | SEQ ID NO: 1322 |
| | | Genomic | SEQ ID NO: 4065 |
| Sb02g015780 | Sorghum | Polynucleotide | SEQ ID NO: 1323 |
| | bicolor | Polypeptide | SEQ ID NO: 1324 |
| | | Genomic | SEQ ID NO: 4066 |
| Sb02g007100 | Sorghum | Polynucleotide | SEQ ID NO: 1325 |
| | bicolor | Polypeptide | SEQ ID NO: 1326 |
| | | Genomic | SEQ ID NO: 4067 |
| Sb02g007310 | Sorghum | Polynucleotide | SEQ ID NO: 1327 |
| | bicolor | Polypeptide | SEQ ID NO: 1328 |
| | | Genomic | SEQ ID NO: 4068 |
| Sb02g007390 | Sorghum | Polynucleotide | SEQ ID NO: 1329 |
| | bicolor | Polypeptide | SEQ ID NO: 1330 |
| | | Genomic | SEQ ID NO: 4069 |
| Sb02g007660 | Sorghum | Polynucleotide | SEQ ID NO: 1331 |
| | bicolor | Polypeptide | SEQ ID NO: 1332 |
| | | Genomic | SEQ ID NO: 4070 |
| Sb02g007780 | Sorghum | Polynucleotide | SEQ ID NO: 1333 |
| | bicolor | Polypeptide | SEQ ID NO: 1334 |
| | | Genomic | SEQ ID NO: 4071 |
| Sb02g007850 | Sorghum | Polynucleotide | SEQ ID NO: 1335 |
| | bicolor | Polypeptide | SEQ ID NO: 1336 |
| | | Genomic | SEQ ID NO: 4072 |
| Sb02g019130 | Sorghum | Polynucleotide | SEQ ID NO: 1337 |
| | bicolor | Polypeptide | SEQ ID NO: 1338 |
| | | Genomic | SEQ ID NO: 4073 |
| Sb02g007960 | Sorghum | Polynucleotide | SEQ ID NO: 1339 |
| | bicolor | Polypeptide | SEQ ID NO: 1340 |
| | | Genomic | SEQ ID NO: 4074 |
| Sb02g008650 | Sorghum | Polynucleotide | SEQ ID NO: 1341 |
| | bicolor | Polypeptide | SEQ ID NO: 1342 |
| | | Genomic | SEQ ID NO: 4075 |
| Sb02g008810 | Sorghum | Polynucleotide | SEQ ID NO: 1343 |
| | bicolor | Polypeptide | SEQ ID NO: 1344 |
| | | Genomic | SEQ ID NO: 4076 |
| Sb02g008970 | Sorghum | Polynucleotide | SEQ ID NO: 1345 |
| | bicolor | Polypeptide | SEQ ID NO: 1346 |
| | | Genomic | SEQ ID NO: 4077 |
| Sb02g009180 | Sorghum | Polynucleotide | SEQ ID NO: 1347 |
| | bicolor | Polypeptide | SEQ ID NO: 1348 |
| | | Genomic | SEQ ID NO: 4078 |
| Sb02g009290 | Sorghum | Polynucleotide | SEQ ID NO: 1349 |
| | bicolor | Polypeptide | SEQ ID NO: 1350 |
| | | Genomic | SEQ ID NO: 4079 |
| Sb02g009300 | Sorghum | Polynucleotide | SEQ ID NO: 1351 |
| | bicolor | Polypeptide | SEQ ID NO: 1352 |
| | | Genomic | SEQ ID NO: 4080 |
| Sb02g009380 | Sorghum | Polynucleotide | SEQ ID NO: 1353 |
| | bicolor | Polypeptide | SEQ ID NO: 1354 |
| | | Genomic | SEQ ID NO: 4081 |
| Sb02g009500 | Sorghum | Polynucleotide | SEQ ID NO: 1355 |
| | bicolor | Polypeptide | SEQ ID NO: 1356 |
| | | Genomic | SEQ ID NO: 4082 |
| Sb02g009610 | Sorghum | Polynucleotide | SEQ ID NO: 1357 |
| | bicolor | Polypeptide | SEQ ID NO: 1358 |
| | | Genomic | SEQ ID NO: 4083 |
| Sb02g009670 | Sorghum | Polynucleotide | SEQ ID NO: 1359 |
| | bicolor | Polypeptide | SEQ ID NO: 1360 |
| | | Genomic | SEQ ID NO: 4084 |
| Sb02g009690 | Sorghum | Polynucleotide | SEQ ID NO: 1361 |
| | bicolor | Polypeptide | SEQ ID NO: 1362 |
| | | Genomic | SEQ ID NO: 4085 |
| Sb02g009870 | Sorghum | Polynucleotide | SEQ ID NO: 1363 |
| | bicolor | Polypeptide | SEQ ID NO: 1364 |
| | | Genomic | SEQ ID NO: 4086 |
| Sb02g010190 | Sorghum | Polynucleotide | SEQ ID NO: 1365 |
| | bicolor | Polypeptide | SEQ ID NO: 1366 |
| | | Genomic | SEQ ID NO: 4087 |
| Sb02g043450 | Sorghum | Polynucleotide | SEQ ID NO: 1367 |
| | bicolor | Polypeptide | SEQ ID NO: 1368 |
| | | Genomic | SEQ ID NO: 4088 |
| Sb02g011390 | Sorghum | Polynucleotide | SEQ ID NO: 1369 |
| | bicolor | Polypeptide | SEQ ID NO: 1370 |
| | | Genomic | SEQ ID NO: 4089 |
| Sb02g060390 | Sorghum | Polynucleotide | SEQ ID NO: 1371 |
| | bicolor | Polypeptide | SEQ ID NO: 1372 |
| | | Genomic | SEQ ID NO: 4090 |
| Sb02g018530 | Sorghum | Polynucleotide | SEQ ID NO: 1373 |
| | bicolor | Polypeptide | SEQ ID NO: 1374 |
| | | Genomic | SEQ ID NO: 4091 |
| Sb02g112300 | Sorghum | Polynucleotide | SEQ ID NO: 1375 |
| | bicolor | Polypeptide | SEQ ID NO: 1376 |
| | | Genomic | SEQ ID NO: 4092 |
| Sb02g021040 | Sorghum | Polynucleotide | SEQ ID NO: 1377 |
| | bicolor | Polypeptide | SEQ ID NO: 1378 |
| | | Genomic | SEQ ID NO: 4093 |
| Sb02g021133 | Sorghum | Polynucleotide | SEQ ID NO: 1379 |
| | bicolor | Polypeptide | SEQ ID NO: 1380 |
| | | Genomic | SEQ ID NO: 4094 |
| Sb02g021450 | Sorghum | Polynucleotide | SEQ ID NO: 1381 |
| | bicolor | Polypeptide | SEQ ID NO: 1382 |
| | | Genomic | SEQ ID NO: 4095 |
| Sb02g133410 | Sorghum | Polynucleotide | SEQ ID NO: 1383 |
| | bicolor | Polypeptide | SEQ ID NO: 1384 |
| | | Genomic | SEQ ID NO: 4096 |
| Sb02g021835 | Sorghum | Polynucleotide | SEQ ID NO: 1385 |
| | bicolor | Polypeptide | SEQ ID NO: 1386 |
| | | Genomic | SEQ ID NO: 4097 |
| Sb02g022170 | Sorghum | Polynucleotide | SEQ ID NO: 1387 |
| | bicolor | Polypeptide | SEQ ID NO: 1388 |
| | | Genomic | SEQ ID NO: 4098 |
| Sb02g022240 | Sorghum | Polynucleotide | SEQ ID NO: 1389 |
| | bicolor | Polypeptide | SEQ ID NO: 1390 |
| | | Genomic | SEQ ID NO: 4099 |
| Sb02g022480 | Sorghum | Polynucleotide | SEQ ID NO: 1391 |
| | bicolor | Polypeptide | SEQ ID NO: 1392 |
| | | Genomic | SEQ ID NO: 4100 |
| Sb02g022640 | Sorghum | Polynucleotide | SEQ ID NO: 1393 |
| | bicolor | Polypeptide | SEQ ID NO: 1394 |
| | | Genomic | SEQ ID NO: 4101 |
| Sb02g022650 | Sorghum | Polynucleotide | SEQ ID NO: 1395 |
| | bicolor | Polypeptide | SEQ ID NO: 1396 |
| | | Genomic | SEQ ID NO: 4102 |
| Sb02g022910 | Sorghum | Polynucleotide | SEQ ID NO: 1397 |
| | bicolor | Polypeptide | SEQ ID NO: 1398 |
| | | Genomic | SEQ ID NO: 4103 |
| Sb02g022920 | Sorghum | Polynucleotide | SEQ ID NO: 1399 |
| | bicolor | Polypeptide | SEQ ID NO: 1400 |
| | | Genomic | SEQ ID NO: 4104 |
| Sb02g022970 | Sorghum | Polynucleotide | SEQ ID NO: 1401 |
| | bicolor | Polypeptide | SEQ ID NO: 1402 |
| | | Genomic | SEQ ID NO: 4105 |
| Sb02g023080 | Sorghum | Polynucleotide | SEQ ID NO: 1403 |
| | bicolor | Polypeptide | SEQ ID NO: 1404 |
| | | Genomic | SEQ ID NO: 4106 |
| Sb02g023140 | Sorghum | Polynucleotide | SEQ ID NO: 1405 |
| | bicolor | Polypeptide | SEQ ID NO: 1406 |
| | | Genomic | SEQ ID NO: 4107 |
| Sb02g023170 | Sorghum | Polynucleotide | SEQ ID NO: 1407 |
| | bicolor | Polypeptide | SEQ ID NO: 1408 |
| | | Genomic | SEQ ID NO: 4108 |
| Sb02g023290 | Sorghum | Polynucleotide | SEQ ID NO: 1409 |
| | bicolor | Polypeptide | SEQ ID NO: 1410 |
| | | Genomic | SEQ ID NO: 4109 |
| Sb02g023360 | Sorghum | Polynucleotide | SEQ ID NO: 1411 |
| | bicolor | Polypeptide | SEQ ID NO: 1412 |
| | | Genomic | SEQ ID NO: 4110 |
| Sb02g023400 | Sorghum | Polynucleotide | SEQ ID NO: 1413 |
| | bicolor | Polypeptide | SEQ ID NO: 1414 |
| | | Genomic | SEQ ID NO: 4111 |
| Sb02g023720 | Sorghum | Polynucleotide | SEQ ID NO: 1415 |
| | bicolor | Polypeptide | SEQ ID NO: 1416 |
| | | Genomic | SEQ ID NO: 4112 |
| Sb02g023830 | Sorghum | Polynucleotide | SEQ ID NO: 1417 |
| | bicolor | Polypeptide | SEQ ID NO: 1418 |
| | | Genomic | SEQ ID NO: 4113 |
| Sb02g024020 | Sorghum | Polynucleotide | SEQ ID NO: 1419 |
| | bicolor | Polypeptide | SEQ ID NO: 1420 |
| | | Genomic | SEQ ID NO: 4114 |
| Sb02g024060 | Sorghum | Polynucleotide | SEQ ID NO: 1421 |
| | bicolor | Polypeptide | SEQ ID NO: 1422 |
| | | Genomic | SEQ ID NO: 4115 |
| Sb02g024350 | Sorghum | Polynucleotide | SEQ ID NO: 1423 |
| | bicolor | Polypeptide | SEQ ID NO: 1424 |
| | | Genomic | SEQ ID NO: 4116 |
| Sb02g024450 | Sorghum | Polynucleotide | SEQ ID NO: 1425 |
| | bicolor | Polypeptide | SEQ ID NO: 1426 |
| | | Genomic | SEQ ID NO: 4117 |
| Sb02g024480 | Sorghum | Polynucleotide | SEQ ID NO: 1427 |
| | bicolor | Polypeptide | SEQ ID NO: 1428 |
| | | Genomic | SEQ ID NO: 4118 |
| Sb02g024810 | Sorghum | Polynucleotide | SEQ ID NO: 1429 |
| | bicolor | Polypeptide | SEQ ID NO: 1430 |
| | | Genomic | SEQ ID NO: 4119 |
| Sb02g024900 | Sorghum | Polynucleotide | SEQ ID NO: 1431 |
| | bicolor | Polypeptide | SEQ ID NO: 1432 |
| | | Genomic | SEQ ID NO: 4120 |
| Sb02g025140 | Sorghum | Polynucleotide | SEQ ID NO: 1433 |
| | bicolor | Polypeptide | SEQ ID NO: 1434 |
| | | Genomic | SEQ ID NO: 4121 |
| Sb02g025340 | Sorghum | Polynucleotide | SEQ ID NO: 1435 |
| | bicolor | Polypeptide | SEQ ID NO: 1436 |
| | | Genomic | SEQ ID NO: 4122 |
| Sb02g025510 | Sorghum | Polynucleotide | SEQ ID NO: 1437 |
| | bicolor | Polypeptide | SEQ ID NO: 1438 |
| | | Genomic | SEQ ID NO: 4123 |
| Sb02g025590 | Sorghum | Polynucleotide | SEQ ID NO: 1439 |
| | bicolor | Polypeptide | SEQ ID NO: 1440 |
| | | Genomic | SEQ ID NO: 4124 |
| Sb02g025790 | Sorghum | Polynucleotide | SEQ ID NO: 1441 |
| | bicolor | Polypeptide | SEQ ID NO: 1442 |
| | | Genomic | SEQ ID NO: 4125 |
| Sb02g026140 | Sorghum | Polynucleotide | SEQ ID NO: 1443 |
| | bicolor | Polypeptide | SEQ ID NO: 1444 |
| | | Genomic | SEQ ID NO: 4126 |
| Sb02g026210 | Sorghum | Polynucleotide | SEQ ID NO: 1445 |
| | bicolor | Polypeptide | SEQ ID NO: 1446 |
| | | Genomic | SEQ ID NO: 4127 |
| Sb02g026270 | Sorghum | Polynucleotide | SEQ ID NO: 1447 |
| | bicolor | Polypeptide | SEQ ID NO: 1448 |
| | | Genomic | SEQ ID NO: 4128 |
| Sb02g026320 | Sorghum | Polynucleotide | SEQ ID NO: 1449 |
| | bicolor | Polypeptide | SEQ ID NO: 1450 |
| | | Genomic | SEQ ID NO: 4129 |
| Sb02g026450 | Sorghum | Polynucleotide | SEQ ID NO: 1451 |
| | bicolor | Polypeptide | SEQ ID NO: 1452 |
| | | Genomic | SEQ ID NO: 4130 |
| Sb02g026460 | Sorghum | Polynucleotide | SEQ ID NO: 1453 |
| | bicolor | Polypeptide | SEQ ID NO: 1454 |
| | | Genomic | SEQ ID NO: 4131 |
| Sb02g026570 | Sorghum | Polynucleotide | SEQ ID NO: 1455 |
| | bicolor | Polypeptide | SEQ ID NO: 1456 |
| | | Genomic | SEQ ID NO: 4132 |
| Sb02g026600 | Sorghum | Polynucleotide | SEQ ID NO: 1457 |
| | bicolor | Polypeptide | SEQ ID NO: 1458 |
| | | Genomic | SEQ ID NO: 4133 |
| Sb02g026680 | Sorghum | Polynucleotide | SEQ ID NO: 1459 |
| | bicolor | Polypeptide | SEQ ID NO: 1460 |
| | | Genomic | SEQ ID NO: 4134 |
| Sb10g008950 | Sorghum | Polynucleotide | SEQ ID NO: 1461 |
| | bicolor | Polypeptide | SEQ ID NO: 1462 |
| | | Genomic | SEQ ID NO: 4135 |
| Sb02g026840 | Sorghum | Polynucleotide | SEQ ID NO: 1463 |
| | bicolor | Polypeptide | SEQ ID NO: 1464 |
| | | Genomic | SEQ ID NO: 4136 |
| Sb02g027210 | Sorghum | Polynucleotide | SEQ ID NO: 1465 |
| | bicolor | Polypeptide | SEQ ID NO: 1466 |
| | | Genomic | SEQ ID NO: 4137 |
| Sb02g027410 | Sorghum | Polynucleotide | SEQ ID NO: 1467 |
| | bicolor | Polypeptide | SEQ ID NO: 1468 |
| | | Genomic | SEQ ID NO: 4138 |
| Sb02g027430 | Sorghum | Polynucleotide | SEQ ID NO: 1469 |
| | bicolor | Polypeptide | SEQ ID NO: 1470 |
| | | Genomic | SEQ ID NO: 4139 |
| Sb02g153000 | Sorghum | Polynucleotide | SEQ ID NO: 1471 |
| | bicolor | Polypeptide | SEQ ID NO: 1472 |
| | | Genomic | SEQ ID NO: 4140 |
| Sb02g153510 | Sorghum | Polynucleotide | SEQ ID NO: 1473 |
| | bicolor | Polypeptide | SEQ ID NO: 1474 |
| | | Genomic | SEQ ID NO: 4141 |
| Sb02g028300 | Sorghum | Polynucleotide | SEQ ID NO: 1475 |
| | bicolor | Polypeptide | SEQ ID NO: 1476 |
| | | Genomic | SEQ ID NO: 4142 |
| Sb02g028390 | Sorghum | Polynucleotide | SEQ ID NO: 1477 |
| | bicolor | Polypeptide | SEQ ID NO: 1478 |
| | | Genomic | SEQ ID NO: 4143 |
| Sb02g028590 | Sorghum | Polynucleotide | SEQ ID NO: 1479 |
| | bicolor | Polypeptide | SEQ ID NO: 1480 |
| | | Genomic | SEQ ID NO: 4144 |
| Sb02g028660 | Sorghum | Polynucleotide | SEQ ID NO: 1481 |
| | bicolor | Polypeptide | SEQ ID NO: 1482 |
| | | Genomic | SEQ ID NO: 4145 |
| Sb02g028870 | Sorghum | Polynucleotide | SEQ ID NO: 1483 |
| | bicolor | Polypeptide | SEQ ID NO: 1484 |
| | | Genomic | SEQ ID NO: 4146 |
| Sb02g028950 | Sorghum | Polynucleotide | SEQ ID NO: 1485 |
| | bicolor | Polypeptide | SEQ ID NO: 1486 |
| | | Genomic | SEQ ID NO: 4147 |
| Sb02g029040 | Sorghum | Polynucleotide | SEQ ID NO: 1487 |
| | bicolor | Polypeptide | SEQ ID NO: 1488 |
| | | Genomic | SEQ ID NO: 4148 |
| Sb02g029070 | Sorghum | Polynucleotide | SEQ ID NO: 1489 |
| | bicolor | Polypeptide | SEQ ID NO: 1490 |
| | | Genomic | SEQ ID NO: 4149 |
| Sb02g029310 | Sorghum | Polynucleotide | SEQ ID NO: 1491 |
| | bicolor | Polypeptide | SEQ ID NO: 1492 |
| | | Genomic | SEQ ID NO: 4150 |
| Sb02g029460 | Sorghum | Polynucleotide | SEQ ID NO: 1493 |
| | bicolor | Polypeptide | SEQ ID NO: 1494 |
| | | Genomic | SEQ ID NO: 4151 |
| Sb02g029470 | Sorghum | Polynucleotide | SEQ ID NO: 1495 |
| | bicolor | Polypeptide | SEQ ID NO: 1496 |
| | | Genomic | SEQ ID NO: 4152 |
| Sb02g029940 | Sorghum | Polynucleotide | SEQ ID NO: 1497 |
| | bicolor | Polypeptide | SEQ ID NO: 1498 |
| | | Genomic | SEQ ID NO: 4153 |
| Sb02g156430 | Sorghum | Polynucleotide | SEQ ID NO: 1499 |
| | bicolor | Polypeptide | SEQ ID NO: 1500 |
| | | Genomic | SEQ ID NO: 4154 |
| Sb02g030700 | Sorghum | Polynucleotide | SEQ ID NO: 1501 |
| | bicolor | Polypeptide | SEQ ID NO: 1502 |
| | | Genomic | SEQ ID NO: 4155 |
| Sb02g030920 | Sorghum | Polynucleotide | SEQ ID NO: 1503 |
| | bicolor | Polypeptide | SEQ ID NO: 1504 |
| | | Genomic | SEQ ID NO: 4156 |
| Sb02g031030 | Sorghum | Polynucleotide | SEQ ID NO: 1505 |
| | bicolor | Polypeptide | SEQ ID NO: 1506 |
| | | Genomic | SEQ ID NO: 4157 |
| Sb02g031300 | Sorghum | Polynucleotide | SEQ ID NO: 1507 |
| | bicolor | Polypeptide | SEQ ID NO: 1508 |
| | | Genomic | SEQ ID NO: 4158 |
| Sb02g031460 | Sorghum | Polynucleotide | SEQ ID NO: 1509 |
| | bicolor | Polypeptide | SEQ ID NO: 1510 |
| | | Genomic | SEQ ID NO: 4159 |
| Sb02g031600 | Sorghum | Polynucleotide | SEQ ID NO: 1511 |
| | bicolor | Polypeptide | SEQ ID NO: 1512 |
| | | Genomic | SEQ ID NO: 4160 |
| Sb02g032000 | Sorghum | Polynucleotide | SEQ ID NO: 1513 |
| | bicolor | Polypeptide | SEQ ID NO: 1514 |
| | | Genomic | SEQ ID NO: 4161 |
| Sb02g032120 | Sorghum | Polynucleotide | SEQ ID NO: 1515 |
| | bicolor | Polypeptide | SEQ ID NO: 1516 |
| | | Genomic | SEQ ID NO: 4162 |
| Sb02g032150 | Sorghum | Polynucleotide | SEQ ID NO: 1517 |
| | bicolor | Polypeptide | SEQ ID NO: 1518 |
| | | Genomic | SEQ ID NO: 4163 |
| Sb02g032160 | Sorghum | Polynucleotide | SEQ ID NO: 1519 |
| | bicolor | Polypeptide | SEQ ID NO: 1520 |
| | | Genomic | SEQ ID NO: 4164 |
| Sb02g032430 | Sorghum | Polynucleotide | SEQ ID NO: 1521 |
| | bicolor | Polypeptide | SEQ ID NO: 1522 |
| | | Genomic | SEQ ID NO: 4165 |
| Sb02g032720 | Sorghum | Polynucleotide | SEQ ID NO: 1523 |
| | bicolor | Polypeptide | SEQ ID NO: 1524 |
| | | Genomic | SEQ ID NO: 4166 |
| Sb02g032725 | Sorghum | Polynucleotide | SEQ ID NO: 1525 |
| | bicolor | Polypeptide | SEQ ID NO: 1526 |
| | | Genomic | SEQ ID NO: 4167 |
| Sb02g033230 | Sorghum | Polynucleotide | SEQ ID NO: 1527 |
| | bicolor | Polypeptide | SEQ ID NO: 1528 |
| | | Genomic | SEQ ID NO: 4168 |
| Sb02g033380 | Sorghum | Polynucleotide | SEQ ID NO: 1529 |
| | bicolor | Polypeptide | SEQ ID NO: 1530 |
| | | Genomic | SEQ ID NO: 4169 |
| Sb02g033410 | Sorghum | Polynucleotide | SEQ ID NO: 1531 |
| | bicolor | Polypeptide | SEQ ID NO: 1532 |
| | | Genomic | SEQ ID NO: 4170 |
| Sb02g033710 | Sorghum | Polynucleotide | SEQ ID NO: 1533 |
| | bicolor | Polypeptide | SEQ ID NO: 1534 |
| | | Genomic | SEQ ID NO: 4171 |
| Sb02g033780 | Sorghum | Polynucleotide | SEQ ID NO: 1535 |
| | bicolor | Polypeptide | SEQ ID NO: 1536 |
| | | Genomic | SEQ ID NO: 4172 |
| Sb02g034070 | Sorghum | Polynucleotide | SEQ ID NO: 1537 |
| | bicolor | Polypeptide | SEQ ID NO: 1538 |
| | | Genomic | SEQ ID NO: 4173 |
| Sb02g034250 | Sorghum | Polynucleotide | SEQ ID NO: 1539 |
| | bicolor | Polypeptide | SEQ ID NO: 1540 |
| | | Genomic | SEQ ID NO: 4174 |
| Sb02g034410 | Sorghum | Polynucleotide | SEQ ID NO: 1541 |
| | bicolor | Polypeptide | SEQ ID NO: 1542 |
| | | Genomic | SEQ ID NO: 4175 |
| Sb02g034920 | Sorghum | Polynucleotide | SEQ ID NO: 1543 |
| | bicolor | Polypeptide | SEQ ID NO: 1544 |
| | | Genomic | SEQ ID NO: 4176 |
| Sb02g035170 | Sorghum | Polynucleotide | SEQ ID NO: 1545 |
| | bicolor | Polypeptide | SEQ ID NO: 1546 |
| | | Genomic | SEQ ID NO: 4177 |
| Sb02g164910 | Sorghum | Polynucleotide | SEQ ID NO: 1547 |
| | bicolor | Polypeptide | SEQ ID NO: 1548 |
| | | Genomic | SEQ ID NO: 4178 |
| Sb02g035440 | Sorghum | Polynucleotide | SEQ ID NO: 1549 |
| | bicolor | Polypeptide | SEQ ID NO: 1550 |
| | | Genomic | SEQ ID NO: 4179 |
| Sb02g035610 | Sorghum | Polynucleotide | SEQ ID NO: 1551 |
| | bicolor | Polypeptide | SEQ ID NO: 1552 |
| | | Genomic | SEQ ID NO: 4180 |
| Sb02g036010 | Sorghum | Polynucleotide | SEQ ID NO: 1553 |
| | bicolor | Polypeptide | SEQ ID NO: 1554 |
| | | Genomic | SEQ ID NO: 4181 |
| Sb02g036040 | Sorghum | Polynucleotide | SEQ ID NO: 1555 |
| | bicolor | Polypeptide | SEQ ID NO: 1556 |
| | | Genomic | SEQ ID NO: 4182 |
| Sb02g036260 | Sorghum | Polynucleotide | SEQ ID NO: 1557 |
| | bicolor | Polypeptide | SEQ ID NO: 1558 |
| | | Genomic | SEQ ID NO: 4183 |
| Sb02g036500 | Sorghum | Polynucleotide | SEQ ID NO: 1559 |
| | bicolor | Polypeptide | SEQ ID NO: 1560 |
| | | Genomic | SEQ ID NO: 4184 |
| Sb02g036685 | Sorghum | Polynucleotide | SEQ ID NO: 1561 |
| | bicolor | Polypeptide | SEQ ID NO: 1562 |
| | | Genomic | SEQ ID NO: 4185 |
| Sb02g036760 | Sorghum | Polynucleotide | SEQ ID NO: 1563 |
| | bicolor | Polypeptide | SEQ ID NO: 1564 |
| | | Genomic | SEQ ID NO: 4186 |
| Sb02g036800 | Sorghum | Polynucleotide | SEQ ID NO: 1565 |
| | bicolor | Polypeptide | SEQ ID NO: 1566 |
| | | Genomic | SEQ ID NO: 4187 |
| Sb02g037260 | Sorghum | Polynucleotide | SEQ ID NO: 1567 |
| | bicolor | Polypeptide | SEQ ID NO: 1568 |
| | | Genomic | SEQ ID NO: 4188 |
| Sb02g037380 | Sorghum | Polynucleotide | SEQ ID NO: 1569 |
| | bicolor | Polypeptide | SEQ ID NO: 1570 |
| | | Genomic | SEQ ID NO: 4189 |
| Sb02g037620 | Sorghum | Polynucleotide | SEQ ID NO: 1571 |
| | bicolor | Polypeptide | SEQ ID NO: 1572 |
| | | Genomic | SEQ ID NO: 4190 |
| Sb02g037650 | Sorghum | Polynucleotide | SEQ ID NO: 1573 |
| | bicolor | Polypeptide | SEQ ID NO: 1574 |
| | | Genomic | SEQ ID NO: 4191 |
| Sb02g037860 | Sorghum | Polynucleotide | SEQ ID NO: 1575 |
| | bicolor | Polypeptide | SEQ ID NO: 1576 |
| | | Genomic | SEQ ID NO: 4192 |
| Sb02g037875 | Sorghum | Polynucleotide | SEQ ID NO: 1577 |
| | bicolor | Polypeptide | SEQ ID NO: 1578 |
| | | Genomic | SEQ ID NO: 4193 |
| Sb02g038020 | Sorghum | Polynucleotide | SEQ ID NO: 1579 |
| | bicolor | Polypeptide | SEQ ID NO: 1580 |
| | | Genomic | SEQ ID NO: 4194 |
| Sb02g169130 | Sorghum | Polynucleotide | SEQ ID NO: 1581 |
| | bicolor | Polypeptide | SEQ ID NO: 1582 |
| | | Genomic | SEQ ID NO: 4195 |
| Sb02g038640 | Sorghum | Polynucleotide | SEQ ID NO: 1583 |
| | bicolor | Polypeptide | SEQ ID NO: 1584 |
| | | Genomic | SEQ ID NO: 4196 |
| Sb02g038710 | Sorghum | Polynucleotide | SEQ ID NO: 1585 |
| | bicolor | Polypeptide | SEQ ID NO: 1586 |
| | | Genomic | SEQ ID NO: 4197 |
| Sb02g039120 | Sorghum | Polynucleotide | SEQ ID NO: 1587 |
| | bicolor | Polypeptide | SEQ ID NO: 1588 |
| | | Genomic | SEQ ID NO: 4198 |
| Sb02g039190 | Sorghum | Polynucleotide | SEQ ID NO: 1589 |
| | bicolor | Polypeptide | SEQ ID NO: 1590 |
| | | Genomic | SEQ ID NO: 4199 |
| Sb02g170670 | Sorghum | Polynucleotide | SEQ ID NO: 1591 |
| | bicolor | Polypeptide | SEQ ID NO: 1592 |
| | | Genomic | SEQ ID NO: 4200 |
| Sb02g039560 | Sorghum | Polynucleotide | SEQ ID NO: 1593 |
| | bicolor | Polypeptide | SEQ ID NO: 1594 |
| | | Genomic | SEQ ID NO: 4201 |
| Sb02g041830 | Sorghum | Polynucleotide | SEQ ID NO: 1595 |
| | bicolor | Polypeptide | SEQ ID NO: 1596 |
| | | Genomic | SEQ ID NO: 4202 |
| Sb02g039920 | Sorghum | Polynucleotide | SEQ ID NO: 1597 |
| | bicolor | Polypeptide | SEQ ID NO: 1598 |
| | | Genomic | SEQ ID NO: 4203 |
| Sb02g040320 | Sorghum | Polynucleotide | SEQ ID NO: 1599 |
| | bicolor | Polypeptide | SEQ ID NO: 1600 |
| | | Genomic | SEQ ID NO: 4204 |
| Sb02g040490 | Sorghum | Polynucleotide | SEQ ID NO: 1601 |
| | bicolor | Polypeptide | SEQ ID NO: 1602 |
| | | Genomic | SEQ ID NO: 4205 |
| Sb02g040530 | Sorghum | Polynucleotide | SEQ ID NO: 1603 |
| | bicolor | Polypeptide | SEQ ID NO: 1604 |
| | | Genomic | SEQ ID NO: 4206 |
| Sb02g040650 | Sorghum | Polynucleotide | SEQ ID NO: 1605 |
| | bicolor | Polypeptide | SEQ ID NO: 1606 |
| | | Genomic | SEQ ID NO: 4207 |
| Sb02g041150 | Sorghum | Polynucleotide | SEQ ID NO: 1607 |
| | bicolor | Polypeptide | SEQ ID NO: 1608 |
| | | Genomic | SEQ ID NO: 4208 |
| Sb02g041160 | Sorghum | Polynucleotide | SEQ ID NO: 1609 |
| | bicolor | Polypeptide | SEQ ID NO: 1610 |
| | | Genomic | SEQ ID NO: 4209 |
| Sb02g041240 | Sorghum | Polynucleotide | SEQ ID NO: 1611 |
| | bicolor | Polypeptide | SEQ ID NO: 1612 |
| | | Genomic | SEQ ID NO: 4210 |
| Sb02g041360 | Sorghum | Polynucleotide | SEQ ID NO: 1613 |
| | bicolor | Polypeptide | SEQ ID NO: 1614 |
| | | Genomic | SEQ ID NO: 4211 |
| Sb02g042210 | Sorghum | Polynucleotide | SEQ ID NO: 1615 |
| | bicolor | Polypeptide | SEQ ID NO: 1616 |
| | | Genomic | SEQ ID NO: 4212 |
| Sb02g042230 | Sorghum | Polynucleotide | SEQ ID NO: 1617 |
| | bicolor | Polypeptide | SEQ ID NO: 1618 |
| | | Genomic | SEQ ID NO: 4213 |
| Sb02g042260 | Sorghum | Polynucleotide | SEQ ID NO: 1619 |
| | bicolor | Polypeptide | SEQ ID NO: 1620 |
| | | Genomic | SEQ ID NO: 4214 |
| Sb02g042750 | Sorghum | Polynucleotide | SEQ ID NO: 1621 |
| | bicolor | Polypeptide | SEQ ID NO: 1622 |
| | | Genomic | SEQ ID NO: 4215 |
| Sb02g042880 | Sorghum | Polynucleotide | SEQ ID NO: 1623 |
| | bicolor | Polypeptide | SEQ ID NO: 1624 |
| | | Genomic | SEQ ID NO: 4216 |
| Sb02g042960 | Sorghum | Polynucleotide | SEQ ID NO: 1625 |
| | bicolor | Polypeptide | SEQ ID NO: 1626 |
| | | Genomic | SEQ ID NO: 4217 |
| Sb02g043020 | Sorghum | Polynucleotide | SEQ ID NO: 1627 |
| | bicolor | Polypeptide | SEQ ID NO: 1628 |
| | | Genomic | SEQ ID NO: 4218 |
| Sb02g043310 | Sorghum | Polynucleotide | SEQ ID NO: 1629 |
| | bicolor | Polypeptide | SEQ ID NO: 1630 |
| | | Genomic | SEQ ID NO: 4219 |
| Sb02g043400 | Sorghum | Polynucleotide | SEQ ID NO: 1631 |
| | bicolor | Polypeptide | SEQ ID NO: 1632 |
| | | Genomic | SEQ ID NO: 4220 |
| Sb02g043440 | Sorghum | Polynucleotide | SEQ ID NO: 1633 |
| | bicolor | Polypeptide | SEQ ID NO: 1634 |
| | | Genomic | SEQ ID NO: 4221 |
| Sb02g176750 | Sorghum | Polynucleotide | SEQ ID NO: 1635 |
| | bicolor | Polypeptide | SEQ ID NO: 1636 |
| | | Genomic | SEQ ID NO: 4222 |
| Sb03g000370 | Sorghum | Polynucleotide | SEQ ID NO: 1637 |
| | bicolor | Polypeptide | SEQ ID NO: 1638 |
| | | Genomic | SEQ ID NO: 4223 |
| Sb03g000670 | Sorghum | Polynucleotide | SEQ ID NO: 1639 |
| | bicolor | Polypeptide | SEQ ID NO: 1640 |
| | | Genomic | SEQ ID NO: 4224 |
| Sb03g000690 | Sorghum | Polynucleotide | SEQ ID NO: 1641 |
| | bicolor | Polypeptide | SEQ ID NO: 1642 |
| | | Genomic | SEQ ID NO: 4225 |
| Sb03g000850 | Sorghum | Polynucleotide | SEQ ID NO: 1643 |
| | bicolor | Polypeptide | SEQ ID NO: 1644 |
| | | Genomic | SEQ ID NO: 4226 |
| Sb03g000930 | Sorghum | Polynucleotide | SEQ ID NO: 1645 |
| | bicolor | Polypeptide | SEQ ID NO: 1646 |
| | | Genomic | SEQ ID NO: 4227 |
| Sb03g001020 | Sorghum | Polynucleotide | SEQ ID NO: 1647 |
| | bicolor | Polypeptide | SEQ ID NO: 1648 |
| | | Genomic | SEQ ID NO: 4228 |
| Sb03g001140 | Sorghum | Polynucleotide | SEQ ID NO: 1649 |
| | bicolor | Polypeptide | SEQ ID NO: 1650 |
| | | Genomic | SEQ ID NO: 4229 |
| Sb03g004100 | Sorghum | Polynucleotide | SEQ ID NO: 1651 |
| | bicolor | Polypeptide | SEQ ID NO: 1652 |
| | | Genomic | SEQ ID NO: 4230 |
| Sb03g001430 | Sorghum | Polynucleotide | SEQ ID NO: 1653 |
| | bicolor | Polypeptide | SEQ ID NO: 1654 |
| | | Genomic | SEQ ID NO: 4231 |
| Sb03g001440 | Sorghum | Polynucleotide | SEQ ID NO: 1655 |
| | bicolor | Polypeptide | SEQ ID NO: 1656 |
| | | Genomic | SEQ ID NO: 4232 |
| Sb03g001590 | Sorghum | Polynucleotide | SEQ ID NO: 1657 |
| | bicolor | Polypeptide | SEQ ID NO: 1658 |
| | | Genomic | SEQ ID NO: 4233 |
| Sb03g001800 | Sorghum | Polynucleotide | SEQ ID NO: 1659 |
| | bicolor | Polypeptide | SEQ ID NO: 1660 |
| | | Genomic | SEQ ID NO: 4234 |
| Sb03g001990 | Sorghum | Polynucleotide | SEQ ID NO: 1661 |
| | bicolor | Polypeptide | SEQ ID NO: 1662 |
| | | Genomic | SEQ ID NO: 4235 |
| Sb03g002660 | Sorghum | Polynucleotide | SEQ ID NO: 1663 |
| | bicolor | Polypeptide | SEQ ID NO: 1664 |
| | | Genomic | SEQ ID NO: 4236 |
| Sb03g002990 | Sorghum | Polynucleotide | SEQ ID NO: 1665 |
| | bicolor | Polypeptide | SEQ ID NO: 1666 |
| | | Genomic | SEQ ID NO: 4237 |
| Sb03g003063 | Sorghum | Polynucleotide | SEQ ID NO: 1667 |
| | bicolor | Polypeptide | SEQ ID NO: 1668 |
| | | Genomic | SEQ ID NO: 4238 |
| Sb03g003130 | Sorghum | Polynucleotide | SEQ ID NO: 1669 |
| | bicolor | Polypeptide | SEQ ID NO: 1670 |
| | | Genomic | SEQ ID NO: 4239 |
| Sb03g003700 | Sorghum | Polynucleotide | SEQ ID NO: 1671 |
| | bicolor | Polypeptide | SEQ ID NO: 1672 |
| | | Genomic | SEQ ID NO: 4240 |
| Sb03g004110 | Sorghum | Polynucleotide | SEQ ID NO: 1673 |
| | bicolor | Polypeptide | SEQ ID NO: 1674 |
| | | Genomic | SEQ ID NO: 4241 |
| Sb03g004330 | Sorghum | Polynucleotide | SEQ ID NO: 1675 |
| | bicolor | Polypeptide | SEQ ID NO: 1676 |
| | | Genomic | SEQ ID NO: 4242 |
| Sb03g004390 | Sorghum | Polynucleotide | SEQ ID NO: 1677 |
| | bicolor | Polypeptide | SEQ ID NO: 1678 |
| | | Genomic | SEQ ID NO: 4243 |
| Sb03g004410 | Sorghum | Polynucleotide | SEQ ID NO: 1679 |
| | bicolor | Polypeptide | SEQ ID NO: 1680 |
| | | Genomic | SEQ ID NO: 4244 |
| Sb03g004630 | Sorghum | Polynucleotide | SEQ ID NO: 1681 |
| | bicolor | Polypeptide | SEQ ID NO: 1682 |
| | | Genomic | SEQ ID NO: 4245 |
| Sb03g004760 | Sorghum | Polynucleotide | SEQ ID NO: 1683 |
| | bicolor | Polypeptide | SEQ ID NO: 1684 |
| | | Genomic | SEQ ID NO: 4246 |
| Sb03g004920 | Sorghum | Polynucleotide | SEQ ID NO: 1685 |
| | bicolor | Polypeptide | SEQ ID NO: 1686 |
| | | Genomic | SEQ ID NO: 4247 |
| Sb03g005120 | Sorghum | Polynucleotide | SEQ ID NO: 1687 |
| | bicolor | Polypeptide | SEQ ID NO: 1688 |
| | | Genomic | SEQ ID NO: 4248 |
| Sb03g005130 | Sorghum | Polynucleotide | SEQ ID NO: 1689 |
| | bicolor | Polypeptide | SEQ ID NO: 1690 |
| | | Genomic | SEQ ID NO: 4249 |
| Sb03g005330 | Sorghum | Polynucleotide | SEQ ID NO: 1691 |
| | bicolor | Polypeptide | SEQ ID NO: 1692 |
| | | Genomic | SEQ ID NO: 4250 |
| Sb03g005710 | Sorghum | Polynucleotide | SEQ ID NO: 1693 |
| | bicolor | Polypeptide | SEQ ID NO: 1694 |
| | | Genomic | SEQ ID NO: 4251 |
| Sb03g005950 | Sorghum | Polynucleotide | SEQ ID NO: 1695 |
| | bicolor | Polypeptide | SEQ ID NO: 1696 |
| | | Genomic | SEQ ID NO: 4252 |
| Sb03g006090 | Sorghum | Polynucleotide | SEQ ID NO: 1697 |
| | bicolor | Polypeptide | SEQ ID NO: 1698 |
| | | Genomic | SEQ ID NO: 4253 |
| Sb03g014160 | Sorghum | Polynucleotide | SEQ ID NO: 1699 |
| | bicolor | Polypeptide | SEQ ID NO: 1700 |
| | | Genomic | SEQ ID NO: 4254 |
| Sb03g007320 | Sorghum | Polynucleotide | SEQ ID NO: 1701 |
| | bicolor | Polypeptide | SEQ ID NO: 1702 |
| | | Genomic | SEQ ID NO: 4255 |
| Sb03g008180 | Sorghum | Polynucleotide | SEQ ID NO: 1703 |
| | bicolor | Polypeptide | SEQ ID NO: 1704 |
| | | Genomic | SEQ ID NO: 4256 |
| Sb03g008460 | Sorghum | Polynucleotide | SEQ ID NO: 1705 |
| | bicolor | Polypeptide | SEQ ID NO: 1706 |
| | | Genomic | SEQ ID NO: 4257 |
| Sb03g017060 | Sorghum | Polynucleotide | SEQ ID NO: 1707 |
| | bicolor | Polypeptide | SEQ ID NO: 1708 |
| | | Genomic | SEQ ID NO: 4258 |
| Sb03g008750 | Sorghum | Polynucleotide | SEQ ID NO: 1709 |
| | bicolor | Polypeptide | SEQ ID NO: 1710 |
| | | Genomic | SEQ ID NO: 4259 |
| Sb03g009250 | Sorghum | Polynucleotide | SEQ ID NO: 1711 |
| | bicolor | Polypeptide | SEQ ID NO: 1712 |
| | | Genomic | SEQ ID NO: 4260 |
| Sb03g009260 | Sorghum | Polynucleotide | SEQ ID NO: 1713 |
| | bicolor | Polypeptide | SEQ ID NO: 1714 |
| | | Genomic | SEQ ID NO: 4261 |
| Sb03g009370 | Sorghum | Polynucleotide | SEQ ID NO: 1715 |
| | bicolor | Polypeptide | SEQ ID NO: 1716 |
| | | Genomic | SEQ ID NO: 4262 |
| Sb03g018950 | Sorghum | Polynucleotide | SEQ ID NO: 1717 |
| | bicolor | Polypeptide | SEQ ID NO: 1718 |
| | | Genomic | SEQ ID NO: 4263 |
| Sb03g009410 | Sorghum | Polynucleotide | SEQ ID NO: 1719 |
| | bicolor | Polypeptide | SEQ ID NO: 1720 |
| | | Genomic | SEQ ID NO: 4264 |
| Sb03g009450 | Sorghum | Polynucleotide | SEQ ID NO: 1721 |
| | bicolor | Polypeptide | SEQ ID NO: 1722 |
| | | Genomic | SEQ ID NO: 4265 |
| Sb03g009910 | Sorghum | Polynucleotide | SEQ ID NO: 1723 |
| | bicolor | Polypeptide | SEQ ID NO: 1724 |
| | | Genomic | SEQ ID NO: 4266 |
| Sb03g010570 | Sorghum | Polynucleotide | SEQ ID NO: 1725 |
| | bicolor | Polypeptide | SEQ ID NO: 1726 |
| | | Genomic | SEQ ID NO: 4267 |
| Sb03g010620 | Sorghum | Polynucleotide | SEQ ID NO: 1727 |
| | bicolor | Polypeptide | SEQ ID NO: 1728 |
| | | Genomic | SEQ ID NO: 4268 |
| Sb03g010690 | Sorghum | Polynucleotide | SEQ ID NO: 1729 |
| | bicolor | Polypeptide | SEQ ID NO: 1730 |
| | | Genomic | SEQ ID NO: 4269 |
| Sb03g010710 | Sorghum | Polynucleotide | SEQ ID NO: 1731 |
| | bicolor | Polypeptide | SEQ ID NO: 1732 |
| | | Genomic | SEQ ID NO: 4270 |
| Sb07g025410 | Sorghum | Polynucleotide | SEQ ID NO: 1733 |
| | bicolor | Polypeptide | SEQ ID NO: 1734 |
| | | Genomic | SEQ ID NO: 4271 |
| Sb03g010840 | Sorghum | Polynucleotide | SEQ ID NO: 1735 |
| | bicolor | Polypeptide | SEQ ID NO: 1736 |
| | | Genomic | SEQ ID NO: 4272 |
| Sb03g010930 | Sorghum | Polynucleotide | SEQ ID NO: 1737 |
| | bicolor | Polypeptide | SEQ ID NO: 1738 |
| | | Genomic | SEQ ID NO: 4273 |
| Sb03g010940 | Sorghum | Polynucleotide | SEQ ID NO: 1739 |
| | bicolor | Polypeptide | SEQ ID NO: 1740 |
| | | Genomic | SEQ ID NO: 4274 |
| Sb03g011440 | Sorghum | Polynucleotide | SEQ ID NO: 1741 |
| | bicolor | Polypeptide | SEQ ID NO: 1742 |
| | | Genomic | SEQ ID NO: 4275 |
| Sb03g011510 | Sorghum | Polynucleotide | SEQ ID NO: 1743 |
| | bicolor | Polypeptide | SEQ ID NO: 1744 |
| | | Genomic | SEQ ID NO: 4276 |
| Sb03g024480 | Sorghum | Polynucleotide | SEQ ID NO: 1745 |
| | bicolor | Polypeptide | SEQ ID NO: 1746 |
| | | Genomic | SEQ ID NO: 4277 |
| Sb03g011700 | Sorghum | Polynucleotide | SEQ ID NO: 1747 |
| | bicolor | Polypeptide | SEQ ID NO: 1748 |
| | | Genomic | SEQ ID NO: 4278 |
| Sb03g012020 | Sorghum | Polynucleotide | SEQ ID NO: 1749 |
| | bicolor | Polypeptide | SEQ ID NO: 1750 |
| | | Genomic | SEQ ID NO: 4279 |
| Sb03g012330 | Sorghum | Polynucleotide | SEQ ID NO: 1751 |
| | bicolor | Polypeptide | SEQ ID NO: 1752 |
| | | Genomic | SEQ ID NO: 4280 |
| Sb03g013000 | Sorghum | Polynucleotide | SEQ ID NO: 1753 |
| | bicolor | Polypeptide | SEQ ID NO: 1754 |
| | | Genomic | SEQ ID NO: 4281 |
| Sb03g013080 | Sorghum | Polynucleotide | SEQ ID NO: 1755 |
| | bicolor | Polypeptide | SEQ ID NO: 1756 |
| | | Genomic | SEQ ID NO: 4282 |
| Sb03g013090 | Sorghum | Polynucleotide | SEQ ID NO: 1757 |
| | bicolor | Polypeptide | SEQ ID NO: 1758 |
| | | Genomic | SEQ ID NO: 4283 |
| Sb03g013170 | Sorghum | Polynucleotide | SEQ ID NO: 1759 |
| | bicolor | Polypeptide | SEQ ID NO: 1760 |
| | | Genomic | SEQ ID NO: 4284 |
| Sb03g013340 | Sorghum | Polynucleotide | SEQ ID NO: 1761 |
| | bicolor | Polypeptide | SEQ ID NO: 1762 |
| | | Genomic | SEQ ID NO: 4285 |
| Sb03g033220 | Sorghum | Polynucleotide | SEQ ID NO: 1763 |
| | bicolor | Polypeptide | SEQ ID NO: 1764 |
| | | Genomic | SEQ ID NO: 4286 |
| Sb03g013590 | Sorghum | Polynucleotide | SEQ ID NO: 1765 |
| | bicolor | Polypeptide | SEQ ID NO: 1766 |
| | | Genomic | SEQ ID NO: 4287 |
| Sb03g013615 | Sorghum | Polynucleotide | SEQ ID NO: 1767 |
| | bicolor | Polypeptide | SEQ ID NO: 1768 |
| | | Genomic | SEQ ID NO: 4288 |
| Sb03g013840 | Sorghum | Polynucleotide | SEQ ID NO: 1769 |
| | bicolor | Polypeptide | SEQ ID NO: 1770 |
| | | Genomic | SEQ ID NO: 4289 |
| Sb03g014460 | Sorghum | Polynucleotide | SEQ ID NO: 1771 |
| | bicolor | Polypeptide | SEQ ID NO: 1772 |
| | | Genomic | SEQ ID NO: 4290 |
| Sb03g014690 | Sorghum | Polynucleotide | SEQ ID NO: 1773 |
| | bicolor | Polypeptide | SEQ ID NO: 1774 |
| | | Genomic | SEQ ID NO: 4291 |
| Sb03g014740 | Sorghum | Polynucleotide | SEQ ID NO: 1775 |
| | bicolor | Polypeptide | SEQ ID NO: 1776 |
| | | Genomic | SEQ ID NO: 4292 |
| Sb03g016720 | Sorghum | Polynucleotide | SEQ ID NO: 1777 |
| | bicolor | Polypeptide | SEQ ID NO: 1778 |
| | | Genomic | SEQ ID NO: 4293 |
| Sb03g095130 | Sorghum | Polynucleotide | SEQ ID NO: 1779 |
| | bicolor | Polypeptide | SEQ ID NO: 1780 |
| | | Genomic | SEQ ID NO: 4294 |
| Sb03g021050 | Sorghum | Polynucleotide | SEQ ID NO: 1781 |
| | bicolor | Polypeptide | SEQ ID NO: 1782 |
| | | Genomic | SEQ ID NO: 4295 |
| Sb03g022880 | Sorghum | Polynucleotide | SEQ ID NO: 1783 |
| | bicolor | Polypeptide | SEQ ID NO: 1784 |
| | | Genomic | SEQ ID NO: 4296 |
| Sb03g023490 | Sorghum | Polynucleotide | SEQ ID NO: 1785 |
| | bicolor | Polypeptide | SEQ ID NO: 1786 |
| | | Genomic | SEQ ID NO: 4297 |
| Sb03g126290 | Sorghum | Polynucleotide | SEQ ID NO: 1787 |
| | bicolor | Polypeptide | SEQ ID NO: 1788 |
| | | Genomic | SEQ ID NO: 4298 |
| Sb03g126310 | Sorghum | Polynucleotide | SEQ ID NO: 1789 |
| | bicolor | Polypeptide | SEQ ID NO: 1790 |
| | | Genomic | SEQ ID NO: 4299 |
| Sb03g025100 | Sorghum | Polynucleotide | SEQ ID NO: 1791 |
| | bicolor | Polypeptide | SEQ ID NO: 1792 |
| | | Genomic | SEQ ID NO: 4300 |
| Sb03g025560 | Sorghum | Polynucleotide | SEQ ID NO: 1793 |
| | bicolor | Polypeptide | SEQ ID NO: 1794 |
| | | Genomic | SEQ ID NO: 4301 |
| Sb03g025750 | Sorghum | Polynucleotide | SEQ ID NO: 1795 |
| | bicolor | Polypeptide | SEQ ID NO: 1796 |
| | | Genomic | SEQ ID NO: 4302 |
| Sb03g026670 | Sorghum | Polynucleotide | SEQ ID NO: 1797 |
| | bicolor | Polypeptide | SEQ ID NO: 1798 |
| | | Genomic | SEQ ID NO: 4303 |
| Sb03g027246 | Sorghum | Polynucleotide | SEQ ID NO: 1799 |
| | bicolor | Polypeptide | SEQ ID NO: 1800 |
| | | Genomic | SEQ ID NO: 4304 |
| Sb03g027405 | Sorghum | Polynucleotide | SEQ ID NO: 1801 |
| | bicolor | Polypeptide | SEQ ID NO: 1802 |
| | | Genomic | SEQ ID NO: 4305 |
| Sb03g027470 | Sorghum | Polynucleotide | SEQ ID NO: 1803 |
| | bicolor | Polypeptide | SEQ ID NO: 1804 |
| | | Genomic | SEQ ID NO: 4306 |
| Sb03g028040 | Sorghum | Polynucleotide | SEQ ID NO: 1805 |
| | bicolor | Polypeptide | SEQ ID NO: 1806 |
| | | Genomic | SEQ ID NO: 4307 |
| Sb03g028070 | Sorghum | Polynucleotide | SEQ ID NO: 1807 |
| | bicolor | Polypeptide | SEQ ID NO: 1808 |
| | | Genomic | SEQ ID NO: 4308 |
| Sb03g028140 | Sorghum | Polynucleotide | SEQ ID NO: 1809 |
| | bicolor | Polypeptide | SEQ ID NO: 1810 |
| | | Genomic | SEQ ID NO: 4309 |
| Sb03g028300 | Sorghum | Polynucleotide | SEQ ID NO: 1811 |
| | bicolor | Polypeptide | SEQ ID NO: 1812 |
| | | Genomic | SEQ ID NO: 4310 |
| Sb03g028330 | Sorghum | Polynucleotide | SEQ ID NO: 1813 |
| | bicolor | Polypeptide | SEQ ID NO: 1814 |
| | | Genomic | SEQ ID NO: 4311 |
| Sb03g028420 | Sorghum | Polynucleotide | SEQ ID NO: 1815 |
| | bicolor | Polypeptide | SEQ ID NO: 1816 |
| | | Genomic | SEQ ID NO: 4312 |
| Sb03g028600 | Sorghum | Polynucleotide | SEQ ID NO: 1817 |
| | bicolor | Polypeptide | SEQ ID NO: 1818 |
| | | Genomic | SEQ ID NO: 4313 |
| Sb03g028850 | Sorghum | Polynucleotide | SEQ ID NO: 1819 |
| | bicolor | Polypeptide | SEQ ID NO: 1820 |
| | | Genomic | SEQ ID NO: 4314 |
| Sb03g029030 | Sorghum | Polynucleotide | SEQ ID NO: 1821 |
| | bicolor | Polypeptide | SEQ ID NO: 1822 |
| | | Genomic | SEQ ID NO: 4315 |
| Sb03g029170 | Sorghum | Polynucleotide | SEQ ID NO: 1823 |
| | bicolor | Polypeptide | SEQ ID NO: 1824 |
| | | Genomic | SEQ ID NO: 4316 |
| Sb03g029360 | Sorghum | Polynucleotide | SEQ ID NO: 1825 |
| | bicolor | Polypeptide | SEQ ID NO: 1826 |
| | | Genomic | SEQ ID NO: 4317 |
| Sb03g029430 | Sorghum | Polynucleotide | SEQ ID NO: 1827 |
| | bicolor | Polypeptide | SEQ ID NO: 1828 |
| | | Genomic | SEQ ID NO: 4318 |
| Sb03g029490 | Sorghum | Polynucleotide | SEQ ID NO: 1829 |
| | bicolor | Polypeptide | SEQ ID NO: 1830 |
| | | Genomic | SEQ ID NO: 4319 |
| Sb03g030090 | Sorghum | Polynucleotide | SEQ ID NO: 1831 |
| | bicolor | Polypeptide | SEQ ID NO: 1832 |
| | | Genomic | SEQ ID NO: 4320 |
| Sb03g030450 | Sorghum | Polynucleotide | SEQ ID NO: 1833 |
| | bicolor | Polypeptide | SEQ ID NO: 1834 |
| | | Genomic | SEQ ID NO: 4321 |
| Sb03g154350 | Sorghum | Polynucleotide | SEQ ID NO: 1835 |
| | bicolor | Polypeptide | SEQ ID NO: 1836 |
| | | Genomic | SEQ ID NO: 4322 |
| Sb03g030720 | Sorghum | Polynucleotide | SEQ ID NO: 1837 |
| | bicolor | Polypeptide | SEQ ID NO: 1838 |
| | | Genomic | SEQ ID NO: 4323 |
| Sb03g031310 | Sorghum | Polynucleotide | SEQ ID NO: 1839 |
| | bicolor | Polypeptide | SEQ ID NO: 1840 |
| | | Genomic | SEQ ID NO: 4324 |
| Sb03g031780 | Sorghum | Polynucleotide | SEQ ID NO: 1841 |
| | bicolor | Polypeptide | SEQ ID NO: 1842 |
| | | Genomic | SEQ ID NO: 4325 |
| Sb03g031930 | Sorghum | Polynucleotide | SEQ ID NO: 1843 |
| | bicolor | Polypeptide | SEQ ID NO: 1844 |
| | | Genomic | SEQ ID NO: 4326 |
| Sb03g031940 | Sorghum | Polynucleotide | SEQ ID NO: 1845 |
| | bicolor | Polypeptide | SEQ ID NO: 1846 |
| | | Genomic | SEQ ID NO: 4327 |
| Sb03g031990 | Sorghum | Polynucleotide | SEQ ID NO: 1847 |
| | bicolor | Polypeptide | SEQ ID NO: 1848 |
| | | Genomic | SEQ ID NO: 4328 |
| Sb09g001966 | Sorghum | Polynucleotide | SEQ ID NO: 1849 |
| | bicolor | Polypeptide | SEQ ID NO: 1850 |
| | | Genomic | SEQ ID NO: 4329 |
| Sb03g032220 | Sorghum | Polynucleotide | SEQ ID NO: 1851 |
| | bicolor | Polypeptide | SEQ ID NO: 1852 |
| | | Genomic | SEQ ID NO: 4330 |
| Sb03g032235 | Sorghum | Polynucleotide | SEQ ID NO: 1853 |
| | bicolor | Polypeptide | SEQ ID NO: 1854 |
| | | Genomic | SEQ ID NO: 4331 |
| Sb03g032460 | Sorghum | Polynucleotide | SEQ ID NO: 1855 |
| | bicolor | Polypeptide | SEQ ID NO: 1856 |
| | | Genomic | SEQ ID NO: 4332 |
| Sb03g032580 | Sorghum | Polynucleotide | SEQ ID NO: 1857 |
| | bicolor | Polypeptide | SEQ ID NO: 1858 |
| | | Genomic | SEQ ID NO: 4333 |
| Sb03g032710 | Sorghum | Polynucleotide | SEQ ID NO: 1859 |
| | bicolor | Polypeptide | SEQ ID NO: 1860 |
| | | Genomic | SEQ ID NO: 4334 |
| Sb03g033080 | Sorghum | Polynucleotide | SEQ ID NO: 1861 |
| | bicolor | Polypeptide | SEQ ID NO: 1862 |
| | | Genomic | SEQ ID NO: 4335 |
| Sb03g033220 | Sorghum | Polynucleotide | SEQ ID NO: 1863 |
| | bicolor | Polypeptide | SEQ ID NO: 1864 |
| | | Genomic | SEQ ID NO: 4336 |
| Sb03g033340 | Sorghum | Polynucleotide | SEQ ID NO: 1865 |
| | bicolor | Polypeptide | SEQ ID NO: 1866 |
| | | Genomic | SEQ ID NO: 4337 |
| Sb03g033390 | Sorghum | Polynucleotide | SEQ ID NO: 1867 |
| | bicolor | Polypeptide | SEQ ID NO: 1868 |
| | | Genomic | SEQ ID NO: 4338 |
| Sb03g033480 | Sorghum | Polynucleotide | SEQ ID NO: 1869 |
| | bicolor | Polypeptide | SEQ ID NO: 1870 |
| | | Genomic | SEQ ID NO: 4339 |
| Sb03g033540 | Sorghum | Polynucleotide | SEQ ID NO: 1871 |
| | bicolor | Polypeptide | SEQ ID NO: 1872 |
| | | Genomic | SEQ ID NO: 4340 |
| Sb03g033710 | Sorghum | Polynucleotide | SEQ ID NO: 1873 |
| | bicolor | Polypeptide | SEQ ID NO: 1874 |
| | | Genomic | SEQ ID NO: 4341 |
| Sb03g159610 | Sorghum | Polynucleotide | SEQ ID NO: 1875 |
| | bicolor | Polypeptide | SEQ ID NO: 1876 |
| | | Genomic | SEQ ID NO: 4342 |
| Sb03g034110 | Sorghum | Polynucleotide | SEQ ID NO: 1877 |
| | bicolor | Polypeptide | SEQ ID NO: 1878 |
| | | Genomic | SEQ ID NO: 4343 |
| Sb03g034250 | Sorghum | Polynucleotide | SEQ ID NO: 1879 |
| | bicolor | Polypeptide | SEQ ID NO: 1880 |
| | | Genomic | SEQ ID NO: 4344 |
| Sb03g034500 | Sorghum | Polynucleotide | SEQ ID NO: 1881 |
| | bicolor | Polypeptide | SEQ ID NO: 1882 |
| | | Genomic | SEQ ID NO: 4345 |
| Sb03g034530 | Sorghum | Polynucleotide | SEQ ID NO: 1883 |
| | bicolor | Polypeptide | SEQ ID NO: 1884 |
| | | Genomic | SEQ ID NO: 4346 |
| Sb03g034680 | Sorghum | Polynucleotide | SEQ ID NO: 1885 |
| | bicolor | Polypeptide | SEQ ID NO: 1886 |
| | | Genomic | SEQ ID NO: 4347 |
| Sb03g034750 | Sorghum | Polynucleotide | SEQ ID NO: 1887 |
| | bicolor | Polypeptide | SEQ ID NO: 1888 |
| | | Genomic | SEQ ID NO: 4348 |
| Sb03g034830 | Sorghum | Polynucleotide | SEQ ID NO: 1889 |
| | bicolor | Polypeptide | SEQ ID NO: 1890 |
| | | Genomic | SEQ ID NO: 4349 |
| Sb03g035060 | Sorghum | Polynucleotide | SEQ ID NO: 1891 |
| | bicolor | Polypeptide | SEQ ID NO: 1892 |
| | | Genomic | SEQ ID NO: 4350 |
| Sb03g035070 | Sorghum | Polynucleotide | SEQ ID NO: 1893 |
| | bicolor | Polypeptide | SEQ ID NO: 1894 |
| | | Genomic | SEQ ID NO: 4351 |
| Sb03g035090 | Sorghum | Polynucleotide | SEQ ID NO: 1895 |
| | bicolor | Polypeptide | SEQ ID NO: 1896 |
| | | Genomic | SEQ ID NO: 4352 |
| Sb03g035480 | Sorghum | Polynucleotide | SEQ ID NO: 1897 |
| | bicolor | Polypeptide | SEQ ID NO: 1898 |
| | | Genomic | SEQ ID NO: 4353 |
| Sb03g035650 | Sorghum | Polynucleotide | SEQ ID NO: 1899 |
| | bicolor | Polypeptide | SEQ ID NO: 1900 |
| | | Genomic | SEQ ID NO: 4354 |
| Sb03g035750 | Sorghum | Polynucleotide | SEQ ID NO: 1901 |
| | bicolor | Polypeptide | SEQ ID NO: 1902 |
| | | Genomic | SEQ ID NO: 4355 |
| Sb03g162110 | Sorghum | Polynucleotide | SEQ ID NO: 1903 |
| | bicolor | Polypeptide | SEQ ID NO: 1904 |
| | | Genomic | SEQ ID NO: 4356 |
| Sb03g036255 | Sorghum | Polynucleotide | SEQ ID NO: 1905 |
| | bicolor | Polypeptide | SEQ ID NO: 1906 |
| | | Genomic | SEQ ID NO: 4357 |
| Sb03g036390 | Sorghum | Polynucleotide | SEQ ID NO: 1907 |
| | bicolor | Polypeptide | SEQ ID NO: 1908 |
| | | Genomic | SEQ ID NO: 4358 |
| Sb03g036610 | Sorghum | Polynucleotide | SEQ ID NO: 1909 |
| | bicolor | Polypeptide | SEQ ID NO: 1910 |
| | | Genomic | SEQ ID NO: 4359 |
| Sb03g036780 | Sorghum | Polynucleotide | SEQ ID NO: 1911 |
| | bicolor | Polypeptide | SEQ ID NO: 1912 |
| | | Genomic | SEQ ID NO: 4360 |
| Sb03g036810 | Sorghum | Polynucleotide | SEQ ID NO: 1913 |
| | bicolor | Polypeptide | SEQ ID NO: 1914 |
| | | Genomic | SEQ ID NO: 4361 |
| Sb03g037040 | Sorghum | Polynucleotide | SEQ ID NO: 1915 |
| | bicolor | Polypeptide | SEQ ID NO: 1916 |
| | | Genomic | SEQ ID NO: 4362 |
| Sb03g037200 | Sorghum | Polynucleotide | SEQ ID NO: 1917 |
| | bicolor | Polypeptide | SEQ ID NO: 1918 |
| | | Genomic | SEQ ID NO: 4363 |
| Sb03g037490 | Sorghum | Polynucleotide | SEQ ID NO: 1919 |
| | bicolor | Polypeptide | SEQ ID NO: 1920 |
| | | Genomic | SEQ ID NO: 4364 |
| Sb03g037590 | Sorghum | Polynucleotide | SEQ ID NO: 1921 |
| | bicolor | Polypeptide | SEQ ID NO: 1922 |
| | | Genomic | SEQ ID NO: 4365 |
| Sb03g165210 | Sorghum | Polynucleotide | SEQ ID NO: 1923 |
| | bicolor | Polypeptide | SEQ ID NO: 1924 |
| | | Genomic | SEQ ID NO: 4366 |
| Sb03g037900 | Sorghum | Polynucleotide | SEQ ID NO: 1925 |
| | bicolor | Polypeptide | SEQ ID NO: 1926 |
| | | Genomic | SEQ ID NO: 4367 |
| Sb03g037920 | Sorghum | Polynucleotide | SEQ ID NO: 1927 |
| | bicolor | Polypeptide | SEQ ID NO: 1928 |
| | | Genomic | SEQ ID NO: 4368 |
| Sb03g038020 | Sorghum | Polynucleotide | SEQ ID NO: 1929 |
| | bicolor | Polypeptide | SEQ ID NO: 1930 |
| | | Genomic | SEQ ID NO: 4369 |
| Sb03g038110 | Sorghum | Polynucleotide | SEQ ID NO: 1931 |
| | bicolor | Polypeptide | SEQ ID NO: 1932 |
| | | Genomic | SEQ ID NO: 4370 |
| Sb03g038330 | Sorghum | Polynucleotide | SEQ ID NO: 1933 |
| | bicolor | Polypeptide | SEQ ID NO: 1934 |
| | | Genomic | SEQ ID NO: 4371 |
| Sb03g038410 | Sorghum | Polynucleotide | SEQ ID NO: 1935 |
| | bicolor | Polypeptide | SEQ ID NO: 1936 |
| | | Genomic | SEQ ID NO: 4372 |
| Sb03g038680 | Sorghum | Polynucleotide | SEQ ID NO: 1937 |
| | bicolor | Polypeptide | SEQ ID NO: 1938 |
| | | Genomic | SEQ ID NO: 4373 |
| Sb03g166730 | Sorghum | Polynucleotide | SEQ ID NO: 1939 |
| | bicolor | Polypeptide | SEQ ID NO: 1940 |
| | | Genomic | SEQ ID NO: 4374 |
| Sb03g039170 | Sorghum | Polynucleotide | SEQ ID NO: 1941 |
| | bicolor | Polypeptide | SEQ ID NO: 1942 |
| | | Genomic | SEQ ID NO: 4375 |
| Sb03g167060 | Sorghum | Polynucleotide | SEQ ID NO: 1943 |
| | bicolor | Polypeptide | SEQ ID NO: 1944 |
| | | Genomic | SEQ ID NO: 4376 |
| Sb03g039440 | Sorghum | Polynucleotide | SEQ ID NO: 1945 |
| | bicolor | Polypeptide | SEQ ID NO: 1946 |
| | | Genomic | SEQ ID NO: 4377 |
| Sb03g039430 | Sorghum | Polynucleotide | SEQ ID NO: 1947 |
| | bicolor | Polypeptide | SEQ ID NO: 1948 |
| | | Genomic | SEQ ID NO: 4378 |
| Sb03g039480 | Sorghum | Polynucleotide | SEQ ID NO: 1949 |
| | bicolor | Polypeptide | SEQ ID NO: 1950 |
| | | Genomic | SEQ ID NO: 4379 |
| Sb03g039670 | Sorghum | Polynucleotide | SEQ ID NO: 1951 |
| | bicolor | Polypeptide | SEQ ID NO: 1952 |
| | | Genomic | SEQ ID NO: 4380 |
| Sb03g039740 | Sorghum | Polynucleotide | SEQ ID NO: 1953 |
| | bicolor | Polypeptide | SEQ ID NO: 1954 |
| | | Genomic | SEQ ID NO: 4381 |
| Sb03g039900 | Sorghum | Polynucleotide | SEQ ID NO: 1955 |
| | bicolor | Polypeptide | SEQ ID NO: 1956 |
| | | Genomic | SEQ ID NO: 4382 |
| Sb03g040240 | Sorghum | Polynucleotide | SEQ ID NO: 1957 |
| | bicolor | Polypeptide | SEQ ID NO: 1958 |
| | | Genomic | SEQ ID NO: 4383 |
| Sb03g040530 | Sorghum | Polynucleotide | SEQ ID NO: 1959 |
| | bicolor | Polypeptide | SEQ ID NO: 1960 |
| | | Genomic | SEQ ID NO: 4384 |
| Sb03g040720 | Sorghum | Polynucleotide | SEQ ID NO: 1961 |
| | bicolor | Polypeptide | SEQ ID NO: 1962 |
| | | Genomic | SEQ ID NO: 4385 |
| Sb03g040830 | Sorghum | Polynucleotide | SEQ ID NO: 1963 |
| | bicolor | Polypeptide | SEQ ID NO: 1964 |
| | | Genomic | SEQ ID NO: 4386 |
| Sb03g040840 | Sorghum | Polynucleotide | SEQ ID NO: 1965 |
| | bicolor | Polypeptide | SEQ ID NO: 1966 |
| | | Genomic | SEQ ID NO: 4387 |
| Sb03g041040 | Sorghum | Polynucleotide | SEQ ID NO: 1967 |
| | bicolor | Polypeptide | SEQ ID NO: 1968 |
| | | Genomic | SEQ ID NO: 4388 |
| Sb03g041330 | Sorghum | Polynucleotide | SEQ ID NO: 1969 |
| | bicolor | Polypeptide | SEQ ID NO: 1970 |
| | | Genomic | SEQ ID NO: 4389 |
| Sb03g041430 | Sorghum | Polynucleotide | SEQ ID NO: 1971 |
| | bicolor | Polypeptide | SEQ ID NO: 1972 |
| | | Genomic | SEQ ID NO: 4390 |
| Sb03g041560 | Sorghum | Polynucleotide | SEQ ID NO: 1973 |
| | bicolor | Polypeptide | SEQ ID NO: 1974 |
| | | Genomic | SEQ ID NO: 4391 |
| Sb03g041770 | Sorghum | Polynucleotide | SEQ ID NO: 1975 |
| | bicolor | Polypeptide | SEQ ID NO: 1976 |
| | | Genomic | SEQ ID NO: 4392 |
| Sb03g041910 | Sorghum | Polynucleotide | SEQ ID NO: 1977 |
| | bicolor | Polypeptide | SEQ ID NO: 1978 |
| | | Genomic | SEQ ID NO: 4393 |
| Sb03g172070 | Sorghum | Polynucleotide | SEQ ID NO: 1979 |
| | bicolor | Polypeptide | SEQ ID NO: 1980 |
| | | Genomic | SEQ ID NO: 4394 |
| Sb03g042960 | Sorghum | Polynucleotide | SEQ ID NO: 1981 |
| | bicolor | Polypeptide | SEQ ID NO: 1982 |
| | | Genomic | SEQ ID NO: 4395 |
| Sb03g043040 | Sorghum | Polynucleotide | SEQ ID NO: 1983 |
| | bicolor | Polypeptide | SEQ ID NO: 1984 |
| | | Genomic | SEQ ID NO: 4396 |
| Sb03g043420 | Sorghum | Polynucleotide | SEQ ID NO: 1985 |
| | bicolor | Polypeptide | SEQ ID NO: 1986 |
| | | Genomic | SEQ ID NO: 4397 |
| Sb03g043430 | Sorghum | Polynucleotide | SEQ ID NO: 1987 |
| | bicolor | Polypeptide | SEQ ID NO: 1988 |
| | | Genomic | SEQ ID NO: 4398 |
| Sb03g172850 | Sorghum | Polynucleotide | SEQ ID NO: 1989 |
| | bicolor | Polypeptide | SEQ ID NO: 1990 |
| | | Genomic | SEQ ID NO: 4399 |
| Sb03g043690 | Sorghum | Polynucleotide | SEQ ID NO: 1991 |
| | bicolor | Polypeptide | SEQ ID NO: 1992 |
| | | Genomic | SEQ ID NO: 4400 |
| Sb03g044130 | Sorghum | Polynucleotide | SEQ ID NO: 1993 |
| | bicolor | Polypeptide | SEQ ID NO: 1994 |
| | | Genomic | SEQ ID NO: 4401 |
| Sb03g044160 | Sorghum | Polynucleotide | SEQ ID NO: 1995 |
| | bicolor | Polypeptide | SEQ ID NO: 1996 |
| | | Genomic | SEQ ID NO: 4402 |
| Sb03g044200 | Sorghum | Polynucleotide | SEQ ID NO: 1997 |
| | bicolor | Polypeptide | SEQ ID NO: 1998 |
| | | Genomic | SEQ ID NO: 4403 |
| Sb03g044240 | Sorghum | Polynucleotide | SEQ ID NO: 1999 |
| | bicolor | Polypeptide | SEQ ID NO: 2000 |
| | | Genomic | SEQ ID NO: 4404 |
| Sb03g044420 | Sorghum | Polynucleotide | SEQ ID NO: 2001 |
| | bicolor | Polypeptide | SEQ ID NO: 2002 |
| | | Genomic | SEQ ID NO: 4405 |
| Sb03g044530 | Sorghum | Polynucleotide | SEQ ID NO: 2003 |
| | bicolor | Polypeptide | SEQ ID NO: 2004 |
| | | Genomic | SEQ ID NO: 4406 |
| Sb03g044580 | Sorghum | Polynucleotide | SEQ ID NO: 2005 |
| | bicolor | Polypeptide | SEQ ID NO: 2006 |
| | | Genomic | SEQ ID NO: 4407 |
| Sb03g044630 | Sorghum | Polynucleotide | SEQ ID NO: 2007 |
| | bicolor | Polypeptide | SEQ ID NO: 2008 |
| | | Genomic | SEQ ID NO: 4408 |
| Sb03g045290 | Sorghum | Polynucleotide | SEQ ID NO: 2009 |
| | bicolor | Polypeptide | SEQ ID NO: 2010 |
| | | Genomic | SEQ ID NO: 4409 |
| Sb03g045340 | Sorghum | Polynucleotide | SEQ ID NO: 2011 |
| | bicolor | Polypeptide | SEQ ID NO: 2012 |
| | | Genomic | SEQ ID NO: 4410 |
| Sb03g045390 | Sorghum | Polynucleotide | SEQ ID NO: 2013 |
| | bicolor | Polypeptide | SEQ ID NO: 2014 |
| | | Genomic | SEQ ID NO: 4411 |
| Sb03g175730 | Sorghum | Polynucleotide | SEQ ID NO: 2015 |
| | bicolor | Polypeptide | SEQ ID NO: 2016 |
| | | Genomic | SEQ ID NO: 4412 |
| Sb03g045990 | Sorghum | Polynucleotide | SEQ ID NO: 2017 |
| | bicolor | Polypeptide | SEQ ID NO: 2018 |
| | | Genomic | SEQ ID NO: 4413 |
| Sb03g046080 | Sorghum | Polynucleotide | SEQ ID NO: 2019 |
| | bicolor | Polypeptide | SEQ ID NO: 2020 |
| | | Genomic | SEQ ID NO: 4414 |
| Sb03g046660 | Sorghum | Polynucleotide | SEQ ID NO: 2021 |
| | bicolor | Polypeptide | SEQ ID NO: 2022 |
| | | Genomic | SEQ ID NO: 4415 |
| Sb03g047230 | Sorghum | Polynucleotide | SEQ ID NO: 2023 |
| | bicolor | Polypeptide | SEQ ID NO: 2024 |
| | | Genomic | SEQ ID NO: 4416 |
| Sb04g003200 | Sorghum | Polynucleotide | SEQ ID NO: 2025 |
| | bicolor | Polypeptide | SEQ ID NO: 2026 |
| | | Genomic | SEQ ID NO: 4417 |
| Sb04g001190 | Sorghum | Polynucleotide | SEQ ID NO: 2027 |
| | bicolor | Polypeptide | SEQ ID NO: 2028 |
| | | Genomic | SEQ ID NO: 4418 |
| Sb04g001270 | Sorghum | Polynucleotide | SEQ ID NO: 2029 |
| | bicolor | Polypeptide | SEQ ID NO: 2030 |
| | | Genomic | SEQ ID NO: 4419 |
| Sb04g001550 | Sorghum | Polynucleotide | SEQ ID NO: 2031 |
| | bicolor | Polypeptide | SEQ ID NO: 2032 |
| | | Genomic | SEQ ID NO: 4420 |
| Sb04g001620 | Sorghum | Polynucleotide | SEQ ID NO: 2033 |
| | bicolor | Polypeptide | SEQ ID NO: 2034 |
| | | Genomic | SEQ ID NO: 4421 |
| Sb04g001730 | Sorghum | Polynucleotide | SEQ ID NO: 2035 |
| | bicolor | Polypeptide | SEQ ID NO: 2036 |
| | | Genomic | SEQ ID NO: 4422 |
| Sb04g001810 | Sorghum | Polynucleotide | SEQ ID NO: 2037 |
| | bicolor | Polypeptide | SEQ ID NO: 2038 |
| | | Genomic | SEQ ID NO: 4423 |
| Sb04g038150 | Sorghum | Polynucleotide | SEQ ID NO: 2039 |
| | bicolor | Polypeptide | SEQ ID NO: 2040 |
| | | Genomic | SEQ ID NO: 4424 |
| Sb04g002080 | Sorghum | Polynucleotide | SEQ ID NO: 2041 |
| | bicolor | Polypeptide | SEQ ID NO: 2042 |
| | | Genomic | SEQ ID NO: 4425 |
| Sb04g002450 | Sorghum | Polynucleotide | SEQ ID NO: 2043 |
| | bicolor | Polypeptide | SEQ ID NO: 2044 |
| | | Genomic | SEQ ID NO: 4426 |
| Sb04g002790 | Sorghum | Polynucleotide | SEQ ID NO: 2045 |
| | bicolor | Polypeptide | SEQ ID NO: 2046 |
| | | Genomic | SEQ ID NO: 4427 |
| Sb04g006650 | Sorghum | Polynucleotide | SEQ ID NO: 2047 |
| | bicolor | Polypeptide | SEQ ID NO: 2048 |
| | | Genomic | SEQ ID NO: 4428 |
| Sb04g003440 | Sorghum | Polynucleotide | SEQ ID NO: 2049 |
| | bicolor | Polypeptide | SEQ ID NO: 2050 |
| | | Genomic | SEQ ID NO: 4429 |
| Sb04g003780 | Sorghum | Polynucleotide | SEQ ID NO: 2051 |
| | bicolor | Polypeptide | SEQ ID NO: 2052 |
| | | Genomic | SEQ ID NO: 4430 |
| Sb04g003970 | Sorghum | Polynucleotide | SEQ ID NO: 2053 |
| | bicolor | Polypeptide | SEQ ID NO: 2054 |
| | | Genomic | SEQ ID NO: 4431 |
| Sb04g004670 | Sorghum | Polynucleotide | SEQ ID NO: 2055 |
| | bicolor | Polypeptide | SEQ ID NO: 2056 |
| | | Genomic | SEQ ID NO: 4432 |
| Sb04g004830 | Sorghum | Polynucleotide | SEQ ID NO: 2057 |
| | bicolor | Polypeptide | SEQ ID NO: 2058 |
| | | Genomic | SEQ ID NO: 4433 |
| Sb04g004850 | Sorghum | Polynucleotide | SEQ ID NO: 2059 |
| | bicolor | Polypeptide | SEQ ID NO: 2060 |
| | | Genomic | SEQ ID NO: 4434 |
| Sb04g005150 | Sorghum | Polynucleotide | SEQ ID NO: 2061 |
| | bicolor | Polypeptide | SEQ ID NO: 2062 |
| | | Genomic | SEQ ID NO: 4435 |
| Sb04g005630 | Sorghum | Polynucleotide | SEQ ID NO: 2063 |
| | bicolor | Polypeptide | SEQ ID NO: 2064 |
| | | Genomic | SEQ ID NO: 4436 |
| Sb04g005680 | Sorghum | Polynucleotide | SEQ ID NO: 2065 |
| | bicolor | Polypeptide | SEQ ID NO: 2066 |
| | | Genomic | SEQ ID NO: 4437 |
| Sb04g005710 | Sorghum | Polynucleotide | SEQ ID NO: 2067 |
| | bicolor | Polypeptide | SEQ ID NO: 2068 |
| | | Genomic | SEQ ID NO: 4438 |
| Sb04g005810 | Sorghum | Polynucleotide | SEQ ID NO: 2069 |
| | bicolor | Polypeptide | SEQ ID NO: 2070 |
| | | Genomic | SEQ ID NO: 4439 |
| Sb04g006010 | Sorghum | Polynucleotide | SEQ ID NO: 2071 |
| | bicolor | Polypeptide | SEQ ID NO: 2072 |
| | | Genomic | SEQ ID NO: 4440 |
| Sb04g006370 | Sorghum | Polynucleotide | SEQ ID NO: 2073 |
| | bicolor | Polypeptide | SEQ ID NO: 2074 |
| | | Genomic | SEQ ID NO: 4441 |
| Sb04g006440 | Sorghum | Polynucleotide | SEQ ID NO: 2075 |
| | bicolor | Polypeptide | SEQ ID NO: 2076 |
| | | Genomic | SEQ ID NO: 4442 |
| Sb04g006450 | Sorghum | Polynucleotide | SEQ ID NO: 2077 |
| | bicolor | Polypeptide | SEQ ID NO: 2078 |
| | | Genomic | SEQ ID NO: 4443 |
| Sb04g006710 | Sorghum | Polynucleotide | SEQ ID NO: 2079 |
| | bicolor | Polypeptide | SEQ ID NO: 2080 |
| | | Genomic | SEQ ID NO: 4444 |
| Sb04g006890 | Sorghum | Polynucleotide | SEQ ID NO: 2081 |
| | bicolor | Polypeptide | SEQ ID NO: 2082 |
| | | Genomic | SEQ ID NO: 4445 |
| Sb04g006900 | Sorghum | Polynucleotide | SEQ ID NO: 2083 |
| | bicolor | Polypeptide | SEQ ID NO: 2084 |
| | | Genomic | SEQ ID NO: 4446 |
| Sb04g006970 | Sorghum | Polynucleotide | SEQ ID NO: 2085 |
| | bicolor | Polypeptide | SEQ ID NO: 2086 |
| | | Genomic | SEQ ID NO: 4447 |
| Sb04g007140 | Sorghum | Polynucleotide | SEQ ID NO: 2087 |
| | bicolor | Polypeptide | SEQ ID NO: 2088 |
| | | Genomic | SEQ ID NO: 4448 |
| Sb04g007400 | Sorghum | Polynucleotide | SEQ ID NO: 2089 |
| | bicolor | Polypeptide | SEQ ID NO: 2090 |
| | | Genomic | SEQ ID NO: 4449 |
| Sb04g007530 | Sorghum | Polynucleotide | SEQ ID NO: 2091 |
| | bicolor | Polypeptide | SEQ ID NO: 2092 |
| | | Genomic | SEQ ID NO: 4450 |
| Sb04g008160 | Sorghum | Polynucleotide | SEQ ID NO: 2093 |
| | bicolor | Polypeptide | SEQ ID NO: 2094 |
| | | Genomic | SEQ ID NO: 4451 |
| Sb04g008360 | Sorghum | Polynucleotide | SEQ ID NO: 2095 |
| | bicolor | Polypeptide | SEQ ID NO: 2096 |
| | | Genomic | SEQ ID NO: 4452 |
| Sb04g008400 | Sorghum | Polynucleotide | SEQ ID NO: 2097 |
| | bicolor | Polypeptide | SEQ ID NO: 2098 |
| | | Genomic | SEQ ID NO: 4453 |
| Sb04g008760 | Sorghum | Polynucleotide | SEQ ID NO: 2099 |
| | bicolor | Polypeptide | SEQ ID NO: 2100 |
| | | Genomic | SEQ ID NO: 4454 |
| Sb04g008770 | Sorghum | Polynucleotide | SEQ ID NO: 2101 |
| | bicolor | Polypeptide | SEQ ID NO: 2102 |
| | | Genomic | SEQ ID NO: 4455 |
| Sb04g009090 | Sorghum | Polynucleotide | SEQ ID NO: 2103 |
| | bicolor | Polypeptide | SEQ ID NO: 2104 |
| | | Genomic | SEQ ID NO: 4456 |
| Sb04g009760 | Sorghum | Polynucleotide | SEQ ID NO: 2105 |
| | bicolor | Polypeptide | SEQ ID NO: 2106 |
| | | Genomic | SEQ ID NO: 4457 |
| Sb04g010290 | Sorghum | Polynucleotide | SEQ ID NO: 2107 |
| | bicolor | Polypeptide | SEQ ID NO: 2108 |
| | | Genomic | SEQ ID NO: 4458 |
| Sb04g010650 | Sorghum | Polynucleotide | SEQ ID NO: 2109 |
| | bicolor | Polypeptide | SEQ ID NO: 2110 |
| | | Genomic | SEQ ID NO: 4459 |
| Sb04g010980 | Sorghum | Polynucleotide | SEQ ID NO: 2111 |
| | bicolor | Polypeptide | SEQ ID NO: 2112 |
| | | Genomic | SEQ ID NO: 4460 |
| Sb04g011000 | Sorghum | Polynucleotide | SEQ ID NO: 2113 |
| | bicolor | Polypeptide | SEQ ID NO: 2114 |
| | | Genomic | SEQ ID NO: 4461 |
| Sb04g011060 | Sorghum | Polynucleotide | SEQ ID NO: 2115 |
| | bicolor | Polypeptide | SEQ ID NO: 2116 |
| | | Genomic | SEQ ID NO: 4462 |
| Sb04g011180 | Sorghum | Polynucleotide | SEQ ID NO: 2117 |
| | bicolor | Polypeptide | SEQ ID NO: 2118 |
| | | Genomic | SEQ ID NO: 4463 |
| Sb04g012170 | Sorghum | Polynucleotide | SEQ ID NO: 2119 |
| | bicolor | Polypeptide | SEQ ID NO: 2120 |
| | | Genomic | SEQ ID NO: 4464 |
| Sb04g012920 | Sorghum | Polynucleotide | SEQ ID NO: 2121 |
| | bicolor | Polypeptide | SEQ ID NO: 2122 |
| | | Genomic | SEQ ID NO: 4465 |
| Sb04g013580 | Sorghum | Polynucleotide | SEQ ID NO: 2123 |
| | bicolor | Polypeptide | SEQ ID NO: 2124 |
| | | Genomic | SEQ ID NO: 4466 |
| Sb04g014190 | Sorghum | Polynucleotide | SEQ ID NO: 2125 |
| | bicolor | Polypeptide | SEQ ID NO: 2126 |
| | | Genomic | SEQ ID NO: 4467 |
| Sb04g017430 | Sorghum | Polynucleotide | SEQ ID NO: 2127 |
| | bicolor | Polypeptide | SEQ ID NO: 2128 |
| | | Genomic | SEQ ID NO: 4468 |
| Sb04g020150 | Sorghum | Polynucleotide | SEQ ID NO: 2129 |
| | bicolor | Polypeptide | SEQ ID NO: 2130 |
| | | Genomic | SEQ ID NO: 4469 |
| Sb04g020180 | Sorghum | Polynucleotide | SEQ ID NO: 2131 |
| | bicolor | Polypeptide | SEQ ID NO: 2132 |
| | | Genomic | SEQ ID NO: 4470 |
| Sb04g020450 | Sorghum | Polynucleotide | SEQ ID NO: 2133 |
| | bicolor | Polypeptide | SEQ ID NO: 2134 |
| | | Genomic | SEQ ID NO: 4471 |
| Sb04g020510 | Sorghum | Polynucleotide | SEQ ID NO: 2135 |
| | bicolor | Polypeptide | SEQ ID NO: 2136 |
| | | Genomic | SEQ ID NO: 4472 |
| Sb04g021530 | Sorghum | Polynucleotide | SEQ ID NO: 2137 |
| | bicolor | Polypeptide | SEQ ID NO: 2138 |
| | | Genomic | SEQ ID NO: 4473 |
| Sb04g021890 | Sorghum | Polynucleotide | SEQ ID NO: 2139 |
| | bicolor | Polypeptide | SEQ ID NO: 2140 |
| | | Genomic | SEQ ID NO: 4474 |
| Sb04g122150 | Sorghum | Polynucleotide | SEQ ID NO: 2141 |
| | bicolor | Polypeptide | SEQ ID NO: 2142 |
| | | Genomic | SEQ ID NO: 4475 |
| Sb04g022410 | Sorghum | Polynucleotide | SEQ ID NO: 2143 |
| | bicolor | Polypeptide | SEQ ID NO: 2144 |
| | | Genomic | SEQ ID NO: 4476 |
| Sb04g022460 | Sorghum | Polynucleotide | SEQ ID NO: 2145 |
| | bicolor | Polypeptide | SEQ ID NO: 2146 |
| | | Genomic | SEQ ID NO: 4477 |
| Sb04g022970 | Sorghum | Polynucleotide | SEQ ID NO: 2147 |
| | bicolor | Polypeptide | SEQ ID NO: 2148 |
| | | Genomic | SEQ ID NO: 4478 |
| Sb04g023000 | Sorghum | Polynucleotide | SEQ ID NO: 2149 |
| | bicolor | Polypeptide | SEQ ID NO: 2150 |
| | | Genomic | SEQ ID NO: 4479 |
| Sb04g023020 | Sorghum | Polynucleotide | SEQ ID NO: 2151 |
| | bicolor | Polypeptide | SEQ ID NO: 2152 |
| | | Genomic | SEQ ID NO: 4480 |
| Sb04g023130 | Sorghum | Polynucleotide | SEQ ID NO: 2153 |
| | bicolor | Polypeptide | SEQ ID NO: 2154 |
| | | Genomic | SEQ ID NO: 4481 |
| Sb04g023390 | Sorghum | Polynucleotide | SEQ ID NO: 2155 |
| | bicolor | Polypeptide | SEQ ID NO: 2156 |
| | | Genomic | SEQ ID NO: 4482 |
| Sb04g023750 | Sorghum | Polynucleotide | SEQ ID NO: 2157 |
| | bicolor | Polypeptide | SEQ ID NO: 2158 |
| | | Genomic | SEQ ID NO: 4483 |
| Sb04g023870 | Sorghum | Polynucleotide | SEQ ID NO: 2159 |
| | bicolor | Polypeptide | SEQ ID NO: 2160 |
| | | Genomic | SEQ ID NO: 4484 |
| Sb04g024270 | Sorghum | Polynucleotide | SEQ ID NO: 2161 |
| | bicolor | Polypeptide | SEQ ID NO: 2162 |
| | | Genomic | SEQ ID NO: 4485 |
| Sb04g024390 | Sorghum | Polynucleotide | SEQ ID NO: 2163 |
| | bicolor | Polypeptide | SEQ ID NO: 2164 |
| | | Genomic | SEQ ID NO: 4486 |
| Sb04g024490 | Sorghum | Polynucleotide | SEQ ID NO: 2165 |
| | bicolor | Polypeptide | SEQ ID NO: 2166 |
| | | Genomic | SEQ ID NO: 4487 |
| Sb04g024500 | Sorghum | Polynucleotide | SEQ ID NO: 2167 |
| | bicolor | Polypeptide | SEQ ID NO: 2168 |
| | | Genomic | SEQ ID NO: 4488 |
| Sb04g024570 | Sorghum | Polynucleotide | SEQ ID NO: 2169 |
| | bicolor | Polypeptide | SEQ ID NO: 2170 |
| | | Genomic | SEQ ID NO: 4489 |
| Sb04g024880 | Sorghum | Polynucleotide | SEQ ID NO: 2171 |
| | bicolor | Polypeptide | SEQ ID NO: 2172 |
| | | Genomic | SEQ ID NO: 4490 |
| Sb04g025260 | Sorghum | Polynucleotide | SEQ ID NO: 2173 |
| | bicolor | Polypeptide | SEQ ID NO: 2174 |
| | | Genomic | SEQ ID NO: 4491 |
| Sb04g025500 | Sorghum | Polynucleotide | SEQ ID NO: 2175 |
| | bicolor | Polypeptide | SEQ ID NO: 2176 |
| | | Genomic | SEQ ID NO: 4492 |
| Sb04g025870 | Sorghum | Polynucleotide | SEQ ID NO: 2177 |
| | bicolor | Polypeptide | SEQ ID NO: 2178 |
| | | Genomic | SEQ ID NO: 4493 |
| Sb04g025910 | Sorghum | Polynucleotide | SEQ ID NO: 2179 |
| | bicolor | Polypeptide | SEQ ID NO: 2180 |
| | | Genomic | SEQ ID NO: 4494 |
| Sb04g025960 | Sorghum | Polynucleotide | SEQ ID NO: 2181 |
| | bicolor | Polypeptide | SEQ ID NO: 2182 |
| | | Genomic | SEQ ID NO: 4495 |
| Sb04g026020 | Sorghum | Polynucleotide | SEQ ID NO: 2183 |
| | bicolor | Polypeptide | SEQ ID NO: 2184 |
| | | Genomic | SEQ ID NO: 4496 |
| Sb04g026030 | Sorghum | Polynucleotide | SEQ ID NO: 2185 |
| | bicolor | Polypeptide | SEQ ID NO: 2186 |
| | | Genomic | SEQ ID NO: 4497 |
| Sb04g026320 | Sorghum | Polynucleotide | SEQ ID NO: 2187 |
| | bicolor | Polypeptide | SEQ ID NO: 2188 |
| | | Genomic | SEQ ID NO: 4498 |
| Sb04g129820 | Sorghum | Polynucleotide | SEQ ID NO: 2189 |
| | bicolor | Polypeptide | SEQ ID NO: 2190 |
| | | Genomic | SEQ ID NO: 4499 |
| Sb04g026440 | Sorghum | Polynucleotide | SEQ ID NO: 2191 |
| | bicolor | Polypeptide | SEQ ID NO: 2192 |
| | | Genomic | SEQ ID NO: 4500 |
| Sb04g026750 | Sorghum | Polynucleotide | SEQ ID NO: 2193 |
| | bicolor | Polypeptide | SEQ ID NO: 2194 |
| | | Genomic | SEQ ID NO: 4501 |
| Sb04g026950 | Sorghum | Polynucleotide | SEQ ID NO: 2195 |
| | bicolor | Polypeptide | SEQ ID NO: 2196 |
| | | Genomic | SEQ ID NO: 4502 |
| Sb04g027620 | Sorghum | Polynucleotide | SEQ ID NO: 2197 |
| | bicolor | Polypeptide | SEQ ID NO: 2198 |
| | | Genomic | SEQ ID NO: 4503 |
| Sb04g027800 | Sorghum | Polynucleotide | SEQ ID NO: 2199 |
| | bicolor | Polypeptide | SEQ ID NO: 2200 |
| | | Genomic | SEQ ID NO: 4504 |
| Sb04g027880 | Sorghum | Polynucleotide | SEQ ID NO: 2201 |
| | bicolor | Polypeptide | SEQ ID NO: 2202 |
| | | Genomic | SEQ ID NO: 4505 |
| Sb04g027980 | Sorghum | Polynucleotide | SEQ ID NO: 2203 |
| | bicolor | Polypeptide | SEQ ID NO: 2204 |
| | | Genomic | SEQ ID NO: 4506 |
| Sb04g028070 | Sorghum | Polynucleotide | SEQ ID NO: 2205 |
| | bicolor | Polypeptide | SEQ ID NO: 2206 |
| | | Genomic | SEQ ID NO: 4507 |
| Sb04g028210 | Sorghum | Polynucleotide | SEQ ID NO: 2207 |
| | bicolor | Polypeptide | SEQ ID NO: 2208 |
| | | Genomic | SEQ ID NO: 4508 |
| Sb04g028440 | Sorghum | Polynucleotide | SEQ ID NO: 2209 |
| | bicolor | Polypeptide | SEQ ID NO: 2210 |
| | | Genomic | SEQ ID NO: 4509 |
| Sb04g028450 | Sorghum | Polynucleotide | SEQ ID NO: 2211 |
| | bicolor | Polypeptide | SEQ ID NO: 2212 |
| | | Genomic | SEQ ID NO: 4510 |
| Sb04g028690 | Sorghum | Polynucleotide | SEQ ID NO: 2213 |
| | bicolor | Polypeptide | SEQ ID NO: 2214 |
| | | Genomic | SEQ ID NO: 4511 |
| Sb04g028740 | Sorghum | Polynucleotide | SEQ ID NO: 2215 |
| | bicolor | Polypeptide | SEQ ID NO: 2216 |
| | | Genomic | SEQ ID NO: 4512 |
| Sb04g028760 | Sorghum | Polynucleotide | SEQ ID NO: 2217 |
| | bicolor | Polypeptide | SEQ ID NO: 2218 |
| | | Genomic | SEQ ID NO: 4513 |
| Sb04g028810 | Sorghum | Polynucleotide | SEQ ID NO: 2219 |
| | bicolor | Polypeptide | SEQ ID NO: 2220 |
| | | Genomic | SEQ ID NO: 4514 |
| Sb04g028980 | Sorghum | Polynucleotide | SEQ ID NO: 2221 |
| | bicolor | Polypeptide | SEQ ID NO: 2222 |
| | | Genomic | SEQ ID NO: 4515 |
| Sb04g029000 | Sorghum | Polynucleotide | SEQ ID NO: 2223 |
| | bicolor | Polypeptide | SEQ ID NO: 2224 |
| | | Genomic | SEQ ID NO: 4516 |
| Sb04g029020 | Sorghum | Polynucleotide | SEQ ID NO: 2225 |
| | bicolor | Polypeptide | SEQ ID NO: 2226 |
| | | Genomic | SEQ ID NO: 4517 |
| Sb04g029030 | Sorghum | Polynucleotide | SEQ ID NO: 2227 |
| | bicolor | Polypeptide | SEQ ID NO: 2228 |
| | | Genomic | SEQ ID NO: 4518 |
| Sb04g029410 | Sorghum | Polynucleotide | SEQ ID NO: 2229 |
| | bicolor | Polypeptide | SEQ ID NO: 2230 |
| | | Genomic | SEQ ID NO: 4519 |
| Sb04g029660 | Sorghum | Polynucleotide | SEQ ID NO: 2231 |
| | bicolor | Polypeptide | SEQ ID NO: 2232 |
| | | Genomic | SEQ ID NO: 4520 |
| Sb04g029810 | Sorghum | Polynucleotide | SEQ ID NO: 2233 |
| | bicolor | Polypeptide | SEQ ID NO: 2234 |
| | | Genomic | SEQ ID NO: 4521 |
| Sb04g029850 | Sorghum | Polynucleotide | SEQ ID NO: 2235 |
| | bicolor | Polypeptide | SEQ ID NO: 2236 |
| | | Genomic | SEQ ID NO: 4522 |
| Sb04g029920 | Sorghum | Polynucleotide | SEQ ID NO: 2237 |
| | bicolor | Polypeptide | SEQ ID NO: 2238 |
| | | Genomic | SEQ ID NO: 4523 |
| Sb04g029940 | Sorghum | Polynucleotide | SEQ ID NO: 2239 |
| | bicolor | Polypeptide | SEQ ID NO: 2240 |
| | | Genomic | SEQ ID NO: 4524 |
| Sb04g030530 | Sorghum | Polynucleotide | SEQ ID NO: 2241 |
| | bicolor | Polypeptide | SEQ ID NO: 2242 |
| | | Genomic | SEQ ID NO: 4525 |
| Sb04g030560 | Sorghum | Polynucleotide | SEQ ID NO: 2243 |
| | bicolor | Polypeptide | SEQ ID NO: 2244 |
| | | Genomic | SEQ ID NO: 4526 |
| Sb04g030700 | Sorghum | Polynucleotide | SEQ ID NO: 2245 |
| | bicolor | Polypeptide | SEQ ID NO: 2246 |
| | | Genomic | SEQ ID NO: 4527 |
| Sb04g030830 | Sorghum | Polynucleotide | SEQ ID NO: 2247 |
| | bicolor | Polypeptide | SEQ ID NO: 2248 |
| | | Genomic | SEQ ID NO: 4528 |
| Sb04g030840 | Sorghum | Polynucleotide | SEQ ID NO: 2249 |
| | bicolor | Polypeptide | SEQ ID NO: 2250 |
| | | Genomic | SEQ ID NO: 4529 |
| Sb04g030895 | Sorghum | Polynucleotide | SEQ ID NO: 2251 |
| | bicolor | Polypeptide | SEQ ID NO: 2252 |
| | | Genomic | SEQ ID NO: 4530 |
| Sb04g031600 | Sorghum | Polynucleotide | SEQ ID NO: 2253 |
| | bicolor | Polypeptide | SEQ ID NO: 2254 |
| | | Genomic | SEQ ID NO: 4531 |
| Sb04g031750 | Sorghum | Polynucleotide | SEQ ID NO: 2255 |
| | bicolor | Polypeptide | SEQ ID NO: 2256 |
| | | Genomic | SEQ ID NO: 4532 |
| Sb01g049305 | Sorghum | Polynucleotide | SEQ ID NO: 2257 |
| | bicolor | Polypeptide | SEQ ID NO: 2258 |
| | | Genomic | SEQ ID NO: 4533 |
| Sb04g032840 | Sorghum | Polynucleotide | SEQ ID NO: 2259 |
| | bicolor | Polypeptide | SEQ ID NO: 2260 |
| | | Genomic | SEQ ID NO: 4534 |
| Sb04g032880 | Sorghum | Polynucleotide | SEQ ID NO: 2261 |
| | bicolor | Polypeptide | SEQ ID NO: 2262 |
| | | Genomic | SEQ ID NO: 4535 |
| Sb04g033000 | Sorghum | Polynucleotide | SEQ ID NO: 2263 |
| | bicolor | Polypeptide | SEQ ID NO: 2264 |
| | | Genomic | SEQ ID NO: 4536 |
| Sb04g140630 | Sorghum | Polynucleotide | SEQ ID NO: 2265 |
| | bicolor | Polypeptide | SEQ ID NO: 2266 |
| | | Genomic | SEQ ID NO: 4537 |
| Sb04g140640 | Sorghum | Polynucleotide | SEQ ID NO: 2267 |
| | bicolor | Polypeptide | SEQ ID NO: 2268 |
| | | Genomic | SEQ ID NO: 4538 |
| Sb04g140670 | Sorghum | Polynucleotide | SEQ ID NO: 2269 |
| | bicolor | Polypeptide | SEQ ID NO: 2270 |
| | | Genomic | SEQ ID NO: 4539 |
| Sb04g033340 | Sorghum | Polynucleotide | SEQ ID NO: 2271 |
| | bicolor | Polypeptide | SEQ ID NO: 2272 |
| | | Genomic | SEQ ID NO: 4540 |
| Sb04g033370 | Sorghum | Polynucleotide | SEQ ID NO: 2273 |
| | bicolor | Polypeptide | SEQ ID NO: 2274 |
| | | Genomic | SEQ ID NO: 4541 |
| Sb04g033570 | Sorghum | Polynucleotide | SEQ ID NO: 2275 |
| | bicolor | Polypeptide | SEQ ID NO: 2276 |
| | | Genomic | SEQ ID NO: 4542 |
| Sb04g033700 | Sorghum | Polynucleotide | SEQ ID NO: 2277 |
| | bicolor | Polypeptide | SEQ ID NO: 2278 |
| | | Genomic | SEQ ID NO: 4543 |
| Sb04g033710 | Sorghum | Polynucleotide | SEQ ID NO: 2279 |
| | bicolor | Polypeptide | SEQ ID NO: 2280 |
| | | Genomic | SEQ ID NO: 4544 |
| Sb04g033895 | Sorghum | Polynucleotide | SEQ ID NO: 2281 |
| | bicolor | Polypeptide | SEQ ID NO: 2282 |
| | | Genomic | SEQ ID NO: 4545 |
| Sb04g141710 | Sorghum | Polynucleotide | SEQ ID NO: 2283 |
| | bicolor | Polypeptide | SEQ ID NO: 2284 |
| | | Genomic | SEQ ID NO: 4546 |
| Sb04g034056 | Sorghum | Polynucleotide | SEQ ID NO: 2285 |
| | bicolor | Polypeptide | SEQ ID NO: 2286 |
| | | Genomic | SEQ ID NO: 4547 |
| Sb04g034130 | Sorghum | Polynucleotide | SEQ ID NO: 2287 |
| | bicolor | Polypeptide | SEQ ID NO: 2288 |
| | | Genomic | SEQ ID NO: 4548 |
| Sb04g034136 | Sorghum | Polynucleotide | SEQ ID NO: 2289 |
| | bicolor | Polypeptide | SEQ ID NO: 2290 |
| | | Genomic | SEQ ID NO: 4549 |
| Sb04g141930 | Sorghum | Polynucleotide | SEQ ID NO: 2291 |
| | bicolor | Polypeptide | SEQ ID NO: 2292 |
| | | Genomic | SEQ ID NO: 4550 |
| Sb04g034440 | Sorghum | Polynucleotide | SEQ ID NO: 2293 |
| | bicolor | Polypeptide | SEQ ID NO: 2294 |
| | | Genomic | SEQ ID NO: 4551 |
| Sb04g034540 | Sorghum | Polynucleotide | SEQ ID NO: 2295 |
| | bicolor | Polypeptide | SEQ ID NO: 2296 |
| | | Genomic | SEQ ID NO: 4552 |
| Sb04g034590 | Sorghum | Polynucleotide | SEQ ID NO: 2297 |
| | bicolor | Polypeptide | SEQ ID NO: 2298 |
| | | Genomic | SEQ ID NO: 4553 |
| Sb04g034650 | Sorghum | Polynucleotide | SEQ ID NO: 2299 |
| | bicolor | Polypeptide | SEQ ID NO: 2300 |
| | | Genomic | SEQ ID NO: 4554 |
| Sb04g034700 | Sorghum | Polynucleotide | SEQ ID NO: 2301 |
| | bicolor | Polypeptide | SEQ ID NO: 2302 |
| | | Genomic | SEQ ID NO: 4555 |
| Sb04g142920 | Sorghum | Polynucleotide | SEQ ID NO: 2303 |
| | bicolor | Polypeptide | SEQ ID NO: 2304 |
| | | Genomic | SEQ ID NO: 4556 |
| Sb04g142930 | Sorghum | Polynucleotide | SEQ ID NO: 2305 |
| | bicolor | Polypeptide | SEQ ID NO: 2306 |
| | | Genomic | SEQ ID NO: 4557 |
| Sb04g035180 | Sorghum | Polynucleotide | SEQ ID NO: 2307 |
| | bicolor | Polypeptide | SEQ ID NO: 2308 |
| | | Genomic | SEQ ID NO: 4558 |
| Sb04g035290 | Sorghum | Polynucleotide | SEQ ID NO: 2309 |
| | bicolor | Polypeptide | SEQ ID NO: 2310 |
| | | Genomic | SEQ ID NO: 4559 |
| Sb04g035420 | Sorghum | Polynucleotide | SEQ ID NO: 2311 |
| | bicolor | Polypeptide | SEQ ID NO: 2312 |
| | | Genomic | SEQ ID NO: 4560 |
| Sb04g035610 | Sorghum | Polynucleotide | SEQ ID NO: 2313 |
| | bicolor | Polypeptide | SEQ ID NO: 2314 |
| | | Genomic | SEQ ID NO: 4561 |
| Sb04g035690 | Sorghum | Polynucleotide | SEQ ID NO: 2315 |
| | bicolor | Polypeptide | SEQ ID NO: 2316 |
| | | Genomic | SEQ ID NO: 4562 |
| Sb04g035980 | Sorghum | Polynucleotide | SEQ ID NO: 2317 |
| | bicolor | Polypeptide | SEQ ID NO: 2318 |
| | | Genomic | SEQ ID NO: 4563 |
| Sb04g035990 | Sorghum | Polynucleotide | SEQ ID NO: 2319 |
| | bicolor | Polypeptide | SEQ ID NO: 2320 |
| | | Genomic | SEQ ID NO: 4564 |
| Sb04g036050 | Sorghum | Polynucleotide | SEQ ID NO: 2321 |
| | bicolor | Polypeptide | SEQ ID NO: 2322 |
| | | Genomic | SEQ ID NO: 4565 |
| Sb04g036120 | Sorghum | Polynucleotide | SEQ ID NO: 2323 |
| | bicolor | Polypeptide | SEQ ID NO: 2324 |
| | | Genomic | SEQ ID NO: 4566 |
| Sb04g036640 | Sorghum | Polynucleotide | SEQ ID NO: 2325 |
| | bicolor | Polypeptide | SEQ ID NO: 2326 |
| | | Genomic | SEQ ID NO: 4567 |
| Sb04g146060 | Sorghum | Polynucleotide | SEQ ID NO: 2327 |
| | bicolor | Polypeptide | SEQ ID NO: 2328 |
| | | Genomic | SEQ ID NO: 4568 |
| Sb04g036700 | Sorghum | Polynucleotide | SEQ ID NO: 2329 |
| | bicolor | Polypeptide | SEQ ID NO: 2330 |
| | | Genomic | SEQ ID NO: 4569 |
| Sb04g036850 | Sorghum | Polynucleotide | SEQ ID NO: 2331 |
| | bicolor | Polypeptide | SEQ ID NO: 2332 |
| | | Genomic | SEQ ID NO: 4570 |
| Sb04g036930 | Sorghum | Polynucleotide | SEQ ID NO: 2333 |
| | bicolor | Polypeptide | SEQ ID NO: 2334 |
| | | Genomic | SEQ ID NO: 4571 |
| Sb04g146540 | Sorghum | Polynucleotide | SEQ ID NO: 2335 |
| | bicolor | Polypeptide | SEQ ID NO: 2336 |
| | | Genomic | SEQ ID NO: 4572 |
| Sb04g037140 | Sorghum | Polynucleotide | SEQ ID NO: 2337 |
| | bicolor | Polypeptide | SEQ ID NO: 2338 |
| | | Genomic | SEQ ID NO: 4573 |
| Sb04g037160 | Sorghum | Polynucleotide | SEQ ID NO: 2339 |
| | bicolor | Polypeptide | SEQ ID NO: 2340 |
| | | Genomic | SEQ ID NO: 4574 |
| Sb04g037280 | Sorghum | Polynucleotide | SEQ ID NO: 2341 |
| | bicolor | Polypeptide | SEQ ID NO: 2342 |
| | | Genomic | SEQ ID NO: 4575 |
| Sb04g037730 | Sorghum | Polynucleotide | SEQ ID NO: 2343 |
| | bicolor | Polypeptide | SEQ ID NO: 2344 |
| | | Genomic | SEQ ID NO: 4576 |
| Sb04g037740 | Sorghum | Polynucleotide | SEQ ID NO: 2345 |
| | bicolor | Polypeptide | SEQ ID NO: 2346 |
| | | Genomic | SEQ ID NO: 4577 |
| Sb04g038060 | Sorghum | Polynucleotide | SEQ ID NO: 2347 |
| | bicolor | Polypeptide | SEQ ID NO: 2348 |
| | | Genomic | SEQ ID NO: 4578 |
| Sb04g038190 | Sorghum | Polynucleotide | SEQ ID NO: 2349 |
| | bicolor | Polypeptide | SEQ ID NO: 2350 |
| | | Genomic | SEQ ID NO: 4579 |
| Sb04g038290 | Sorghum | Polynucleotide | SEQ ID NO: 2351 |
| | bicolor | Polypeptide | SEQ ID NO: 2352 |
| | | Genomic | SEQ ID NO: 4580 |
| Sb04g038630 | Sorghum | Polynucleotide | SEQ ID NO: 2353 |
| | bicolor | Polypeptide | SEQ ID NO: 2354 |
| | | Genomic | SEQ ID NO: 4581 |
| Sb04g038640 | Sorghum | Polynucleotide | SEQ ID NO: 2355 |
| | bicolor | Polypeptide | SEQ ID NO: 2356 |
| | | Genomic | SEQ ID NO: 4582 |
| Sb0506s002020 | Sorghum | Polynucleotide | SEQ ID NO: 2357 |
| | bicolor | Polypeptide | SEQ ID NO: 2358 |
| | | Genomic | SEQ ID NO: 4583 |
| Sb05g000210 | Sorghum | Polynucleotide | SEQ ID NO: 2359 |
| | bicolor | Polypeptide | SEQ ID NO: 2360 |
| | | Genomic | SEQ ID NO: 4584 |
| Sb05g000390 | Sorghum | Polynucleotide | SEQ ID NO: 2361 |
| | bicolor | Polypeptide | SEQ ID NO: 2362 |
| | | Genomic | SEQ ID NO: 4585 |
| Sb05g000480 | Sorghum | Polynucleotide | SEQ ID NO: 2363 |
| | bicolor | Polypeptide | SEQ ID NO: 2364 |
| | | Genomic | SEQ ID NO: 4586 |
| Sb05g000630 | Sorghum | Polynucleotide | SEQ ID NO: 2365 |
| | bicolor | Polypeptide | SEQ ID NO: 2366 |
| | | Genomic | SEQ ID NO: 4587 |
| Sb05g001080 | Sorghum | Polynucleotide | SEQ ID NO: 2367 |
| | bicolor | Polypeptide | SEQ ID NO: 2368 |
| | | Genomic | SEQ ID NO: 4588 |
| Sb05g001170 | Sorghum | Polynucleotide | SEQ ID NO: 2369 |
| | bicolor | Polypeptide | SEQ ID NO: 2370 |
| | | Genomic | SEQ ID NO: 4589 |
| Sb05g001400 | Sorghum | Polynucleotide | SEQ ID NO: 2371 |
| | bicolor | Polypeptide | SEQ ID NO: 2372 |
| | | Genomic | SEQ ID NO: 4590 |
| Sb05g002420 | Sorghum | Polynucleotide | SEQ ID NO: 2373 |
| | bicolor | Polypeptide | SEQ ID NO: 2374 |
| | | Genomic | SEQ ID NO: 4591 |
| Sb05g003480 | Sorghum | Polynucleotide | SEQ ID NO: 2375 |
| | bicolor | Polypeptide | SEQ ID NO: 2376 |
| | | Genomic | SEQ ID NO: 4592 |
| Sb05g003740 | Sorghum | Polynucleotide | SEQ ID NO: 2377 |
| | bicolor | Polypeptide | SEQ ID NO: 2378 |
| | | Genomic | SEQ ID NO: 4593 |
| Sb05g003870 | Sorghum | Polynucleotide | SEQ ID NO: 2379 |
| | bicolor | Polypeptide | SEQ ID NO: 2380 |
| | | Genomic | SEQ ID NO: 4594 |
| Sb05g004860 | Sorghum | Polynucleotide | SEQ ID NO: 2381 |
| | bicolor | Polypeptide | SEQ ID NO: 2382 |
| | | Genomic | SEQ ID NO: 4595 |
| Sb05g005021 | Sorghum | Polynucleotide | SEQ ID NO: 2383 |
| | bicolor | Polypeptide | SEQ ID NO: 2384 |
| | | Genomic | SEQ ID NO: 4596 |
| Sb05g005390 | Sorghum | Polynucleotide | SEQ ID NO: 2385 |
| | bicolor | Polypeptide | SEQ ID NO: 2386 |
| | | Genomic | SEQ ID NO: 4597 |
| Sb05g005470 | Sorghum | Polynucleotide | SEQ ID NO: 2387 |
| | bicolor | Polypeptide | SEQ ID NO: 2388 |
| | | Genomic | SEQ ID NO: 4598 |
| Sb05g006150 | Sorghum | Polynucleotide | SEQ ID NO: 2389 |
| | bicolor | Polypeptide | SEQ ID NO: 2390 |
| | | Genomic | SEQ ID NO: 4599 |
| Sb05g006580 | Sorghum | Polynucleotide | SEQ ID NO: 2391 |
| | bicolor | Polypeptide | SEQ ID NO: 2392 |
| | | Genomic | SEQ ID NO: 4600 |
| Sb05g006690 | Sorghum | Polynucleotide | SEQ ID NO: 2393 |
| | bicolor | Polypeptide | SEQ ID NO: 2394 |
| | | Genomic | SEQ ID NO: 4601 |
| Sb05g006840 | Sorghum | Polynucleotide | SEQ ID NO: 2395 |
| | bicolor | Polypeptide | SEQ ID NO: 2396 |
| | | Genomic | SEQ ID NO: 4602 |
| Sb05g007000 | Sorghum | Polynucleotide | SEQ ID NO: 2397 |
| | bicolor | Polypeptide | SEQ ID NO: 2398 |
| | | Genomic | SEQ ID NO: 4603 |
| Sb08g021890 | Sorghum | Polynucleotide | SEQ ID NO: 2399 |
| | bicolor | Polypeptide | SEQ ID NO: 2400 |
| | | Genomic | SEQ ID NO: 4604 |
| Sb05g008512 | Sorghum | Polynucleotide | SEQ ID NO: 2401 |
| | bicolor | Polypeptide | SEQ ID NO: 2402 |
| | | Genomic | SEQ ID NO: 4605 |
| Sb05g008670 | Sorghum | Polynucleotide | SEQ ID NO: 2403 |
| | bicolor | Polypeptide | SEQ ID NO: 2404 |
| | | Genomic | SEQ ID NO: 4606 |
| Sb05g008690 | Sorghum | Polynucleotide | SEQ ID NO: 2405 |
| | bicolor | Polypeptide | SEQ ID NO: 2406 |
| | | Genomic | SEQ ID NO: 4607 |
| Sb05g008830 | Sorghum | Polynucleotide | SEQ ID NO: 2407 |
| | bicolor | Polypeptide | SEQ ID NO: 2408 |
| | | Genomic | SEQ ID NO: 4608 |
| Sb05g009120 | Sorghum | Polynucleotide | SEQ ID NO: 2409 |
| | bicolor | Polypeptide | SEQ ID NO: 2410 |
| | | Genomic | SEQ ID NO: 4609 |
| Sb05g009430 | Sorghum | Polynucleotide | SEQ ID NO: 2411 |
| | bicolor | Polypeptide | SEQ ID NO: 2412 |
| | | Genomic | SEQ ID NO: 4610 |
| Sb05g016800 | Sorghum | Polynucleotide | SEQ ID NO: 2413 |
| | bicolor | Polypeptide | SEQ ID NO: 2414 |
| | | Genomic | SEQ ID NO: 4611 |
| Sb05g017940 | Sorghum | Polynucleotide | SEQ ID NO: 2415 |
| | bicolor | Polypeptide | SEQ ID NO: 2416 |
| | | Genomic | SEQ ID NO: 4612 |
| Sb05g017970 | Sorghum | Polynucleotide | SEQ ID NO: 2417 |
| | bicolor | Polypeptide | SEQ ID NO: 2418 |
| | | Genomic | SEQ ID NO: 4613 |
| Sb05g018080 | Sorghum | Polynucleotide | SEQ ID NO: 2419 |
| | bicolor | Polypeptide | SEQ ID NO: 2420 |
| | | Genomic | SEQ ID NO: 4614 |
| Sb05g001130 | Sorghum | Polynucleotide | SEQ ID NO: 2421 |
| | bicolor | Polypeptide | SEQ ID NO: 2422 |
| | | Genomic | SEQ ID NO: 4615 |
| Sb05g018890 | Sorghum | Polynucleotide | SEQ ID NO: 2423 |
| | bicolor | Polypeptide | SEQ ID NO: 2424 |
| | | Genomic | SEQ ID NO: 4616 |
| Sb05g020370 | Sorghum | Polynucleotide | SEQ ID NO: 2425 |
| | bicolor | Polypeptide | SEQ ID NO: 2426 |
| | | Genomic | SEQ ID NO: 4617 |
| Sb05g020780 | Sorghum | Polynucleotide | SEQ ID NO: 2427 |
| | bicolor | Polypeptide | SEQ ID NO: 2428 |
| | | Genomic | SEQ ID NO: 4618 |
| Sb05g021000 | Sorghum | Polynucleotide | SEQ ID NO: 2429 |
| | bicolor | Polypeptide | SEQ ID NO: 2430 |
| | | Genomic | SEQ ID NO: 4619 |
| Sb05g021240 | Sorghum | Polynucleotide | SEQ ID NO: 2431 |
| | bicolor | Polypeptide | SEQ ID NO: 2432 |
| | | Genomic | SEQ ID NO: 4620 |
| Sb05g021740 | Sorghum | Polynucleotide | SEQ ID NO: 2433 |
| | bicolor | Polypeptide | SEQ ID NO: 2434 |
| | | Genomic | SEQ ID NO: 4621 |
| Sb05g023600 | Sorghum | Polynucleotide | SEQ ID NO: 2435 |
| | bicolor | Polypeptide | SEQ ID NO: 2436 |
| | | Genomic | SEQ ID NO: 4622 |
| Sb05g024020 | Sorghum | Polynucleotide | SEQ ID NO: 2437 |
| | bicolor | Polypeptide | SEQ ID NO: 2438 |
| | | Genomic | SEQ ID NO: 4623 |
| Sb05g024160 | Sorghum | Polynucleotide | SEQ ID NO: 2439 |
| | bicolor | Polypeptide | SEQ ID NO: 2440 |
| | | Genomic | SEQ ID NO: 4624 |
| Sb05g151440 | Sorghum | Polynucleotide | SEQ ID NO: 2441 |
| | bicolor | Polypeptide | SEQ ID NO: 2442 |
| | | Genomic | SEQ ID NO: 4625 |
| Sb05g024490 | Sorghum | Polynucleotide | SEQ ID NO: 2443 |
| | bicolor | Polypeptide | SEQ ID NO: 2444 |
| | | Genomic | SEQ ID NO: 4626 |
| Sb05g024850 | Sorghum | Polynucleotide | SEQ ID NO: 2445 |
| | bicolor | Polypeptide | SEQ ID NO: 2446 |
| | | Genomic | SEQ ID NO: 4627 |
| Sb05g025170 | Sorghum | Polynucleotide | SEQ ID NO: 2447 |
| | bicolor | Polypeptide | SEQ ID NO: 2448 |
| | | Genomic | SEQ ID NO: 4628 |
| Sb05g025210 | Sorghum | Polynucleotide | SEQ ID NO: 2449 |
| | bicolor | Polypeptide | SEQ ID NO: 2450 |
| | | Genomic | SEQ ID NO: 4629 |
| Sb05g025710 | Sorghum | Polynucleotide | SEQ ID NO: 2451 |
| | bicolor | Polypeptide | SEQ ID NO: 2452 |
| | | Genomic | SEQ ID NO: 4630 |
| Sb05g025860 | Sorghum | Polynucleotide | SEQ ID NO: 2453 |
| | bicolor | Polypeptide | SEQ ID NO: 2454 |
| | | Genomic | SEQ ID NO: 4631 |
| Sb05g025970 | Sorghum | Polynucleotide | SEQ ID NO: 2455 |
| | bicolor | Polypeptide | SEQ ID NO: 2456 |
| | | Genomic | SEQ ID NO: 4632 |
| Sb05g026750 | Sorghum | Polynucleotide | SEQ ID NO: 2457 |
| | bicolor | Polypeptide | SEQ ID NO: 2458 |
| | | Genomic | SEQ ID NO: 4633 |
| Sb05g022300 | Sorghum | Polynucleotide | SEQ ID NO: 2459 |
| | bicolor | Polypeptide | SEQ ID NO: 2460 |
| | | Genomic | SEQ ID NO: 4634 |
| Sb05g026950 | Sorghum | Polynucleotide | SEQ ID NO: 2461 |
| | bicolor | Polypeptide | SEQ ID NO: 2462 |
| | | Genomic | SEQ ID NO: 4635 |
| Sb05g158230 | Sorghum | Polynucleotide | SEQ ID NO: 2463 |
| | bicolor | Polypeptide | SEQ ID NO: 2464 |
| | | Genomic | SEQ ID NO: 4636 |
| Sb05g027340 | Sorghum | Polynucleotide | SEQ ID NO: 2465 |
| | bicolor | Polypeptide | SEQ ID NO: 2466 |
| | | Genomic | SEQ ID NO: 4637 |
| Sb05g027480 | Sorghum | Polynucleotide | SEQ ID NO: 2467 |
| | bicolor | Polypeptide | SEQ ID NO: 2468 |
| | | Genomic | SEQ ID NO: 4638 |
| Sb05g027820 | Sorghum | Polynucleotide | SEQ ID NO: 2469 |
| | bicolor | Polypeptide | SEQ ID NO: 2470 |
| | | Genomic | SEQ ID NO: 4639 |
| Sb05g027890 | Sorghum | Polynucleotide | SEQ ID NO: 2471 |
| | bicolor | Polypeptide | SEQ ID NO: 2472 |
| | | Genomic | SEQ ID NO: 4640 |
| Sb0612s002010 | Sorghum | Polynucleotide | SEQ ID NO: 2473 |
| | bicolor | Polypeptide | SEQ ID NO: 2474 |
| | | Genomic | SEQ ID NO: 4641 |
| Sb06g000310 | Sorghum | Polynucleotide | SEQ ID NO: 2475 |
| | bicolor | Polypeptide | SEQ ID NO: 2476 |
| | | Genomic | SEQ ID NO: 4642 |
| Sb06g001140 | Sorghum | Polynucleotide | SEQ ID NO: 2477 |
| | bicolor | Polypeptide | SEQ ID NO: 2478 |
| | | Genomic | SEQ ID NO: 4643 |
| Sb06g001740 | Sorghum | Polynucleotide | SEQ ID NO: 2479 |
| | bicolor | Polypeptide | SEQ ID NO: 2480 |
| | | Genomic | SEQ ID NO: 4644 |
| Sb06g001890 | Sorghum | Polynucleotide | SEQ ID NO: 2481 |
| | bicolor | Polypeptide | SEQ ID NO: 2482 |
| | | Genomic | SEQ ID NO: 4645 |
| Sb06g002500 | Sorghum | Polynucleotide | SEQ ID NO: 2483 |
| | bicolor | Polypeptide | SEQ ID NO: 2484 |
| | | Genomic | SEQ ID NO: 4646 |
| Sb06g003280 | Sorghum | Polynucleotide | SEQ ID NO: 2485 |
| | bicolor | Polypeptide | SEQ ID NO: 2486 |
| | | Genomic | SEQ ID NO: 4647 |
| Sb06g004750 | Sorghum | Polynucleotide | SEQ ID NO: 2487 |
| | bicolor | Polypeptide | SEQ ID NO: 2488 |
| | | Genomic | SEQ ID NO: 4648 |
| Sb06g011765 | Sorghum | Polynucleotide | SEQ ID NO: 2489 |
| | bicolor | Polypeptide | SEQ ID NO: 2490 |
| | | Genomic | SEQ ID NO: 4649 |
| Sb06g013750 | Sorghum | Polynucleotide | SEQ ID NO: 2491 |
| | bicolor | Polypeptide | SEQ ID NO: 2492 |
| | | Genomic | SEQ ID NO: 4650 |
| Sb06g013790 | Sorghum | Polynucleotide | SEQ ID NO: 2493 |
| | bicolor | Polypeptide | SEQ ID NO: 2494 |
| | | Genomic | SEQ ID NO: 4651 |
| Sb06g013860 | Sorghum | Polynucleotide | SEQ ID NO: 2495 |
| | bicolor | Polypeptide | SEQ ID NO: 2496 |
| | | Genomic | SEQ ID NO: 4652 |
| Sb06g014220 | Sorghum | Polynucleotide | SEQ ID NO: 2497 |
| | bicolor | Polypeptide | SEQ ID NO: 2498 |
| | | Genomic | SEQ ID NO: 4653 |
| Sb06g014330 | Sorghum | Polynucleotide | SEQ ID NO: 2499 |
| | bicolor | Polypeptide | SEQ ID NO: 2500 |
| | | Genomic | SEQ ID NO: 4654 |
| Sb06g014710 | Sorghum | Polynucleotide | SEQ ID NO: 2501 |
| | bicolor | Polypeptide | SEQ ID NO: 2502 |
| | | Genomic | SEQ ID NO: 4655 |
| Sb06g014740 | Sorghum | Polynucleotide | SEQ ID NO: 2503 |
| | bicolor | Polypeptide | SEQ ID NO: 2504 |
| | | Genomic | SEQ ID NO: 4656 |
| Sb06g014890 | Sorghum | Polynucleotide | SEQ ID NO: 2505 |
| | bicolor | Polypeptide | SEQ ID NO: 2506 |
| | | Genomic | SEQ ID NO: 4657 |
| Sb06g015080 | Sorghum | Polynucleotide | SEQ ID NO: 2507 |
| | bicolor | Polypeptide | SEQ ID NO: 2508 |
| | | Genomic | SEQ ID NO: 4658 |
| Sb06g015150 | Sorghum | Polynucleotide | SEQ ID NO: 2509 |
| | bicolor | Polypeptide | SEQ ID NO: 2510 |
| | | Genomic | SEQ ID NO: 4659 |
| Sb06g015230 | Sorghum | Polynucleotide | SEQ ID NO: 2511 |
| | bicolor | Polypeptide | SEQ ID NO: 2512 |
| | | Genomic | SEQ ID NO: 4660 |
| Sb06g015260 | Sorghum | Polynucleotide | SEQ ID NO: 2513 |
| | bicolor | Polypeptide | SEQ ID NO: 2514 |
| | | Genomic | SEQ ID NO: 4661 |
| Sb06g015360 | Sorghum | Polynucleotide | SEQ ID NO: 2515 |
| | bicolor | Polypeptide | SEQ ID NO: 2516 |
| | | Genomic | SEQ ID NO: 4662 |
| Sb06g114730 | Sorghum | Polynucleotide | SEQ ID NO: 2517 |
| | bicolor | Polypeptide | SEQ ID NO: 2518 |
| | | Genomic | SEQ ID NO: 4663 |
| Sb06g015490 | Sorghum | Polynucleotide | SEQ ID NO: 2519 |
| | bicolor | Polypeptide | SEQ ID NO: 2520 |
| | | Genomic | SEQ ID NO: 4664 |
| Sb06g015550 | Sorghum | Polynucleotide | SEQ ID NO: 2521 |
| | bicolor | Polypeptide | SEQ ID NO: 2522 |
| | | Genomic | SEQ ID NO: 4665 |
| Sb06g016070 | Sorghum | Polynucleotide | SEQ ID NO: 2523 |
| | bicolor | Polypeptide | SEQ ID NO: 2524 |
| | | Genomic | SEQ ID NO: 4666 |
| Sb06g016110 | Sorghum | Polynucleotide | SEQ ID NO: 2525 |
| | bicolor | Polypeptide | SEQ ID NO: 2526 |
| | | Genomic | SEQ ID NO: 4667 |
| Sb06g016230 | Sorghum | Polynucleotide | SEQ ID NO: 2527 |
| | bicolor | Polypeptide | SEQ ID NO: 2528 |
| | | Genomic | SEQ ID NO: 4668 |
| Sb06g016420 | Sorghum | Polynucleotide | SEQ ID NO: 2529 |
| | bicolor | Polypeptide | SEQ ID NO: 2530 |
| | | Genomic | SEQ ID NO: 4669 |
| Sb06g016920 | Sorghum | Polynucleotide | SEQ ID NO: 2531 |
| | bicolor | Polypeptide | SEQ ID NO: 2532 |
| | | Genomic | SEQ ID NO: 4670 |
| Sb06g017090 | Sorghum | Polynucleotide | SEQ ID NO: 2533 |
| | bicolor | Polypeptide | SEQ ID NO: 2534 |
| | | Genomic | SEQ ID NO: 4671 |
| Sb06g017380 | Sorghum | Polynucleotide | SEQ ID NO: 2535 |
| | bicolor | Polypeptide | SEQ ID NO: 2536 |
| | | Genomic | SEQ ID NO: 4672 |
| Sb06g017540 | Sorghum | Polynucleotide | SEQ ID NO: 2537 |
| | bicolor | Polypeptide | SEQ ID NO: 2538 |
| | | Genomic | SEQ ID NO: 4673 |
| Sb06g017620 | Sorghum | Polynucleotide | SEQ ID NO: 2539 |
| | bicolor | Polypeptide | SEQ ID NO: 2540 |
| | | Genomic | SEQ ID NO: 4674 |
| Sb06g017640 | Sorghum | Polynucleotide | SEQ ID NO: 2541 |
| | bicolor | Polypeptide | SEQ ID NO: 2542 |
| | | Genomic | SEQ ID NO: 4675 |
| Sb06g018070 | Sorghum | Polynucleotide | SEQ ID NO: 2543 |
| | bicolor | Polypeptide | SEQ ID NO: 2544 |
| | | Genomic | SEQ ID NO: 4676 |
| Sb06g018220 | Sorghum | Polynucleotide | SEQ ID NO: 2545 |
| | bicolor | Polypeptide | SEQ ID NO: 2546 |
| | | Genomic | SEQ ID NO: 4677 |
| Sb06g018590 | Sorghum | Polynucleotide | SEQ ID NO: 2547 |
| | bicolor | Polypeptide | SEQ ID NO: 2548 |
| | | Genomic | SEQ ID NO: 4678 |
| Sb06g018640 | Sorghum | Polynucleotide | SEQ ID NO: 2549 |
| | bicolor | Polypeptide | SEQ ID NO: 2550 |
| | | Genomic | SEQ ID NO: 4679 |
| Sb06g018810 | Sorghum | Polynucleotide | SEQ ID NO: 2551 |
| | bicolor | Polypeptide | SEQ ID NO: 2552 |
| | | Genomic | SEQ ID NO: 4680 |
| Sb06g018950 | Sorghum | Polynucleotide | SEQ ID NO: 2553 |
| | bicolor | Polypeptide | SEQ ID NO: 2554 |
| | | Genomic | SEQ ID NO: 4681 |
| Sb06g019780 | Sorghum | Polynucleotide | SEQ ID NO: 2555 |
| | bicolor | Polypeptide | SEQ ID NO: 2556 |
| | | Genomic | SEQ ID NO: 4682 |
| Sb06g020120 | Sorghum | Polynucleotide | SEQ ID NO: 2557 |
| | bicolor | Polypeptide | SEQ ID NO: 2558 |
| | | Genomic | SEQ ID NO: 4683 |
| Sb06g020230 | Sorghum | Polynucleotide | SEQ ID NO: 2559 |
| | bicolor | Polypeptide | SEQ ID NO: 2560 |
| | | Genomic | SEQ ID NO: 4684 |
| Sb06g020390 | Sorghum | Polynucleotide | SEQ ID NO: 2561 |
| | bicolor | Polypeptide | SEQ ID NO: 2562 |
| | | Genomic | SEQ ID NO: 4685 |
| Sb06g020450 | Sorghum | Polynucleotide | SEQ ID NO: 2563 |
| | bicolor | Polypeptide | SEQ ID NO: 2564 |
| | | Genomic | SEQ ID NO: 4686 |
| Sb06g020680 | Sorghum | Polynucleotide | SEQ ID NO: 2565 |
| | bicolor | Polypeptide | SEQ ID NO: 2566 |
| | | Genomic | SEQ ID NO: 4687 |
| Sb06g021240 | Sorghum | Polynucleotide | SEQ ID NO: 2567 |
| | bicolor | Polypeptide | SEQ ID NO: 2568 |
| | | Genomic | SEQ ID NO: 4688 |
| Sb06g022310 | Sorghum | Polynucleotide | SEQ ID NO: 2569 |
| | bicolor | Polypeptide | SEQ ID NO: 2570 |
| | | Genomic | SEQ ID NO: 4689 |
| Sb06g022330 | Sorghum | Polynucleotide | SEQ ID NO: 2571 |
| | bicolor | Polypeptide | SEQ ID NO: 2572 |
| | | Genomic | SEQ ID NO: 4690 |
| Sb06g022600 | Sorghum | Polynucleotide | SEQ ID NO: 2573 |
| | bicolor | Polypeptide | SEQ ID NO: 2574 |
| | | Genomic | SEQ ID NO: 4691 |
| Sb06g022790 | Sorghum | Polynucleotide | SEQ ID NO: 2575 |
| | bicolor | Polypeptide | SEQ ID NO: 2576 |
| | | Genomic | SEQ ID NO: 4692 |
| Sb06g022790 | Sorghum | Polynucleotide | SEQ ID NO: 2577 |
| | bicolor | Polypeptide | SEQ ID NO: 2578 |
| | | Genomic | SEQ ID NO: 4693 |
| Sb06g022870 | Sorghum | Polynucleotide | SEQ ID NO: 2579 |
| | bicolor | Polypeptide | SEQ ID NO: 2580 |
| | | Genomic | SEQ ID NO: 4694 |
| Sb06g136130 | Sorghum | Polynucleotide | SEQ ID NO: 2581 |
| | bicolor | Polypeptide | SEQ ID NO: 2582 |
| | | Genomic | SEQ ID NO: 4695 |
| Sb06g023405 | Sorghum | Polynucleotide | SEQ ID NO: 2583 |
| | bicolor | Polypeptide | SEQ ID NO: 2584 |
| | | Genomic | SEQ ID NO: 4696 |
| Sb06g136620 | Sorghum | Polynucleotide | SEQ ID NO: 2585 |
| | bicolor | Polypeptide | SEQ ID NO: 2586 |
| | | Genomic | SEQ ID NO: 4697 |
| Sb06g023780 | Sorghum | Polynucleotide | SEQ ID NO: 2587 |
| | bicolor | Polypeptide | SEQ ID NO: 2588 |
| | | Genomic | SEQ ID NO: 4698 |
| Sb06g024130 | Sorghum | Polynucleotide | SEQ ID NO: 2589 |
| | bicolor | Polypeptide | SEQ ID NO: 2590 |
| | | Genomic | SEQ ID NO: 4699 |
| Sb06g137700 | Sorghum | Polynucleotide | SEQ ID NO: 2591 |
| | bicolor | Polypeptide | SEQ ID NO: 2592 |
| | | Genomic | SEQ ID NO: 4700 |
| Sb06g024320 | Sorghum | Polynucleotide | SEQ ID NO: 2593 |
| | bicolor | Polypeptide | SEQ ID NO: 2594 |
| | | Genomic | SEQ ID NO: 4701 |
| Sb06g024660 | Sorghum | Polynucleotide | SEQ ID NO: 2595 |
| | bicolor | Polypeptide | SEQ ID NO: 2596 |
| | | Genomic | SEQ ID NO: 4702 |
| Sb06g025210 | Sorghum | Polynucleotide | SEQ ID NO: 2597 |
| | bicolor | Polypeptide | SEQ ID NO: 2598 |
| | | Genomic | SEQ ID NO: 4703 |
| Sb06g025380 | Sorghum | Polynucleotide | SEQ ID NO: 2599 |
| | bicolor | Polypeptide | SEQ ID NO: 2600 |
| | | Genomic | SEQ ID NO: 4704 |
| Sb06g025620 | Sorghum | Polynucleotide | SEQ ID NO: 2601 |
| | bicolor | Polypeptide | SEQ ID NO: 2602 |
| | | Genomic | SEQ ID NO: 4705 |
| Sb06g139700 | Sorghum | Polynucleotide | SEQ ID NO: 2603 |
| | bicolor | Polypeptide | SEQ ID NO: 2604 |
| | | Genomic | SEQ ID NO: 4706 |
| Sb06g025950 | Sorghum | Polynucleotide | SEQ ID NO: 2605 |
| | bicolor | Polypeptide | SEQ ID NO: 2606 |
| | | Genomic | SEQ ID NO: 4707 |
| Sb06g026150 | Sorghum | Polynucleotide | SEQ ID NO: 2607 |
| | bicolor | Polypeptide | SEQ ID NO: 2608 |
| | | Genomic | SEQ ID NO: 4708 |
| Sb06g026280 | Sorghum | Polynucleotide | SEQ ID NO: 2609 |
| | bicolor | Polypeptide | SEQ ID NO: 2610 |
| | | Genomic | SEQ ID NO: 4709 |
| Sb06g026890 | Sorghum | Polynucleotide | SEQ ID NO: 2611 |
| | bicolor | Polypeptide | SEQ ID NO: 2612 |
| | | Genomic | SEQ ID NO: 4710 |
| Sb06g027000 | Sorghum | Polynucleotide | SEQ ID NO: 2613 |
| | bicolor | Polypeptide | SEQ ID NO: 2614 |
| | | Genomic | SEQ ID NO: 4711 |
| Sb06g027320 | Sorghum | Polynucleotide | SEQ ID NO: 2615 |
| | bicolor | Polypeptide | SEQ ID NO: 2616 |
| | | Genomic | SEQ ID NO: 4712 |
| Sb06g027405 | Sorghum | Polynucleotide | SEQ ID NO: 2617 |
| | bicolor | Polypeptide | SEQ ID NO: 2618 |
| | | Genomic | SEQ ID NO: 4713 |
| Sb06g027490 | Sorghum | Polynucleotide | SEQ ID NO: 2619 |
| | bicolor | Polypeptide | SEQ ID NO: 2620 |
| | | Genomic | SEQ ID NO: 4714 |
| Sb06g027570 | Sorghum | Polynucleotide | SEQ ID NO: 2621 |
| | bicolor | Polypeptide | SEQ ID NO: 2622 |
| | | Genomic | SEQ ID NO: 4715 |
| Sb06g027820 | Sorghum | Polynucleotide | SEQ ID NO: 2623 |
| | bicolor | Polypeptide | SEQ ID NO: 2624 |
| | | Genomic | SEQ ID NO: 4716 |
| Sb06g028030 | Sorghum | Polynucleotide | SEQ ID NO: 2625 |
| | bicolor | Polypeptide | SEQ ID NO: 2626 |
| | | Genomic | SEQ ID NO: 4717 |
| Sb06g028270 | Sorghum | Polynucleotide | SEQ ID NO: 2627 |
| | bicolor | Polypeptide | SEQ ID NO: 2628 |
| | | Genomic | SEQ ID NO: 4718 |
| Sb06g028310 | Sorghum | Polynucleotide | SEQ ID NO: 2629 |
| | bicolor | Polypeptide | SEQ ID NO: 2630 |
| | | Genomic | SEQ ID NO: 4719 |
| Sb06g028440 | Sorghum | Polynucleotide | SEQ ID NO: 2631 |
| | bicolor | Polypeptide | SEQ ID NO: 2632 |
| | | Genomic | SEQ ID NO: 4720 |
| Sb06g028820 | Sorghum | Polynucleotide | SEQ ID NO: 2633 |
| | bicolor | Polypeptide | SEQ ID NO: 2634 |
| | | Genomic | SEQ ID NO: 4721 |
| Sb06g028840 | Sorghum | Polynucleotide | SEQ ID NO: 2635 |
| | bicolor | Polypeptide | SEQ ID NO: 2636 |
| | | Genomic | SEQ ID NO: 4722 |
| Sb06g028890 | Sorghum | Polynucleotide | SEQ ID NO: 2637 |
| | bicolor | Polypeptide | SEQ ID NO: 2638 |
| | | Genomic | SEQ ID NO: 4723 |
| Sb06g029070 | Sorghum | Polynucleotide | SEQ ID NO: 2639 |
| | bicolor | Polypeptide | SEQ ID NO: 2640 |
| | | Genomic | SEQ ID NO: 4724 |
| Sb06g029210 | Sorghum | Polynucleotide | SEQ ID NO: 2641 |
| | bicolor | Polypeptide | SEQ ID NO: 2642 |
| | | Genomic | SEQ ID NO: 4725 |
| Sb06g029725 | Sorghum | Polynucleotide | SEQ ID NO: 2643 |
| | bicolor | Polypeptide | SEQ ID NO: 2644 |
| | | Genomic | SEQ ID NO: 4726 |
| Sb06g030410 | Sorghum | Polynucleotide | SEQ ID NO: 2645 |
| | bicolor | Polypeptide | SEQ ID NO: 2646 |
| | | Genomic | SEQ ID NO: 4727 |
| Sb06g030520 | Sorghum | Polynucleotide | SEQ ID NO: 2647 |
| | bicolor | Polypeptide | SEQ ID NO: 2648 |
| | | Genomic | SEQ ID NO: 4728 |
| Sb06g030900 | Sorghum | Polynucleotide | SEQ ID NO: 2649 |
| | bicolor | Polypeptide | SEQ ID NO: 2650 |
| | | Genomic | SEQ ID NO: 4729 |
| Sb06g030940 | Sorghum | Polynucleotide | SEQ ID NO: 2651 |
| | bicolor | Polypeptide | SEQ ID NO: 2652 |
| | | Genomic | SEQ ID NO: 4730 |
| Sb06g031220 | Sorghum | Polynucleotide | SEQ ID NO: 2653 |
| | bicolor | Polypeptide | SEQ ID NO: 2654 |
| | | Genomic | SEQ ID NO: 4731 |
| Sb06g031340 | Sorghum | Polynucleotide | SEQ ID NO: 2655 |
| | bicolor | Polypeptide | SEQ ID NO: 2656 |
| | | Genomic | SEQ ID NO: 4732 |
| Sb06g032000 | Sorghum | Polynucleotide | SEQ ID NO: 2657 |
| | bicolor | Polypeptide | SEQ ID NO: 2658 |
| | | Genomic | SEQ ID NO: 4733 |
| Sb06g148700 | Sorghum | Polynucleotide | SEQ ID NO: 2659 |
| | bicolor | Polypeptide | SEQ ID NO: 2660 |
| | | Genomic | SEQ ID NO: 4734 |
| Sb06g032260 | Sorghum | Polynucleotide | SEQ ID NO: 2661 |
| | bicolor | Polypeptide | SEQ ID NO: 2662 |
| | | Genomic | SEQ ID NO: 4735 |
| Sb06g032330 | Sorghum | Polynucleotide | SEQ ID NO: 2663 |
| | bicolor | Polypeptide | SEQ ID NO: 2664 |
| | | Genomic | SEQ ID NO: 4736 |
| Sb06g032490 | Sorghum | Polynucleotide | SEQ ID NO: 2665 |
| | bicolor | Polypeptide | SEQ ID NO: 2666 |
| | | Genomic | SEQ ID NO: 4737 |
| Sb06g032610 | Sorghum | Polynucleotide | SEQ ID NO: 2667 |
| | bicolor | Polypeptide | SEQ ID NO: 2668 |
| | | Genomic | SEQ ID NO: 4738 |
| Sb06g032640 | Sorghum | Polynucleotide | SEQ ID NO: 2669 |
| | bicolor | Polypeptide | SEQ ID NO: 2670 |
| | | Genomic | SEQ ID NO: 4739 |
| Sb06g032970 | Sorghum | Polynucleotide | SEQ ID NO: 2671 |
| | bicolor | Polypeptide | SEQ ID NO: 2672 |
| | | Genomic | SEQ ID NO: 4740 |
| Sb06g033120 | Sorghum | Polynucleotide | SEQ ID NO: 2673 |
| | bicolor | Polypeptide | SEQ ID NO: 2674 |
| | | Genomic | SEQ ID NO: 4741 |
| Sb06g150170 | Sorghum | Polynucleotide | SEQ ID NO: 2675 |
| | bicolor | Polypeptide | SEQ ID NO: 2676 |
| | | Genomic | SEQ ID NO: 4742 |
| Sb06g033260 | Sorghum | Polynucleotide | SEQ ID NO: 2677 |
| | bicolor | Polypeptide | SEQ ID NO: 2678 |
| | | Genomic | SEQ ID NO: 4743 |
| Sb06g033280 | Sorghum | Polynucleotide | SEQ ID NO: 2679 |
| | bicolor | Polypeptide | SEQ ID NO: 2680 |
| | | Genomic | SEQ ID NO: 4744 |
| Sb06g033300 | Sorghum | Polynucleotide | SEQ ID NO: 2681 |
| | bicolor | Polypeptide | SEQ ID NO: 2682 |
| | | Genomic | SEQ ID NO: 4745 |
| Sb06g033650 | Sorghum | Polynucleotide | SEQ ID NO: 2683 |
| | bicolor | Polypeptide | SEQ ID NO: 2684 |
| | | Genomic | SEQ ID NO: 4746 |
| Sb06g033720 | Sorghum | Polynucleotide | SEQ ID NO: 2685 |
| | bicolor | Polypeptide | SEQ ID NO: 2686 |
| | | Genomic | SEQ ID NO: 4747 |
| Sb06g034020 | Sorghum | Polynucleotide | SEQ ID NO: 2687 |
| | bicolor | Polypeptide | SEQ ID NO: 2688 |
| | | Genomic | SEQ ID NO: 4748 |
| Sb06g034090 | Sorghum | Polynucleotide | SEQ ID NO: 2689 |
| | bicolor | Polypeptide | SEQ ID NO: 2690 |
| | | Genomic | SEQ ID NO: 4749 |
| Sb06g034110 | Sorghum | Polynucleotide | SEQ ID NO: 2691 |
| | bicolor | Polypeptide | SEQ ID NO: 2692 |
| | | Genomic | SEQ ID NO: 4750 |
| Sb06g034230 | Sorghum | Polynucleotide | SEQ ID NO: 2693 |
| | bicolor | Polypeptide | SEQ ID NO: 2694 |
| | | Genomic | SEQ ID NO: 4751 |
| Sb07g000230 | Sorghum | Polynucleotide | SEQ ID NO: 2695 |
| | bicolor | Polypeptide | SEQ ID NO: 2696 |
| | | Genomic | SEQ ID NO: 4752 |
| Sb07g000650 | Sorghum | Polynucleotide | SEQ ID NO: 2697 |
| | bicolor | Polypeptide | SEQ ID NO: 2698 |
| | | Genomic | SEQ ID NO: 4753 |
| Sb07g000920 | Sorghum | Polynucleotide | SEQ ID NO: 2699 |
| | bicolor | Polypeptide | SEQ ID NO: 2700 |
| | | Genomic | SEQ ID NO: 4754 |
| Sb07g001450 | Sorghum | Polynucleotide | SEQ ID NO: 2701 |
| | bicolor | Polypeptide | SEQ ID NO: 2702 |
| | | Genomic | SEQ ID NO: 4755 |
| Sb07g001580 | Sorghum | Polynucleotide | SEQ ID NO: 2703 |
| | bicolor | Polypeptide | SEQ ID NO: 2704 |
| | | Genomic | SEQ ID NO: 4756 |
| Sb07g002500 | Sorghum | Polynucleotide | SEQ ID NO: 2705 |
| | bicolor | Polypeptide | SEQ ID NO: 2706 |
| | | Genomic | SEQ ID NO: 4757 |
| Sb07g002650 | Sorghum | Polynucleotide | SEQ ID NO: 2707 |
| | bicolor | Polypeptide | SEQ ID NO: 2708 |
| | | Genomic | SEQ ID NO: 4758 |
| Sb07g002900 | Sorghum | Polynucleotide | SEQ ID NO: 2709 |
| | bicolor | Polypeptide | SEQ ID NO: 2710 |
| | | Genomic | SEQ ID NO: 4759 |
| Sb07g003190 | Sorghum | Polynucleotide | SEQ ID NO: 2711 |
| | bicolor | Polypeptide | SEQ ID NO: 2712 |
| | | Genomic | SEQ ID NO: 4760 |
| Sb07g003280 | Sorghum | Polynucleotide | SEQ ID NO: 2713 |
| | bicolor | Polypeptide | SEQ ID NO: 2714 |
| | | Genomic | SEQ ID NO: 4761 |
| Sb07g003510 | Sorghum | Polynucleotide | SEQ ID NO: 2715 |
| | bicolor | Polypeptide | SEQ ID NO: 2716 |
| | | Genomic | SEQ ID NO: 4762 |
| Sb07g003590 | Sorghum | Polynucleotide | SEQ ID NO: 2717 |
| | bicolor | Polypeptide | SEQ ID NO: 2718 |
| | | Genomic | SEQ ID NO: 4763 |
| Sb07g003600 | Sorghum | Polynucleotide | SEQ ID NO: 2719 |
| | bicolor | Polypeptide | SEQ ID NO: 2720 |
| | | Genomic | SEQ ID NO: 4764 |
| Sb07g003650 | Sorghum | Polynucleotide | SEQ ID NO: 2721 |
| | bicolor | Polypeptide | SEQ ID NO: 2722 |
| | | Genomic | SEQ ID NO: 4765 |
| Sb07g004260 | Sorghum | Polynucleotide | SEQ ID NO: 2723 |
| | bicolor | Polypeptide | SEQ ID NO: 2724 |
| | | Genomic | SEQ ID NO: 4766 |
| Sb07g004700 | Sorghum | Polynucleotide | SEQ ID NO: 2725 |
| | bicolor | Polypeptide | SEQ ID NO: 2726 |
| | | Genomic | SEQ ID NO: 4767 |
| Sb07g014030 | Sorghum | Polynucleotide | SEQ ID NO: 2727 |
| | bicolor | Polypeptide | SEQ ID NO: 2728 |
| | | Genomic | SEQ ID NO: 4768 |
| Sb07g005470 | Sorghum | Polynucleotide | SEQ ID NO: 2729 |
| | bicolor | Polypeptide | SEQ ID NO: 2730 |
| | | Genomic | SEQ ID NO: 4769 |
| Sb07g005500 | Sorghum | Polynucleotide | SEQ ID NO: 2731 |
| | bicolor | Polypeptide | SEQ ID NO: 2732 |
| | | Genomic | SEQ ID NO: 4770 |
| Sb07g005660 | Sorghum | Polynucleotide | SEQ ID NO: 2733 |
| | bicolor | Polypeptide | SEQ ID NO: 2734 |
| | | Genomic | SEQ ID NO: 4771 |
| Sb07g005685 | Sorghum | Polynucleotide | SEQ ID NO: 2735 |
| | bicolor | Polypeptide | SEQ ID NO: 2736 |
| | | Genomic | SEQ ID NO: 4772 |
| Sb07g006220 | Sorghum | Polynucleotide | SEQ ID NO: 2737 |
| | bicolor | Polypeptide | SEQ ID NO: 2738 |
| | | Genomic | SEQ ID NO: 4773 |
| Sb07g006300 | Sorghum | Polynucleotide | SEQ ID NO: 2739 |
| | bicolor | Polypeptide | SEQ ID NO: 2740 |
| | | Genomic | SEQ ID NO: 4774 |
| Sb07g006390 | Sorghum | Polynucleotide | SEQ ID NO: 2741 |
| | bicolor | Polypeptide | SEQ ID NO: 2742 |
| | | Genomic | SEQ ID NO: 4775 |
| Sb07g019850 | Sorghum | Polynucleotide | SEQ ID NO: 2743 |
| | bicolor | Polypeptide | SEQ ID NO: 2744 |
| | | Genomic | SEQ ID NO: 4776 |
| Sb07g009450 | Sorghum | Polynucleotide | SEQ ID NO: 2745 |
| | bicolor | Polypeptide | SEQ ID NO: 2746 |
| | | Genomic | SEQ ID NO: 4777 |
| Sb07g009560 | Sorghum | Polynucleotide | SEQ ID NO: 2747 |
| | bicolor | Polypeptide | SEQ ID NO: 2748 |
| | | Genomic | SEQ ID NO: 4778 |
| Sb07g009570 | Sorghum | Polynucleotide | SEQ ID NO: 2749 |
| | bicolor | Polypeptide | SEQ ID NO: 2750 |
| | | Genomic | SEQ ID NO: 4779 |
| Sb07g010440 | Sorghum | Polynucleotide | SEQ ID NO: 2751 |
| | bicolor | Polypeptide | SEQ ID NO: 2752 |
| | | Genomic | SEQ ID NO: 4780 |
| Sb07g011460 | Sorghum | Polynucleotide | SEQ ID NO: 2753 |
| | bicolor | Polypeptide | SEQ ID NO: 2754 |
| | | Genomic | SEQ ID NO: 4781 |
| Sb07g012110 | Sorghum | Polynucleotide | SEQ ID NO: 2755 |
| | bicolor | Polypeptide | SEQ ID NO: 2756 |
| | | Genomic | SEQ ID NO: 4782 |
| Sb07g014210 | Sorghum | Polynucleotide | SEQ ID NO: 2757 |
| | bicolor | Polypeptide | SEQ ID NO: 2758 |
| | | Genomic | SEQ ID NO: 4783 |
| Sb07g082870 | Sorghum | Polynucleotide | SEQ ID NO: 2759 |
| | bicolor | Polypeptide | SEQ ID NO: 2760 |
| | | Genomic | SEQ ID NO: 4784 |
| Sb07g015150 | Sorghum | Polynucleotide | SEQ ID NO: 2761 |
| | bicolor | Polypeptide | SEQ ID NO: 2762 |
| | | Genomic | SEQ ID NO: 4785 |
| Sb07g015160 | Sorghum | Polynucleotide | SEQ ID NO: 2763 |
| | bicolor | Polypeptide | SEQ ID NO: 2764 |
| | | Genomic | SEQ ID NO: 4786 |
| Sb07g015390 | Sorghum | Polynucleotide | SEQ ID NO: 2765 |
| | bicolor | Polypeptide | SEQ ID NO: 2766 |
| | | Genomic | SEQ ID NO: 4787 |
| Sb07g018840 | Sorghum | Polynucleotide | SEQ ID NO: 2767 |
| | bicolor | Polypeptide | SEQ ID NO: 2768 |
| | | Genomic | SEQ ID NO: 4788 |
| Sb07g019180 | Sorghum | Polynucleotide | SEQ ID NO: 2769 |
| | bicolor | Polypeptide | SEQ ID NO: 2770 |
| | | Genomic | SEQ ID NO: 4789 |
| Sb07g019220 | Sorghum | Polynucleotide | SEQ ID NO: 2771 |
| | bicolor | Polypeptide | SEQ ID NO: 2772 |
| | | Genomic | SEQ ID NO: 4790 |
| Sb07g019450 | Sorghum | Polynucleotide | SEQ ID NO: 2773 |
| | bicolor | Polypeptide | SEQ ID NO: 2774 |
| | | Genomic | SEQ ID NO: 4791 |
| Sb07g019470 | Sorghum | Polynucleotide | SEQ ID NO: 2775 |
| | bicolor | Polypeptide | SEQ ID NO: 2776 |
| | | Genomic | SEQ ID NO: 4792 |
| Sb07g019750 | Sorghum | Polynucleotide | SEQ ID NO: 2777 |
| | bicolor | Polypeptide | SEQ ID NO: 2778 |
| | | Genomic | SEQ ID NO: 4793 |
| Sb07g019840 | Sorghum | Polynucleotide | SEQ ID NO: 2779 |
| | bicolor | Polypeptide | SEQ ID NO: 2780 |
| | | Genomic | SEQ ID NO: 4794 |
| Sb07g019863 | Sorghum | Polynucleotide | SEQ ID NO: 2781 |
| | bicolor | Polypeptide | SEQ ID NO: 2782 |
| | | Genomic | SEQ ID NO: 4795 |
| Sb07g020220 | Sorghum | Polynucleotide | SEQ ID NO: 2783 |
| | bicolor | Polypeptide | SEQ ID NO: 2784 |
| | | Genomic | SEQ ID NO: 4796 |
| Sb07g020640 | Sorghum | Polynucleotide | SEQ ID NO: 2785 |
| | bicolor | Polypeptide | SEQ ID NO: 2786 |
| | | Genomic | SEQ ID NO: 4797 |
| Sb07g020940 | Sorghum | Polynucleotide | SEQ ID NO: 2787 |
| | bicolor | Polypeptide | SEQ ID NO: 2788 |
| | | Genomic | SEQ ID NO: 4798 |
| Sb07g021060 | Sorghum | Polynucleotide | SEQ ID NO: 2789 |
| | bicolor | Polypeptide | SEQ ID NO: 2790 |
| | | Genomic | SEQ ID NO: 4799 |
| Sb07g021100 | Sorghum | Polynucleotide | SEQ ID NO: 2791 |
| | bicolor | Polypeptide | SEQ ID NO: 2792 |
| | | Genomic | SEQ ID NO: 4800 |
| Sb07g021140 | Sorghum | Polynucleotide | SEQ ID NO: 2793 |
| | bicolor | Polypeptide | SEQ ID NO: 2794 |
| | | Genomic | SEQ ID NO: 4801 |
| Sb07g021160 | Sorghum | Polynucleotide | SEQ ID NO: 2795 |
| | bicolor | Polypeptide | SEQ ID NO: 2796 |
| | | Genomic | SEQ ID NO: 4802 |
| Sb07g021350 | Sorghum | Polynucleotide | SEQ ID NO: 2797 |
| | bicolor | Polypeptide | SEQ ID NO: 2798 |
| | | Genomic | SEQ ID NO: 4803 |
| Sb07g021400 | Sorghum | Polynucleotide | SEQ ID NO: 2799 |
| | bicolor | Polypeptide | SEQ ID NO: 2800 |
| | | Genomic | SEQ ID NO: 4804 |
| Sb07g021630 | Sorghum | Polynucleotide | SEQ ID NO: 2801 |
| | bicolor | Polypeptide | SEQ ID NO: 2802 |
| | | Genomic | SEQ ID NO: 4805 |
| Sb07g021700 | Sorghum | Polynucleotide | SEQ ID NO: 2803 |
| | bicolor | Polypeptide | SEQ ID NO: 2804 |
| | | Genomic | SEQ ID NO: 4806 |
| Sb07g022000 | Sorghum | Polynucleotide | SEQ ID NO: 2805 |
| | bicolor | Polypeptide | SEQ ID NO: 2806 |
| | | Genomic | SEQ ID NO: 4807 |
| Sb07g022480 | Sorghum | Polynucleotide | SEQ ID NO: 2807 |
| | bicolor | Polypeptide | SEQ ID NO: 2808 |
| | | Genomic | SEQ ID NO: 4808 |
| Sb07g144470 | Sorghum | Polynucleotide | SEQ ID NO: 2809 |
| | bicolor | Polypeptide | SEQ ID NO: 2810 |
| | | Genomic | SEQ ID NO: 4809 |
| Sb07g023740 | Sorghum | Polynucleotide | SEQ ID NO: 2811 |
| | bicolor | Polypeptide | SEQ ID NO: 2812 |
| | | Genomic | SEQ ID NO: 4810 |
| Sb07g023950 | Sorghum | Polynucleotide | SEQ ID NO: 2813 |
| | bicolor | Polypeptide | SEQ ID NO: 2814 |
| | | Genomic | SEQ ID NO: 4811 |
| Sb07g024150 | Sorghum | Polynucleotide | SEQ ID NO: 2815 |
| | bicolor | Polypeptide | SEQ ID NO: 2816 |
| | | Genomic | SEQ ID NO: 4812 |
| Sb07g024450 | Sorghum | Polynucleotide | SEQ ID NO: 2817 |
| | bicolor | Polypeptide | SEQ ID NO: 2818 |
| | | Genomic | SEQ ID NO: 4813 |
| Sb07g024460 | Sorghum | Polynucleotide | SEQ ID NO: 2819 |
| | bicolor | Polypeptide | SEQ ID NO: 2820 |
| | | Genomic | SEQ ID NO: 4814 |
| Sb07g024490 | Sorghum | Polynucleotide | SEQ ID NO: 2821 |
| | bicolor | Polypeptide | SEQ ID NO: 2822 |
| | | Genomic | SEQ ID NO: 4815 |
| Sb07g024860 | Sorghum | Polynucleotide | SEQ ID NO: 2823 |
| | bicolor | Polypeptide | SEQ ID NO: 2824 |
| | | Genomic | SEQ ID NO: 4816 |
| Sb07g025470 | Sorghum | Polynucleotide | SEQ ID NO: 2825 |
| | bicolor | Polypeptide | SEQ ID NO: 2826 |
| | | Genomic | SEQ ID NO: 4817 |
| Sb07g025510 | Sorghum | Polynucleotide | SEQ ID NO: 2827 |
| | bicolor | Polypeptide | SEQ ID NO: 2828 |
| | | Genomic | SEQ ID NO: 4818 |
| Sb07g026000 | Sorghum | Polynucleotide | SEQ ID NO: 2829 |
| | bicolor | Polypeptide | SEQ ID NO: 2830 |
| | | Genomic | SEQ ID NO: 4819 |
| Sb07g026260 | Sorghum | Polynucleotide | SEQ ID NO: 2831 |
| | bicolor | Polypeptide | SEQ ID NO: 2832 |
| | | Genomic | SEQ ID NO: 4820 |
| Sb07g026480 | Sorghum | Polynucleotide | SEQ ID NO: 2833 |
| | bicolor | Polypeptide | SEQ ID NO: 2834 |
| | | Genomic | SEQ ID NO: 4821 |
| Sb07g027290 | Sorghum | Polynucleotide | SEQ ID NO: 2835 |
| | bicolor | Polypeptide | SEQ ID NO: 2836 |
| | | Genomic | SEQ ID NO: 4822 |
| Sb07g027510 | Sorghum | Polynucleotide | SEQ ID NO: 2837 |
| | bicolor | Polypeptide | SEQ ID NO: 2838 |
| | | Genomic | SEQ ID NO: 4823 |
| Sb07g027570 | Sorghum | Polynucleotide | SEQ ID NO: 2839 |
| | bicolor | Polypeptide | SEQ ID NO: 2840 |
| | | Genomic | SEQ ID NO: 4824 |
| Sb07g027640 | Sorghum | Polynucleotide | SEQ ID NO: 2841 |
| | bicolor | Polypeptide | SEQ ID NO: 2842 |
| | | Genomic | SEQ ID NO: 4825 |
| Sb07g027650 | Sorghum | Polynucleotide | SEQ ID NO: 2843 |
| | bicolor | Polypeptide | SEQ ID NO: 2844 |
| | | Genomic | SEQ ID NO: 4826 |
| Sb07g027830 | Sorghum | Polynucleotide | SEQ ID NO: 2845 |
| | bicolor | Polypeptide | SEQ ID NO: 2846 |
| | | Genomic | SEQ ID NO: 4827 |
| Sb07g027950 | Sorghum | Polynucleotide | SEQ ID NO: 2847 |
| | bicolor | Polypeptide | SEQ ID NO: 2848 |
| | | Genomic | SEQ ID NO: 4828 |
| Sb07g028140 | Sorghum | Polynucleotide | SEQ ID NO: 2849 |
| | bicolor | Polypeptide | SEQ ID NO: 2850 |
| | | Genomic | SEQ ID NO: 4829 |
| Sb07g028200 | Sorghum | Polynucleotide | SEQ ID NO: 2851 |
| | bicolor | Polypeptide | SEQ ID NO: 2852 |
| | | Genomic | SEQ ID NO: 4830 |
| Sb07g028980 | Sorghum | Polynucleotide | SEQ ID NO: 2853 |
| | bicolor | Polypeptide | SEQ ID NO: 2854 |
| | | Genomic | SEQ ID NO: 4831 |
| Sb07g029190 | Sorghum | Polynucleotide | SEQ ID NO: 2855 |
| | bicolor | Polypeptide | SEQ ID NO: 2856 |
| | | Genomic | SEQ ID NO: 4832 |
| Sb08g000370 | Sorghum | Polynucleotide | SEQ ID NO: 2857 |
| | bicolor | Polypeptide | SEQ ID NO: 2858 |
| | | Genomic | SEQ ID NO: 4833 |
| Sb08g000640 | Sorghum | Polynucleotide | SEQ ID NO: 2859 |
| | bicolor | Polypeptide | SEQ ID NO: 2860 |
| | | Genomic | SEQ ID NO: 4834 |
| Sb08g001050 | Sorghum | Polynucleotide | SEQ ID NO: 2861 |
| | bicolor | Polypeptide | SEQ ID NO: 2862 |
| | | Genomic | SEQ ID NO: 4835 |
| Sb08g001340 | Sorghum | Polynucleotide | SEQ ID NO: 2863 |
| | bicolor | Polypeptide | SEQ ID NO: 2864 |
| | | Genomic | SEQ ID NO: 4836 |
| Sb08g001730 | Sorghum | Polynucleotide | SEQ ID NO: 2865 |
| | bicolor | Polypeptide | SEQ ID NO: 2866 |
| | | Genomic | SEQ ID NO: 4837 |
| Sb08g001930 | Sorghum | Polynucleotide | SEQ ID NO: 2867 |
| | bicolor | Polypeptide | SEQ ID NO: 2868 |
| | | Genomic | SEQ ID NO: 4838 |
| Sb08g002000 | Sorghum | Polynucleotide | SEQ ID NO: 2869 |
| | bicolor | Polypeptide | SEQ ID NO: 2870 |
| | | Genomic | SEQ ID NO: 4839 |
| Sb08g002056 | Sorghum | Polynucleotide | SEQ ID NO: 2871 |
| | bicolor | Polypeptide | SEQ ID NO: 2872 |
| | | Genomic | SEQ ID NO: 4840 |
| Sb08g002240 | Sorghum | Polynucleotide | SEQ ID NO: 2873 |
| | bicolor | Polypeptide | SEQ ID NO: 2874 |
| | | Genomic | SEQ ID NO: 4841 |
| Sb08g002430 | Sorghum | Polynucleotide | SEQ ID NO: 2875 |
| | bicolor | Polypeptide | SEQ ID NO: 2876 |
| | | Genomic | SEQ ID NO: 4842 |
| Sb08g002707 | Sorghum | Polynucleotide | SEQ ID NO: 2877 |
| | bicolor | Polypeptide | SEQ ID NO: 2878 |
| | | Genomic | SEQ ID NO: 4843 |
| Sb08g002720 | Sorghum | Polynucleotide | SEQ ID NO: 2879 |
| | bicolor | Polypeptide | SEQ ID NO: 2880 |
| | | Genomic | SEQ ID NO: 4844 |
| Sb08g002910 | Sorghum | Polynucleotide | SEQ ID NO: 2881 |
| | bicolor | Polypeptide | SEQ ID NO: 2882 |
| | | Genomic | SEQ ID NO: 4845 |
| Sb08g002960 | Sorghum | Polynucleotide | SEQ ID NO: 2883 |
| | bicolor | Polypeptide | SEQ ID NO: 2884 |
| | | Genomic | SEQ ID NO: 4846 |
| Sb08g003430 | Sorghum | Polynucleotide | SEQ ID NO: 2885 |
| | bicolor | Polypeptide | SEQ ID NO: 2886 |
| | | Genomic | SEQ ID NO: 4847 |
| Sb08g004050 | Sorghum | Polynucleotide | SEQ ID NO: 2887 |
| | bicolor | Polypeptide | SEQ ID NO: 2888 |
| | | Genomic | SEQ ID NO: 4848 |
| Sb08g004180 | Sorghum | Polynucleotide | SEQ ID NO: 2889 |
| | bicolor | Polypeptide | SEQ ID NO: 2890 |
| | | Genomic | SEQ ID NO: 4849 |
| Sb08g004190 | Sorghum | Polynucleotide | SEQ ID NO: 2891 |
| | bicolor | Polypeptide | SEQ ID NO: 2892 |
| | | Genomic | SEQ ID NO: 4850 |
| Sb08g005260 | Sorghum | Polynucleotide | SEQ ID NO: 2893 |
| | bicolor | Polypeptide | SEQ ID NO: 2894 |
| | | Genomic | SEQ ID NO: 4851 |
| Sb08g005300 | Sorghum | Polynucleotide | SEQ ID NO: 2895 |
| | bicolor | Polypeptide | SEQ ID NO: 2896 |
| | | Genomic | SEQ ID NO: 4852 |
| Sb08g005340 | Sorghum | Polynucleotide | SEQ ID NO: 2897 |
| | bicolor | Polypeptide | SEQ ID NO: 2898 |
| | | Genomic | SEQ ID NO: 4853 |
| Sb08g016200 | Sorghum | Polynucleotide | SEQ ID NO: 2899 |
| | bicolor | Polypeptide | SEQ ID NO: 2900 |
| | | Genomic | SEQ ID NO: 4854 |
| Sb08g006180 | Sorghum | Polynucleotide | SEQ ID NO: 2901 |
| | bicolor | Polypeptide | SEQ ID NO: 2902 |
| | | Genomic | SEQ ID NO: 4855 |
| Sb08g006460 | Sorghum | Polynucleotide | SEQ ID NO: 2903 |
| | bicolor | Polypeptide | SEQ ID NO: 2904 |
| | | Genomic | SEQ ID NO: 4856 |
| Sb08g006540 | Sorghum | Polynucleotide | SEQ ID NO: 2905 |
| | bicolor | Polypeptide | SEQ ID NO: 2906 |
| | | Genomic | SEQ ID NO: 4857 |
| Sb08g006600 | Sorghum | Polynucleotide | SEQ ID NO: 2907 |
| | bicolor | Polypeptide | SEQ ID NO: 2908 |
| | | Genomic | SEQ ID NO: 4858 |
| Sb08g006690 | Sorghum | Polynucleotide | SEQ ID NO: 2909 |
| | bicolor | Polypeptide | SEQ ID NO: 2910 |
| | | Genomic | SEQ ID NO: 4859 |
| Sb08g007300 | Sorghum | Polynucleotide | SEQ ID NO: 2911 |
| | bicolor | Polypeptide | SEQ ID NO: 2912 |
| | | Genomic | SEQ ID NO: 4860 |
| Sb08g007570 | Sorghum | Polynucleotide | SEQ ID NO: 2913 |
| | bicolor | Polypeptide | SEQ ID NO: 2914 |
| | | Genomic | SEQ ID NO: 4861 |
| Sb08g008180 | Sorghum | Polynucleotide | SEQ ID NO: 2915 |
| | bicolor | Polypeptide | SEQ ID NO: 2916 |
| | | Genomic | SEQ ID NO: 4862 |
| Sb08g039210 | Sorghum | Polynucleotide | SEQ ID NO: 2917 |
| | bicolor | Polypeptide | SEQ ID NO: 2918 |
| | | Genomic | SEQ ID NO: 4863 |
| Sb08g008505 | Sorghum | Polynucleotide | SEQ ID NO: 2919 |
| | bicolor | Polypeptide | SEQ ID NO: 2920 |
| | | Genomic | SEQ ID NO: 4864 |
| Sb08g009100 | Sorghum | Polynucleotide | SEQ ID NO: 2921 |
| | bicolor | Polypeptide | SEQ ID NO: 2922 |
| | | Genomic | SEQ ID NO: 4865 |
| Sb08g011300 | Sorghum | Polynucleotide | SEQ ID NO: 2923 |
| | bicolor | Polypeptide | SEQ ID NO: 2924 |
| | | Genomic | SEQ ID NO: 4866 |
| Sb08g012560 | Sorghum | Polynucleotide | SEQ ID NO: 2925 |
| | bicolor | Polypeptide | SEQ ID NO: 2926 |
| | | Genomic | SEQ ID NO: 4867 |
| Sb08g015000 | Sorghum | Polynucleotide | SEQ ID NO: 2927 |
| | bicolor | Polypeptide | SEQ ID NO: 2928 |
| | | Genomic | SEQ ID NO: 4868 |
| Sb08g015131 | Sorghum | Polynucleotide | SEQ ID NO: 2929 |
| | bicolor | Polypeptide | SEQ ID NO: 2930 |
| | | Genomic | SEQ ID NO: 4869 |
| Sb08g015555 | Sorghum | Polynucleotide | SEQ ID NO: 2931 |
| | bicolor | Polypeptide | SEQ ID NO: 2932 |
| | | Genomic | SEQ ID NO: 4870 |
| Sb08g016370 | Sorghum | Polynucleotide | SEQ ID NO: 2933 |
| | bicolor | Polypeptide | SEQ ID NO: 2934 |
| | | Genomic | SEQ ID NO: 4871 |
| Sb08g016490 | Sorghum | Polynucleotide | SEQ ID NO: 2935 |
| | bicolor | Polypeptide | SEQ ID NO: 2936 |
| | | Genomic | SEQ ID NO: 4872 |
| Sb08g016720 | Sorghum | Polynucleotide | SEQ ID NO: 2937 |
| | bicolor | Polypeptide | SEQ ID NO: 2938 |
| | | Genomic | SEQ ID NO: 4873 |
| Sb08g017180 | Sorghum | Polynucleotide | SEQ ID NO: 2939 |
| | bicolor | Polypeptide | SEQ ID NO: 2940 |
| | | Genomic | SEQ ID NO: 4874 |
| Sb08g017210 | Sorghum | Polynucleotide | SEQ ID NO: 2941 |
| | bicolor | Polypeptide | SEQ ID NO: 2942 |
| | | Genomic | SEQ ID NO: 4875 |
| Sb08g017700 | Sorghum | Polynucleotide | SEQ ID NO: 2943 |
| | bicolor | Polypeptide | SEQ ID NO: 2944 |
| | | Genomic | SEQ ID NO: 4876 |
| Sb08g017830 | Sorghum | Polynucleotide | SEQ ID NO: 2945 |
| | bicolor | Polypeptide | SEQ ID NO: 2946 |
| | | Genomic | SEQ ID NO: 4877 |
| Sb08g018160 | Sorghum | Polynucleotide | SEQ ID NO: 2947 |
| | bicolor | Polypeptide | SEQ ID NO: 2948 |
| | | Genomic | SEQ ID NO: 4878 |
| Sb08g117320 | Sorghum | Polynucleotide | SEQ ID NO: 2949 |
| | bicolor | Polypeptide | SEQ ID NO: 2950 |
| | | Genomic | SEQ ID NO: 4879 |
| Sb08g018493 | Sorghum | Polynucleotide | SEQ ID NO: 2951 |
| | bicolor | Polypeptide | SEQ ID NO: 2952 |
| | | Genomic | SEQ ID NO: 4880 |
| Sb08g018740 | Sorghum | Polynucleotide | SEQ ID NO: 2953 |
| | bicolor | Polypeptide | SEQ ID NO: 2954 |
| | | Genomic | SEQ ID NO: 4881 |
| Sb08g018890 | Sorghum | Polynucleotide | SEQ ID NO: 2955 |
| | bicolor | Polypeptide | SEQ ID NO: 2956 |
| | | Genomic | SEQ ID NO: 4882 |
| Sb08g120510 | Sorghum | Polynucleotide | SEQ ID NO: 2957 |
| | bicolor | Polypeptide | SEQ ID NO: 2958 |
| | | Genomic | SEQ ID NO: 4883 |
| Sb08g020750 | Sorghum | Polynucleotide | SEQ ID NO: 2959 |
| | bicolor | Polypeptide | SEQ ID NO: 2960 |
| | | Genomic | SEQ ID NO: 4884 |
| Sb08g020830 | Sorghum | Polynucleotide | SEQ ID NO: 2961 |
| | bicolor | Polypeptide | SEQ ID NO: 2962 |
| | | Genomic | SEQ ID NO: 4885 |
| Sb08g020910 | Sorghum | Polynucleotide | SEQ ID NO: 2963 |
| | bicolor | Polypeptide | SEQ ID NO: 2964 |
| | | Genomic | SEQ ID NO: 4886 |
| Sb08g021630 | Sorghum | Polynucleotide | SEQ ID NO: 2965 |
| | bicolor | Polypeptide | SEQ ID NO: 2966 |
| | | Genomic | SEQ ID NO: 4887 |
| Sb08g021670 | Sorghum | Polynucleotide | SEQ ID NO: 2967 |
| | bicolor | Polypeptide | SEQ ID NO: 2968 |
| | | Genomic | SEQ ID NO: 4888 |
| Sb08g022230 | Sorghum | Polynucleotide | SEQ ID NO: 2969 |
| | bicolor | Polypeptide | SEQ ID NO: 2970 |
| | | Genomic | SEQ ID NO: 4889 |
| Sb08g022270 | Sorghum | Polynucleotide | SEQ ID NO: 2971 |
| | bicolor | Polypeptide | SEQ ID NO: 2972 |
| | | Genomic | SEQ ID NO: 4890 |
| Sb08g022390 | Sorghum | Polynucleotide | SEQ ID NO: 2973 |
| | bicolor | Polypeptide | SEQ ID NO: 2974 |
| | | Genomic | SEQ ID NO: 4891 |
| Sb08g020000 | Sorghum | Polynucleotide | SEQ ID NO: 2975 |
| | bicolor | Polypeptide | SEQ ID NO: 2976 |
| | | Genomic | SEQ ID NO: 4892 |
| Sb08g022830 | Sorghum | Polynucleotide | SEQ ID NO: 2977 |
| | bicolor | Polypeptide | SEQ ID NO: 2978 |
| | | Genomic | SEQ ID NO: 4893 |
| Sb08g023040 | Sorghum | Polynucleotide | SEQ ID NO: 2979 |
| | bicolor | Polypeptide | SEQ ID NO: 2980 |
| | | Genomic | SEQ ID NO: 4894 |
| Sb09g000280 | Sorghum | Polynucleotide | SEQ ID NO: 2981 |
| | bicolor | Polypeptide | SEQ ID NO: 2982 |
| | | Genomic | SEQ ID NO: 4895 |
| Sb09g000330 | Sorghum | Polynucleotide | SEQ ID NO: 2983 |
| | bicolor | Polypeptide | SEQ ID NO: 2984 |
| | | Genomic | SEQ ID NO: 4896 |
| Sb09g000350 | Sorghum | Polynucleotide | SEQ ID NO: 2985 |
| | bicolor | Polypeptide | SEQ ID NO: 2986 |
| | | Genomic | SEQ ID NO: 4897 |
| Sb09g000780 | Sorghum | Polynucleotide | SEQ ID NO: 2987 |
| | bicolor | Polypeptide | SEQ ID NO: 2988 |
| | | Genomic | SEQ ID NO: 4898 |
| Sb09g000970 | Sorghum | Polynucleotide | SEQ ID NO: 2989 |
| | bicolor | Polypeptide | SEQ ID NO: 2990 |
| | | Genomic | SEQ ID NO: 4899 |
| Sb09g001080 | Sorghum | Polynucleotide | SEQ ID NO: 2991 |
| | bicolor | Polypeptide | SEQ ID NO: 2992 |
| | | Genomic | SEQ ID NO: 4900 |
| Sb09g001430 | Sorghum | Polynucleotide | SEQ ID NO: 2993 |
| | bicolor | Polypeptide | SEQ ID NO: 2994 |
| | | Genomic | SEQ ID NO: 4901 |
| Sb09g001530 | Sorghum | Polynucleotide | SEQ ID NO: 2995 |
| | bicolor | Polypeptide | SEQ ID NO: 2996 |
| | | Genomic | SEQ ID NO: 4902 |
| Sb09g001880 | Sorghum | Polynucleotide | SEQ ID NO: 2997 |
| | bicolor | Polypeptide | SEQ ID NO: 2998 |
| | | Genomic | SEQ ID NO: 4903 |
| Sb09g002250 | Sorghum | Polynucleotide | SEQ ID NO: 2999 |
| | bicolor | Polypeptide | SEQ ID NO: 3000 |
| | | Genomic | SEQ ID NO: 4904 |
| Sb09g002400 | Sorghum | Polynucleotide | SEQ ID NO: 3001 |
| | bicolor | Polypeptide | SEQ ID NO: 3002 |
| | | Genomic | SEQ ID NO: 4905 |
| Sb09g002860 | Sorghum | Polynucleotide | SEQ ID NO: 3003 |
| | bicolor | Polypeptide | SEQ ID NO: 3004 |
| | | Genomic | SEQ ID NO: 4906 |
| Sb09g003060 | Sorghum | Polynucleotide | SEQ ID NO: 3005 |
| | bicolor | Polypeptide | SEQ ID NO: 3006 |
| | | Genomic | SEQ ID NO: 4907 |
| Sb09g003630 | Sorghum | Polynucleotide | SEQ ID NO: 3007 |
| | bicolor | Polypeptide | SEQ ID NO: 3008 |
| | | Genomic | SEQ ID NO: 4908 |
| Sb09g004000 | Sorghum | Polynucleotide | SEQ ID NO: 3009 |
| | bicolor | Polypeptide | SEQ ID NO: 3010 |
| | | Genomic | SEQ ID NO: 4909 |
| Sb09g004150 | Sorghum | Polynucleotide | SEQ ID NO: 3011 |
| | bicolor | Polypeptide | SEQ ID NO: 3012 |
| | | Genomic | SEQ ID NO: 4910 |
| Sb09g004430 | Sorghum | Polynucleotide | SEQ ID NO: 3013 |
| | bicolor | Polypeptide | SEQ ID NO: 3014 |
| | | Genomic | SEQ ID NO: 4911 |
| Sb09g004490 | Sorghum | Polynucleotide | SEQ ID NO: 3015 |
| | bicolor | Polypeptide | SEQ ID NO: 3016 |
| | | Genomic | SEQ ID NO: 4912 |
| Sb09g004520 | Sorghum | Polynucleotide | SEQ ID NO: 3017 |
| | bicolor | Polypeptide | SEQ ID NO: 3018 |
| | | Genomic | SEQ ID NO: 4913 |
| Sb09g004630 | Sorghum | Polynucleotide | SEQ ID NO: 3019 |
| | bicolor | Polypeptide | SEQ ID NO: 3020 |
| | | Genomic | SEQ ID NO: 4914 |
| Sb09g004685 | Sorghum | Polynucleotide | SEQ ID NO: 3021 |
| | bicolor | Polypeptide | SEQ ID NO: 3022 |
| | | Genomic | SEQ ID NO: 4915 |
| Sb09g004883 | Sorghum | Polynucleotide | SEQ ID NO: 3023 |
| | bicolor | Polypeptide | SEQ ID NO: 3024 |
| | | Genomic | SEQ ID NO: 4916 |
| Sb09g005070 | Sorghum | Polynucleotide | SEQ ID NO: 3025 |
| | bicolor | Polypeptide | SEQ ID NO: 3026 |
| | | Genomic | SEQ ID NO: 4917 |
| Sb09g005250 | Sorghum | Polynucleotide | SEQ ID NO: 3027 |
| | bicolor | Polypeptide | SEQ ID NO: 3028 |
| | | Genomic | SEQ ID NO: 4918 |
| Sb09g005380 | Sorghum | Polynucleotide | SEQ ID NO: 3029 |
| | bicolor | Polypeptide | SEQ ID NO: 3030 |
| | | Genomic | SEQ ID NO: 4919 |
| Sb09g005450 | Sorghum | Polynucleotide | SEQ ID NO: 3031 |
| | bicolor | Polypeptide | SEQ ID NO: 3032 |
| | | Genomic | SEQ ID NO: 4920 |
| Sb09g005650 | Sorghum | Polynucleotide | SEQ ID NO: 3033 |
| | bicolor | Polypeptide | SEQ ID NO: 3034 |
| | | Genomic | SEQ ID NO: 4921 |
| Sb09g006040 | Sorghum | Polynucleotide | SEQ ID NO: 3035 |
| | bicolor | Polypeptide | SEQ ID NO: 3036 |
| | | Genomic | SEQ ID NO: 4922 |
| Sb09g006090 | Sorghum | Polynucleotide | SEQ ID NO: 3037 |
| | bicolor | Polypeptide | SEQ ID NO: 3038 |
| | | Genomic | SEQ ID NO: 4923 |
| Sb09g006900 | Sorghum | Polynucleotide | SEQ ID NO: 3039 |
| | bicolor | Polypeptide | SEQ ID NO: 3040 |
| | | Genomic | SEQ ID NO: 4924 |
| Sb09g007185 | Sorghum | Polynucleotide | SEQ ID NO: 3041 |
| | bicolor | Polypeptide | SEQ ID NO: 3042 |
| | | Genomic | SEQ ID NO: 4925 |
| Sb09g008070 | Sorghum | Polynucleotide | SEQ ID NO: 3043 |
| | bicolor | Polypeptide | SEQ ID NO: 3044 |
| | | Genomic | SEQ ID NO: 4926 |
| Sb09g065360 | Sorghum | Polynucleotide | SEQ ID NO: 3045 |
| | bicolor | Polypeptide | SEQ ID NO: 3046 |
| | | Genomic | SEQ ID NO: 4927 |
| Sb09g016510 | Sorghum | Polynucleotide | SEQ ID NO: 3047 |
| | bicolor | Polypeptide | SEQ ID NO: 3048 |
| | | Genomic | SEQ ID NO: 4928 |
| Sb09g126280 | Sorghum | Polynucleotide | SEQ ID NO: 3049 |
| | bicolor | Polypeptide | SEQ ID NO: 3050 |
| | | Genomic | SEQ ID NO: 4929 |
| Sb09g018720 | Sorghum | Polynucleotide | SEQ ID NO: 3051 |
| | bicolor | Polypeptide | SEQ ID NO: 3052 |
| | | Genomic | SEQ ID NO: 4930 |
| Sb09g019100 | Sorghum | Polynucleotide | SEQ ID NO: 3053 |
| | bicolor | Polypeptide | SEQ ID NO: 3054 |
| | | Genomic | SEQ ID NO: 4931 |
| Sb09g019240 | Sorghum | Polynucleotide | SEQ ID NO: 3055 |
| | bicolor | Polypeptide | SEQ ID NO: 3056 |
| | | Genomic | SEQ ID NO: 4932 |
| Sb09g019290 | Sorghum | Polynucleotide | SEQ ID NO: 3057 |
| | bicolor | Polypeptide | SEQ ID NO: 3058 |
| | | Genomic | SEQ ID NO: 4933 |
| Sb09g019590 | Sorghum | Polynucleotide | SEQ ID NO: 3059 |
| | bicolor | Polypeptide | SEQ ID NO: 3060 |
| | | Genomic | SEQ ID NO: 4934 |
| Sb09g130560 | Sorghum | Polynucleotide | SEQ ID NO: 3061 |
| | bicolor | Polypeptide | SEQ ID NO: 3062 |
| | | Genomic | SEQ ID NO: 4935 |
| Sb09g019680 | Sorghum | Polynucleotide | SEQ ID NO: 3063 |
| | bicolor | Polypeptide | SEQ ID NO: 3064 |
| | | Genomic | SEQ ID NO: 4936 |
| Sb09g019760 | Sorghum | Polynucleotide | SEQ ID NO: 3065 |
| | bicolor | Polypeptide | SEQ ID NO: 3066 |
| | | Genomic | SEQ ID NO: 4937 |
| Sb09g019940 | Sorghum | Polynucleotide | SEQ ID NO: 3067 |
| | bicolor | Polypeptide | SEQ ID NO: 3068 |
| | | Genomic | SEQ ID NO: 4938 |
| Sb09g020070 | Sorghum | Polynucleotide | SEQ ID NO: 3069 |
| | bicolor | Polypeptide | SEQ ID NO: 3070 |
| | | Genomic | SEQ ID NO: 4939 |
| Sb09g132690 | Sorghum | Polynucleotide | SEQ ID NO: 3071 |
| | bicolor | Polypeptide | SEQ ID NO: 3072 |
| | | Genomic | SEQ ID NO: 4940 |
| Sb09g020410 | Sorghum | Polynucleotide | SEQ ID NO: 3073 |
| | bicolor | Polypeptide | SEQ ID NO: 3074 |
| | | Genomic | SEQ ID NO: 4941 |
| Sb09g020820 | Sorghum | Polynucleotide | SEQ ID NO: 3075 |
| | bicolor | Polypeptide | SEQ ID NO: 3076 |
| | | Genomic | SEQ ID NO: 4942 |
| Sb09g020830 | Sorghum | Polynucleotide | SEQ ID NO: 3077 |
| | bicolor | Polypeptide | SEQ ID NO: 3078 |
| | | Genomic | SEQ ID NO: 4943 |
| Sb09g020860 | Sorghum | Polynucleotide | SEQ ID NO: 3079 |
| | bicolor | Polypeptide | SEQ ID NO: 3080 |
| | | Genomic | SEQ ID NO: 4944 |
| Sb09g133620 | Sorghum | Polynucleotide | SEQ ID NO: 3081 |
| | bicolor | Polypeptide | SEQ ID NO: 3082 |
| | | Genomic | SEQ ID NO: 4945 |
| Sb09g020940 | Sorghum | Polynucleotide | SEQ ID NO: 3083 |
| | bicolor | Polypeptide | SEQ ID NO: 3084 |
| | | Genomic | SEQ ID NO: 4946 |
| Sb09g021540 | Sorghum | Polynucleotide | SEQ ID NO: 3085 |
| | bicolor | Polypeptide | SEQ ID NO: 3086 |
| | | Genomic | SEQ ID NO: 4947 |
| Sb09g021920 | Sorghum | Polynucleotide | SEQ ID NO: 3087 |
| | bicolor | Polypeptide | SEQ ID NO: 3088 |
| | | Genomic | SEQ ID NO: 4948 |
| Sb09g136020 | Sorghum | Polynucleotide | SEQ ID NO: 3089 |
| | bicolor | Polypeptide | SEQ ID NO: 3090 |
| | | Genomic | SEQ ID NO: 4949 |
| Sb09g022360 | Sorghum | Polynucleotide | SEQ ID NO: 3091 |
| | bicolor | Polypeptide | SEQ ID NO: 3092 |
| | | Genomic | SEQ ID NO: 4950 |
| Sb09g022370 | Sorghum | Polynucleotide | SEQ ID NO: 3093 |
| | bicolor | Polypeptide | SEQ ID NO: 3094 |
| | | Genomic | SEQ ID NO: 4951 |
| Sb09g023580 | Sorghum | Polynucleotide | SEQ ID NO: 3095 |
| | bicolor | Polypeptide | SEQ ID NO: 3096 |
| | | Genomic | SEQ ID NO: 4952 |
| Sb09g023650 | Sorghum | Polynucleotide | SEQ ID NO: 3097 |
| | bicolor | Polypeptide | SEQ ID NO: 3098 |
| | | Genomic | SEQ ID NO: 4953 |
| Sb09g023840 | Sorghum | Polynucleotide | SEQ ID NO: 3099 |
| | bicolor | Polypeptide | SEQ ID NO: 3100 |
| | | Genomic | SEQ ID NO: 4954 |
| Sb09g024390 | Sorghum | Polynucleotide | SEQ ID NO: 3101 |
| | bicolor | Polypeptide | SEQ ID NO: 3102 |
| | | Genomic | SEQ ID NO: 4955 |
| Sb09g139040 | Sorghum | Polynucleotide | SEQ ID NO: 3103 |
| | bicolor | Polypeptide | SEQ ID NO: 3104 |
| | | Genomic | SEQ ID NO: 4956 |
| Sb09g024810 | Sorghum | Polynucleotide | SEQ ID NO: 3105 |
| | bicolor | Polypeptide | SEQ ID NO: 3106 |
| | | Genomic | SEQ ID NO: 4957 |
| Sb09g024990 | Sorghum | Polynucleotide | SEQ ID NO: 3107 |
| | bicolor | Polypeptide | SEQ ID NO: 3108 |
| | | Genomic | SEQ ID NO: 4958 |
| Sb09g025150 | Sorghum | Polynucleotide | SEQ ID NO: 3109 |
| | bicolor | Polypeptide | SEQ ID NO: 3110 |
| | | Genomic | SEQ ID NO: 4959 |
| Sb09g025190 | Sorghum | Polynucleotide | SEQ ID NO: 3111 |
| | bicolor | Polypeptide | SEQ ID NO: 3112 |
| | | Genomic | SEQ ID NO: 4960 |
| Sb09g025250 | Sorghum | Polynucleotide | SEQ ID NO: 3113 |
| | bicolor | Polypeptide | SEQ ID NO: 3114 |
| | | Genomic | SEQ ID NO: 4961 |
| Sb09g025400 | Sorghum | Polynucleotide | SEQ ID NO: 3115 |
| | bicolor | Polypeptide | SEQ ID NO: 3116 |
| | | Genomic | SEQ ID NO: 4962 |
| Sb09g025430 | Sorghum | Polynucleotide | SEQ ID NO: 3117 |
| | bicolor | Polypeptide | SEQ ID NO: 3118 |
| | | Genomic | SEQ ID NO: 4963 |
| Sb09g025520 | Sorghum | Polynucleotide | SEQ ID NO: 3119 |
| | bicolor | Polypeptide | SEQ ID NO: 3120 |
| | | Genomic | SEQ ID NO: 4964 |
| Sb09g025790 | Sorghum | Polynucleotide | SEQ ID NO: 3121 |
| | bicolor | Polypeptide | SEQ ID NO: 3122 |
| | | Genomic | SEQ ID NO: 4965 |
| Sb09g026020 | Sorghum | Polynucleotide | SEQ ID NO: 3123 |
| | bicolor | Polypeptide | SEQ ID NO: 3124 |
| | | Genomic | SEQ ID NO: 4966 |
| Sb09g026120 | Sorghum | Polynucleotide | SEQ ID NO: 3125 |
| | bicolor | Polypeptide | SEQ ID NO: 3126 |
| | | Genomic | SEQ ID NO: 4967 |
| Sb09g026780 | Sorghum | Polynucleotide | SEQ ID NO: 3127 |
| | bicolor | Polypeptide | SEQ ID NO: 3128 |
| | | Genomic | SEQ ID NO: 4968 |
| Sb09g027010 | Sorghum | Polynucleotide | SEQ ID NO: 3129 |
| | bicolor | Polypeptide | SEQ ID NO: 3130 |
| | | Genomic | SEQ ID NO: 4969 |
| Sb09g027030 | Sorghum | Polynucleotide | SEQ ID NO: 3131 |
| | bicolor | Polypeptide | SEQ ID NO: 3132 |
| | | Genomic | SEQ ID NO: 4970 |
| Sb09g027040 | Sorghum | Polynucleotide | SEQ ID NO: 3133 |
| | bicolor | Polypeptide | SEQ ID NO: 3134 |
| | | Genomic | SEQ ID NO: 4971 |
| Sb09g027060 | Sorghum | Polynucleotide | SEQ ID NO: 3135 |
| | bicolor | Polypeptide | SEQ ID NO: 3136 |
| | | Genomic | SEQ ID NO: 4972 |
| Sb09g142860 | Sorghum | Polynucleotide | SEQ ID NO: 3137 |
| | bicolor | Polypeptide | SEQ ID NO: 3138 |
| | | Genomic | SEQ ID NO: 4973 |
| Sb09g027380 | Sorghum | Polynucleotide | SEQ ID NO: 3139 |
| | bicolor | Polypeptide | SEQ ID NO: 3140 |
| | | Genomic | SEQ ID NO: 4974 |
| Sb09g143020 | Sorghum | Polynucleotide | SEQ ID NO: 3141 |
| | bicolor | Polypeptide | SEQ ID NO: 3142 |
| | | Genomic | SEQ ID NO: 4975 |
| Sb09g143660 | Sorghum | Polynucleotide | SEQ ID NO: 3143 |
| | bicolor | Polypeptide | SEQ ID NO: 3144 |
| | | Genomic | SEQ ID NO: 4976 |
| Sb09g028120 | Sorghum | Polynucleotide | SEQ ID NO: 3145 |
| | bicolor | Polypeptide | SEQ ID NO: 3146 |
| | | Genomic | SEQ ID NO: 4977 |
| Sb09g028130 | Sorghum | Polynucleotide | SEQ ID NO: 3147 |
| | bicolor | Polypeptide | SEQ ID NO: 3148 |
| | | Genomic | SEQ ID NO: 4978 |
| Sb09g144220 | Sorghum | Polynucleotide | SEQ ID NO: 3149 |
| | bicolor | Polypeptide | SEQ ID NO: 3150 |
| | | Genomic | SEQ ID NO: 4979 |
| Sb09g028400 | Sorghum | Polynucleotide | SEQ ID NO: 3151 |
| | bicolor | Polypeptide | SEQ ID NO: 3152 |
| | | Genomic | SEQ ID NO: 4980 |
| Sb09g028540 | Sorghum | Polynucleotide | SEQ ID NO: 3153 |
| | bicolor | Polypeptide | SEQ ID NO: 3154 |
| | | Genomic | SEQ ID NO: 4981 |
| Sb09g028650 | Sorghum | Polynucleotide | SEQ ID NO: 3155 |
| | bicolor | Polypeptide | SEQ ID NO: 3156 |
| | | Genomic | SEQ ID NO: 4982 |
| Sb09g028780 | Sorghum | Polynucleotide | SEQ ID NO: 3157 |
| | bicolor | Polypeptide | SEQ ID NO: 3158 |
| | | Genomic | SEQ ID NO: 4983 |
| Sb09g028840 | Sorghum | Polynucleotide | SEQ ID NO: 3159 |
| | bicolor | Polypeptide | SEQ ID NO: 3160 |
| | | Genomic | SEQ ID NO: 4984 |
| Sb09g028940 | Sorghum | Polynucleotide | SEQ ID NO: 3161 |
| | bicolor | Polypeptide | SEQ ID NO: 3162 |
| | | Genomic | SEQ ID NO: 4985 |
| Sb09g144920 | Sorghum | Polynucleotide | SEQ ID NO: 3163 |
| | bicolor | Polypeptide | SEQ ID NO: 3164 |
| | | Genomic | SEQ ID NO: 4986 |
| Sb09g029030 | Sorghum | Polynucleotide | SEQ ID NO: 3165 |
| | bicolor | Polypeptide | SEQ ID NO: 3166 |
| | | Genomic | SEQ ID NO: 4987 |
| Sb09g029400 | Sorghum | Polynucleotide | SEQ ID NO: 3167 |
| | bicolor | Polypeptide | SEQ ID NO: 3168 |
| | | Genomic | SEQ ID NO: 4988 |
| Sb09g029840 | Sorghum | Polynucleotide | SEQ ID NO: 3169 |
| | bicolor | Polypeptide | SEQ ID NO: 3170 |
| | | Genomic | SEQ ID NO: 4989 |
| Sb09g030140 | Sorghum | Polynucleotide | SEQ ID NO: 3171 |
| | bicolor | Polypeptide | SEQ ID NO: 3172 |
| | | Genomic | SEQ ID NO: 4990 |
| Sb09g030570 | Sorghum | Polynucleotide | SEQ ID NO: 3173 |
| | bicolor | Polypeptide | SEQ ID NO: 3174 |
| | | Genomic | SEQ ID NO: 4991 |
| Sb09g030720 | Sorghum | Polynucleotide | SEQ ID NO: 3175 |
| | bicolor | Polypeptide | SEQ ID NO: 3176 |
| | | Genomic | SEQ ID NO: 4992 |
| Sb09g030750 | Sorghum | Polynucleotide | SEQ ID NO: 3177 |
| | bicolor | Polypeptide | SEQ ID NO: 3178 |
| | | Genomic | SEQ ID NO: 4993 |
| Sb09g030830 | Sorghum | Polynucleotide | SEQ ID NO: 3179 |
| | bicolor | Polypeptide | SEQ ID NO: 3180 |
| | | Genomic | SEQ ID NO: 4994 |
| Sb09g030840 | Sorghum | Polynucleotide | SEQ ID NO: 3181 |
| | bicolor | Polypeptide | SEQ ID NO: 3182 |
| | | Genomic | SEQ ID NO: 4995 |
| Sb1068s002010 | Sorghum | Polynucleotide | SEQ ID NO: 3183 |
| | bicolor | Polypeptide | SEQ ID NO: 3184 |
| | | Genomic | SEQ ID NO: 4996 |
| Sb10g000850 | Sorghum | Polynucleotide | SEQ ID NO: 3185 |
| | bicolor | Polypeptide | SEQ ID NO: 3186 |
| | | Genomic | SEQ ID NO: 4997 |
| Sb10g000950 | Sorghum | Polynucleotide | SEQ ID NO: 3187 |
| | bicolor | Polypeptide | SEQ ID NO: 3188 |
| | | Genomic | SEQ ID NO: 4998 |
| Sb10g001010 | Sorghum | Polynucleotide | SEQ ID NO: 3189 |
| | bicolor | Polypeptide | SEQ ID NO: 3190 |
| | | Genomic | SEQ ID NO: 4999 |
| Sb10g003580 | Sorghum | Polynucleotide | SEQ ID NO: 3191 |
| | bicolor | Polypeptide | SEQ ID NO: 3192 |
| | | Genomic | SEQ ID NO: 5000 |
| Sb10g001120 | Sorghum | Polynucleotide | SEQ ID NO: 3193 |
| | bicolor | Polypeptide | SEQ ID NO: 3194 |
| | | Genomic | SEQ ID NO: 5001 |
| Sb10g001515 | Sorghum | Polynucleotide | SEQ ID NO: 3195 |
| | bicolor | Polypeptide | SEQ ID NO: 3196 |
| | | Genomic | SEQ ID NO: 5002 |
| Sb10g001560 | Sorghum | Polynucleotide | SEQ ID NO: 3197 |
| | bicolor | Polypeptide | SEQ ID NO: 3198 |
| | | Genomic | SEQ ID NO: 5003 |
| Sb10g001630 | Sorghum | Polynucleotide | SEQ ID NO: 3199 |
| | bicolor | Polypeptide | SEQ ID NO: 3200 |
| | | Genomic | SEQ ID NO: 5004 |
| Sb10g001880 | Sorghum | Polynucleotide | SEQ ID NO: 3201 |
| | bicolor | Polypeptide | SEQ ID NO: 3202 |
| | | Genomic | SEQ ID NO: 5005 |
| Sb10g002220 | Sorghum | Polynucleotide | SEQ ID NO: 3203 |
| | bicolor | Polypeptide | SEQ ID NO: 3204 |
| | | Genomic | SEQ ID NO: 5006 |
| Sb10g002790 | Sorghum | Polynucleotide | SEQ ID NO: 3205 |
| | bicolor | Polypeptide | SEQ ID NO: 3206 |
| | | Genomic | SEQ ID NO: 5007 |
| Sb10g006100 | Sorghum | Polynucleotide | SEQ ID NO: 3207 |
| | bicolor | Polypeptide | SEQ ID NO: 3208 |
| | | Genomic | SEQ ID NO: 5008 |
| Sb10g006150 | Sorghum | Polynucleotide | SEQ ID NO: 3209 |
| | bicolor | Polypeptide | SEQ ID NO: 3210 |
| | | Genomic | SEQ ID NO: 5009 |
| Sb10g003170 | Sorghum | Polynucleotide | SEQ ID NO: 3211 |
| | bicolor | Polypeptide | SEQ ID NO: 3212 |
| | | Genomic | SEQ ID NO: 5010 |
| Sb10g003240 | Sorghum | Polynucleotide | SEQ ID NO: 3213 |
| | bicolor | Polypeptide | SEQ ID NO: 3214 |
| | | Genomic | SEQ ID NO: 5011 |
| Sb10g003300 | Sorghum | Polynucleotide | SEQ ID NO: 3215 |
| | bicolor | Polypeptide | SEQ ID NO: 3216 |
| | | Genomic | SEQ ID NO: 5012 |
| Sb10g003860 | Sorghum | Polynucleotide | SEQ ID NO: 3217 |
| | bicolor | Polypeptide | SEQ ID NO: 3218 |
| | | Genomic | SEQ ID NO: 5013 |
| Sb10g004560 | Sorghum | Polynucleotide | SEQ ID NO: 3219 |
| | bicolor | Polypeptide | SEQ ID NO: 3220 |
| | | Genomic | SEQ ID NO: 5014 |
| Sb10g004840 | Sorghum | Polynucleotide | SEQ ID NO: 3221 |
| | bicolor | Polypeptide | SEQ ID NO: 3222 |
| | | Genomic | SEQ ID NO: 5015 |
| Sb10g004920 | Sorghum | Polynucleotide | SEQ ID NO: 3223 |
| | bicolor | Polypeptide | SEQ ID NO: 3224 |
| | | Genomic | SEQ ID NO: 5016 |
| Sb10g006010 | Sorghum | Polynucleotide | SEQ ID NO: 3225 |
| | bicolor | Polypeptide | SEQ ID NO: 3226 |
| | | Genomic | SEQ ID NO: 5017 |
| Sb10g006160 | Sorghum | Polynucleotide | SEQ ID NO: 3227 |
| | bicolor | Polypeptide | SEQ ID NO: 3228 |
| | | Genomic | SEQ ID NO: 5018 |
| Sb10g006170 | Sorghum | Polynucleotide | SEQ ID NO: 3229 |
| | bicolor | Polypeptide | SEQ ID NO: 3230 |
| | | Genomic | SEQ ID NO: 5019 |
| Sb10g006250 | Sorghum | Polynucleotide | SEQ ID NO: 3231 |
| | bicolor | Polypeptide | SEQ ID NO: 3232 |
| | | Genomic | SEQ ID NO: 5020 |
| Sb10g006430 | Sorghum | Polynucleotide | SEQ ID NO: 3233 |
| | bicolor | Polypeptide | SEQ ID NO: 3234 |
| | | Genomic | SEQ ID NO: 5021 |
| Sb10g006470 | Sorghum | Polynucleotide | SEQ ID NO: 3235 |
| | bicolor | Polypeptide | SEQ ID NO: 3236 |
| | | Genomic | SEQ ID NO: 5022 |
| Sb10g013160 | Sorghum | Polynucleotide | SEQ ID NO: 3237 |
| | bicolor | Polypeptide | SEQ ID NO: 3238 |
| | | Genomic | SEQ ID NO: 5023 |
| Sb10g006910 | Sorghum | Polynucleotide | SEQ ID NO: 3239 |
| | bicolor | Polypeptide | SEQ ID NO: 3240 |
| | | Genomic | SEQ ID NO: 5024 |
| Sb10g007120 | Sorghum | Polynucleotide | SEQ ID NO: 3241 |
| | bicolor | Polypeptide | SEQ ID NO: 3242 |
| | | Genomic | SEQ ID NO: 5025 |
| Sb10g007270 | Sorghum | Polynucleotide | SEQ ID NO: 3243 |
| | bicolor | Polypeptide | SEQ ID NO: 3244 |
| | | Genomic | SEQ ID NO: 5026 |
| Sb10g007540 | Sorghum | Polynucleotide | SEQ ID NO: 3245 |
| | bicolor | Polypeptide | SEQ ID NO: 3246 |
| | | Genomic | SEQ ID NO: 5027 |
| Sb10g007630 | Sorghum | Polynucleotide | SEQ ID NO: 3247 |
| | bicolor | Polypeptide | SEQ ID NO: 3248 |
| | | Genomic | SEQ ID NO: 5028 |
| Sb10g007660 | Sorghum | Polynucleotide | SEQ ID NO: 3249 |
| | bicolor | Polypeptide | SEQ ID NO: 3250 |
| | | Genomic | SEQ ID NO: 5029 |
| Sb10g008220 | Sorghum | Polynucleotide | SEQ ID NO: 3251 |
| | bicolor | Polypeptide | SEQ ID NO: 3252 |
| | | Genomic | SEQ ID NO: 5030 |
| Sb10g008440 | Sorghum | Polynucleotide | SEQ ID NO: 3253 |
| | bicolor | Polypeptide | SEQ ID NO: 3254 |
| | | Genomic | SEQ ID NO: 5031 |
| Sb10g008520 | Sorghum | Polynucleotide | SEQ ID NO: 3255 |
| | bicolor | Polypeptide | SEQ ID NO: 3256 |
| | | Genomic | SEQ ID NO: 5032 |
| Sb10g008680 | Sorghum | Polynucleotide | SEQ ID NO: 3257 |
| | bicolor | Polypeptide | SEQ ID NO: 3258 |
| | | Genomic | SEQ ID NO: 5033 |
| Sb10g008850 | Sorghum | Polynucleotide | SEQ ID NO: 3259 |
| | bicolor | Polypeptide | SEQ ID NO: 3260 |
| | | Genomic | SEQ ID NO: 5034 |
| Sb10g008980 | Sorghum | Polynucleotide | SEQ ID NO: 3261 |
| | bicolor | Polypeptide | SEQ ID NO: 3262 |
| | | Genomic | SEQ ID NO: 5035 |
| Sb10g009040 | Sorghum | Polynucleotide | SEQ ID NO: 3263 |
| | bicolor | Polypeptide | SEQ ID NO: 3264 |
| | | Genomic | SEQ ID NO: 5036 |
| Sb10g009210 | Sorghum | Polynucleotide | SEQ ID NO: 3265 |
| | bicolor | Polypeptide | SEQ ID NO: 3266 |
| | | Genomic | SEQ ID NO: 5037 |
| Sb10g009370 | Sorghum | Polynucleotide | SEQ ID NO: 3267 |
| | bicolor | Polypeptide | SEQ ID NO: 3268 |
| | | Genomic | SEQ ID NO: 5038 |
| Sb10g010040 | Sorghum | Polynucleotide | SEQ ID NO: 3269 |
| | bicolor | Polypeptide | SEQ ID NO: 3270 |
| | | Genomic | SEQ ID NO: 5039 |
| Sb10g010300 | Sorghum | Polynucleotide | SEQ ID NO: 3271 |
| | bicolor | Polypeptide | SEQ ID NO: 3272 |
| | | Genomic | SEQ ID NO: 5040 |
| Sb10g010460 | Sorghum | Polynucleotide | SEQ ID NO: 3273 |
| | bicolor | Polypeptide | SEQ ID NO: 3274 |
| | | Genomic | SEQ ID NO: 5041 |
| Sb10g010460 | Sorghum | Polynucleotide | SEQ ID NO: 3275 |
| | bicolor | Polypeptide | SEQ ID NO: 3276 |
| | | Genomic | SEQ ID NO: 5042 |
| Sb10g010490 | Sorghum | Polynucleotide | SEQ ID NO: 3277 |
| | bicolor | Polypeptide | SEQ ID NO: 3278 |
| | | Genomic | SEQ ID NO: 5043 |
| Sb10g010550 | Sorghum | Polynucleotide | SEQ ID NO: 3279 |
| | bicolor | Polypeptide | SEQ ID NO: 3280 |
| | | Genomic | SEQ ID NO: 5044 |
| Sb10g010750 | Sorghum | Polynucleotide | SEQ ID NO: 3281 |
| | bicolor | Polypeptide | SEQ ID NO: 3282 |
| | | Genomic | SEQ ID NO: 5045 |
| Sb10g011210 | Sorghum | Polynucleotide | SEQ ID NO: 3283 |
| | bicolor | Polypeptide | SEQ ID NO: 3284 |
| | | Genomic | SEQ ID NO: 5046 |
| Sb10g011760 | Sorghum | Polynucleotide | SEQ ID NO: 3285 |
| | bicolor | Polypeptide | SEQ ID NO: 3286 |
| | | Genomic | SEQ ID NO: 5047 |
| Sb10g012730 | Sorghum | Polynucleotide | SEQ ID NO: 3287 |
| | bicolor | Polypeptide | SEQ ID NO: 3288 |
| | | Genomic | SEQ ID NO: 5048 |
| Sb10g012770 | Sorghum | Polynucleotide | SEQ ID NO: 3289 |
| | bicolor | Polypeptide | SEQ ID NO: 3290 |
| | | Genomic | SEQ ID NO: 5049 |
| Sb10g050540 | Sorghum | Polynucleotide | SEQ ID NO: 3291 |
| | bicolor | Polypeptide | SEQ ID NO: 3292 |
| | | Genomic | SEQ ID NO: 5050 |
| Sb10g013030 | Sorghum | Polynucleotide | SEQ ID NO: 3293 |
| | bicolor | Polypeptide | SEQ ID NO: 3294 |
| | | Genomic | SEQ ID NO: 5051 |
| Sb10g013050 | Sorghum | Polynucleotide | SEQ ID NO: 3295 |
| | bicolor | Polypeptide | SEQ ID NO: 3296 |
| | | Genomic | SEQ ID NO: 5052 |
| Sb10g016843 | Sorghum | Polynucleotide | SEQ ID NO: 3297 |
| | bicolor | Polypeptide | SEQ ID NO: 3298 |
| | | Genomic | SEQ ID NO: 5053 |
| Sb10g019730 | Sorghum | Polynucleotide | SEQ ID NO: 3299 |
| | bicolor | Polypeptide | SEQ ID NO: 3300 |
| | | Genomic | SEQ ID NO: 5054 |
| Sb10g019740 | Sorghum | Polynucleotide | SEQ ID NO: 3301 |
| | bicolor | Polypeptide | SEQ ID NO: 3302 |
| | | Genomic | SEQ ID NO: 5055 |
| Sb10g020070 | Sorghum | Polynucleotide | SEQ ID NO: 3303 |
| | bicolor | Polypeptide | SEQ ID NO: 3304 |
| | | Genomic | SEQ ID NO: 5056 |
| Sb10g020400 | Sorghum | Polynucleotide | SEQ ID NO: 3305 |
| | bicolor | Polypeptide | SEQ ID NO: 3306 |
| | | Genomic | SEQ ID NO: 5057 |
| Sb10g020570 | Sorghum | Polynucleotide | SEQ ID NO: 3307 |
| | bicolor | Polypeptide | SEQ ID NO: 3308 |
| | | Genomic | SEQ ID NO: 5058 |
| Sb10g115990 | Sorghum | Polynucleotide | SEQ ID NO: 3309 |
| | bicolor | Polypeptide | SEQ ID NO: 3310 |
| | | Genomic | SEQ ID NO: 5059 |
| Sb10g021590 | Sorghum | Polynucleotide | SEQ ID NO: 3311 |
| | bicolor | Polypeptide | SEQ ID NO: 3312 |
| | | Genomic | SEQ ID NO: 5060 |
| Sb10g122040 | Sorghum | Polynucleotide | SEQ ID NO: 3313 |
| | bicolor | Polypeptide | SEQ ID NO: 3314 |
| | | Genomic | SEQ ID NO: 5061 |
| Sb10g021880 | Sorghum | Polynucleotide | SEQ ID NO: 3315 |
| | bicolor | Polypeptide | SEQ ID NO: 3316 |
| | | Genomic | SEQ ID NO: 5062 |
| Sb10g021970 | Sorghum | Polynucleotide | SEQ ID NO: 3317 |
| | bicolor | Polypeptide | SEQ ID NO: 3318 |
| | | Genomic | SEQ ID NO: 5063 |
| Sb10g022120 | Sorghum | Polynucleotide | SEQ ID NO: 3319 |
| | bicolor | Polypeptide | SEQ ID NO: 3320 |
| | | Genomic | SEQ ID NO: 5064 |
| Sb10g022580 | Sorghum | Polynucleotide | SEQ ID NO: 3321 |
| | bicolor | Polypeptide | SEQ ID NO: 3322 |
| | | Genomic | SEQ ID NO: 5065 |
| Sb10g023550 | Sorghum | Polynucleotide | SEQ ID NO: 3323 |
| | bicolor | Polypeptide | SEQ ID NO: 3324 |
| | | Genomic | SEQ ID NO: 5066 |
| Sb10g023620 | Sorghum | Polynucleotide | SEQ ID NO: 3325 |
| | bicolor | Polypeptide | SEQ ID NO: 3326 |
| | | Genomic | SEQ ID NO: 5067 |
| Sb10g023650 | Sorghum | Polynucleotide | SEQ ID NO: 3327 |
| | bicolor | Polypeptide | SEQ ID NO: 3328 |
| | | Genomic | SEQ ID NO: 5068 |
| Sb10g023670 | Sorghum | Polynucleotide | SEQ ID NO: 3329 |
| | bicolor | Polypeptide | SEQ ID NO: 3330 |
| | | Genomic | SEQ ID NO: 5069 |
| Sb10g023810 | Sorghum | Polynucleotide | SEQ ID NO: 3331 |
| | bicolor | Polypeptide | SEQ ID NO: 3332 |
| | | Genomic | SEQ ID NO: 5070 |
| Sb10g024000 | Sorghum | Polynucleotide | SEQ ID NO: 3333 |
| | bicolor | Polypeptide | SEQ ID NO: 3334 |
| | | Genomic | SEQ ID NO: 5071 |
| Sb10g024120 | Sorghum | Polynucleotide | SEQ ID NO: 3335 |
| | bicolor | Polypeptide | SEQ ID NO: 3336 |
| | | Genomic | SEQ ID NO: 5072 |
| Sb10g131170 | Sorghum | Polynucleotide | SEQ ID NO: 3337 |
| | bicolor | Polypeptide | SEQ ID NO: 3338 |
| | | Genomic | SEQ ID NO: 5073 |
| Sb10g024580 | Sorghum | Polynucleotide | SEQ ID NO: 3339 |
| | bicolor | Polypeptide | SEQ ID NO: 3340 |
| | | Genomic | SEQ ID NO: 5074 |
| Sb10g024860 | Sorghum | Polynucleotide | SEQ ID NO: 3341 |
| | bicolor | Polypeptide | SEQ ID NO: 3342 |
| | | Genomic | SEQ ID NO: 5075 |
| Sb10g025070 | Sorghum | Polynucleotide | SEQ ID NO: 3343 |
| | bicolor | Polypeptide | SEQ ID NO: 3344 |
| | | Genomic | SEQ ID NO: 5076 |
| Sb10g133250 | Sorghum | Polynucleotide | SEQ ID NO: 3345 |
| | bicolor | Polypeptide | SEQ ID NO: 3346 |
| | | Genomic | SEQ ID NO: 5077 |
| Sb10g025240 | Sorghum | Polynucleotide | SEQ ID NO: 3347 |
| | bicolor | Polypeptide | SEQ ID NO: 3348 |
| | | Genomic | SEQ ID NO: 5078 |
| Sb10g025935 | Sorghum | Polynucleotide | SEQ ID NO: 3349 |
| | bicolor | Polypeptide | SEQ ID NO: 3350 |
| | | Genomic | SEQ ID NO: 5079 |
| Sb10g026020 | Sorghum | Polynucleotide | SEQ ID NO: 3351 |
| | bicolor | Polypeptide | SEQ ID NO: 3352 |
| | | Genomic | SEQ ID NO: 5080 |
| Sb10g026380 | Sorghum | Polynucleotide | SEQ ID NO: 3353 |
| | bicolor | Polypeptide | SEQ ID NO: 3354 |
| | | Genomic | SEQ ID NO: 5081 |
| Sb10g026420 | Sorghum | Polynucleotide | SEQ ID NO: 3355 |
| | bicolor | Polypeptide | SEQ ID NO: 3356 |
| | | Genomic | SEQ ID NO: 5082 |
| Sb10g026800 | Sorghum | Polynucleotide | SEQ ID NO: 3357 |
| | bicolor | Polypeptide | SEQ ID NO: 3358 |
| | | Genomic | SEQ ID NO: 5083 |
| Sb10g137110 | Sorghum | Polynucleotide | SEQ ID NO: 3359 |
| | bicolor | Polypeptide | SEQ ID NO: 3360 |
| | | Genomic | SEQ ID NO: 5084 |
| Sb10g027360 | Sorghum | Polynucleotide | SEQ ID NO: 3361 |
| | bicolor | Polypeptide | SEQ ID NO: 3362 |
| | | Genomic | SEQ ID NO: 5085 |
| Sb10g027380 | Sorghum | Polynucleotide | SEQ ID NO: 3363 |
| | bicolor | Polypeptide | SEQ ID NO: 3364 |
| | | Genomic | SEQ ID NO: 5086 |
| Sb10g027370 | Sorghum | Polynucleotide | SEQ ID NO: 3365 |
| | bicolor | Polypeptide | SEQ ID NO: 3366 |
| | | Genomic | SEQ ID NO: 5087 |
| Sb10g027610 | Sorghum | Polynucleotide | SEQ ID NO: 3367 |
| | bicolor | Polypeptide | SEQ ID NO: 3368 |
| | | Genomic | SEQ ID NO: 5088 |
| Sb10g027870 | Sorghum | Polynucleotide | SEQ ID NO: 3369 |
| | bicolor | Polypeptide | SEQ ID NO: 3370 |
| | | Genomic | SEQ ID NO: 5089 |
| Sb10g028060 | Sorghum | Polynucleotide | SEQ ID NO: 3371 |
| | bicolor | Polypeptide | SEQ ID NO: 3372 |
| | | Genomic | SEQ ID NO: 5090 |
| Sb10g028380 | Sorghum | Polynucleotide | SEQ ID NO: 3373 |
| | bicolor | Polypeptide | SEQ ID NO: 3374 |
| | | Genomic | SEQ ID NO: 5091 |
| Sb10g028450 | Sorghum | Polynucleotide | SEQ ID NO: 3375 |
| | bicolor | Polypeptide | SEQ ID NO: 3376 |
| | | Genomic | SEQ ID NO: 5092 |
| Sb10g028720 | Sorghum | Polynucleotide | SEQ ID NO: 3377 |
| | bicolor | Polypeptide | SEQ ID NO: 3378 |
| | | Genomic | SEQ ID NO: 5093 |
| Sb10g029060 | Sorghum | Polynucleotide | SEQ ID NO: 3379 |
| | bicolor | Polypeptide | SEQ ID NO: 3380 |
| | | Genomic | SEQ ID NO: 5094 |
| Sb10g029175 | Sorghum | Polynucleotide | SEQ ID NO: 3381 |
| | bicolor | Polypeptide | SEQ ID NO: 3382 |
| | | Genomic | SEQ ID NO: 5095 |
| Sb10g029190 | Sorghum | Polynucleotide | SEQ ID NO: 3383 |
| | bicolor | Polypeptide | SEQ ID NO: 3384 |
| | | Genomic | SEQ ID NO: 5096 |
| Sb10g029640 | Sorghum | Polynucleotide | SEQ ID NO: 3385 |
| | bicolor | Polypeptide | SEQ ID NO: 3386 |
| | | Genomic | SEQ ID NO: 5097 |
| Sb10g029650 | Sorghum | Polynucleotide | SEQ ID NO: 3387 |
| | bicolor | Polypeptide | SEQ ID NO: 3388 |
| | | Genomic | SEQ ID NO: 5098 |
| Sb10g029720 | Sorghum | Polynucleotide | SEQ ID NO: 3389 |
| | bicolor | Polypeptide | SEQ ID NO: 3390 |
| | | Genomic | SEQ ID NO: 5099 |
| Sb10g030240 | Sorghum | Polynucleotide | SEQ ID NO: 3391 |
| | bicolor | Polypeptide | SEQ ID NO: 3392 |
| | | Genomic | SEQ ID NO: 5100 |
| Sb10g031070 | Sorghum | Polynucleotide | SEQ ID NO: 3393 |
| | bicolor | Polypeptide | SEQ ID NO: 3394 |
| | | Genomic | SEQ ID NO: 5101 |
| Sb10g031300 | Sorghum | Polynucleotide | SEQ ID NO: 3395 |
| | bicolor | Polypeptide | SEQ ID NO: 3396 |
| | | Genomic | SEQ ID NO: 5102 |
| Sb1676s002010 | Sorghum | Polynucleotide | SEQ ID NO: 3397 |
| | bicolor | Polypeptide | SEQ ID NO: 3398 |
| | | Genomic | SEQ ID NO: 5103 |
| Sb2674s002010 | Sorghum | Polynucleotide | SEQ ID NO: 3399 |
| | bicolor | Polypeptide | SEQ ID NO: 3400 |
| | | Genomic | SEQ ID NO: 5104 |
| dpzm00g103644 | Zea mays | Polynucleotide | SEQ ID NO: 3401 |
| | | Polypeptide | SEQ ID NO: 3402 |
| sbiMIR156B | Sorghum | Polynucleotide | SEQ ID NO: 3403 |
| | bicolor | Genomic | SEQ ID NO: 5105 |
| ADH1YNT1PA | Pichia angusta | Polynucleotide | SEQ ID NO: 3404 |

### Construction of Nucleic Acids

[0082] The isolated nucleic acids of the present disclosure can be made using (a) standard recombinant methods, (b) synthetic techniques or combinations thereof. In some embodiments, the polynucleotides of the present disclosure will be cloned, amplified or otherwise constructed from a fungus or bacteria.

[0083] The nucleic acids may conveniently comprise sequences in addition to a polynucleotide of the present disclosure. For example, a multi-cloning site comprising one or more endonuclease restriction sites may be inserted into the nucleic acid to aid in isolation of the polynucleotide. Also, translatable sequences may be inserted to aid in the isolation of the translated polynucleotide of the present disclosure. For example, a hexa-histidine marker sequence provides a convenient means to purify the proteins of the present disclosure. The nucleic acid of the present disclosure—excluding the polynucleotide sequence—is optionally a vector, adapter or linker for cloning and/or expression of a polynucleotide of the present disclosure. Additional sequences may be added to such cloning and/or expression sequences to optimize their function in cloning and/or expression, to aid in isolation of the polynucleotide or to improve the introduction of the polynucleotide into a cell. Typically, the length of a nucleic acid of the present disclosure less the length of its polynucleotide of the present disclosure is less than 20 kilobase pairs, often less than 15 kb, and frequently less than 10 kb. Use of cloning vectors, expression vectors, adapters, and linkers is well known in the art. Exemplary nucleic acids include such vectors as: M13, lambda ZAP Express, lambda ZAP II, lambda gt10, lambda gt11, pBK-CMV, pBK-RSV, pBluescript II, lambda DASH II, lambda EMBL 3, lambda EMBL 4, pWE15, SuperCos 1, SurfZap, Uni-ZAP, pBC, pBS+/−, pSG5, pBK, pCR-Script, pET, pSPUTK, p3′SS, pGEM, pSK+/−, pGEX, pSPORTI and II, pOPRSVI CAT, pOPI3 CAT, pXT1, pSG5, pPbac, pMbac, pMC1neo, pOG44, pOG45, pFRTβGAL, pNEOβGAL, pRS403, pRS404, pRS405, pRS406, pRS413, pRS414, pRS415, pRS416, lambda MOSSIox and lambda MOSEIox. Optional vectors for the present disclosure, include but are not limited to, lambda ZAP II and pGEX. For a description of various nucleic acids see, e.g., Stratagene Cloning Systems, Catalogs 1995, 1996, 1997 (La Jolla, Calif.); and, Amersham Life Sciences, Inc, Catalog '97 (Arlington Heights, Ill.).

### Synthetic Methods for Constructing Nucleic Acids

[0084] The isolated nucleic acids of the present disclosure can also be prepared by direct chemical synthesis by methods such as the phosphotriester method of Narang, et al., (1979) Meth. Enzymol. 68:90-9; the phosphodiester method of Brown, et al., (1979) Meth. Enzymol. 68:109-51; the diethylphosphoramidite method of Beaucage, et al., (1981) Tetra. Letts. 22(20):1859-62; the solid phase phosphoramidite triester method described by Beaucage, et al., supra, e.g., using an automated synthesizer, e.g., as described in Needham-VanDevanter, et al., (1984) Nucleic Acids Res. 12:6159-68 and the solid support method of U.S. Pat. No. 4,458,066. Chemical synthesis generally produces a single stranded oligonucleotide. This may be converted into double stranded DNA by hybridization with a complementary sequence or by polymerization with a DNA polymerase using the single strand as a template. One of skill will recognize that while chemical synthesis of DNA is limited to sequences of about 100 bases, longer sequences may be obtained by the ligation of shorter sequences.

### UTRs and Codon Preference

[0085] In general, translational efficiency has been found to be regulated by specific sequence elements in the 5′ non-coding or untranslated region (5′ UTR) of the RNA. Positive sequence motifs include translational initiation consensus sequences (Kozak, (1987) Nucleic Acids Res. 15:8125) and the 5<G> 7 methyl GpppG RNA cap structure (Drummond, et al., (1985) Nucleic Acids Res. 13:7375). Negative elements include stable intramolecular 5′ UTR stem-loop structures (Muesing, et al., (1987) Cell 48:691) and AUG sequences or short open reading frames preceded by an appropriate AUG in the 5′ UTR (Kozak, supra, Rao, et al., (1988) Mol. and Cell. Biol. 8:284). Accordingly, the present disclosure provides 5′ and/or 3′ UTR regions for modulation of translation of heterologous coding sequences.

[0086] Further, the polypeptide-encoding segments of the polynucleotides of the present disclosure can be modified to alter codon usage. Altered codon usage can be employed to alter translational efficiency and/or to optimize the coding sequence for expression in a desired host or to optimize the codon usage in a heterologous sequence for expression in maize. Codon usage in the coding regions of the polynucleotides of the present disclosure can be analyzed statistically using commercially available software packages such as “Codon Preference” available from the University of Wisconsin Genetics Computer Group. See, Devereaux, et al., (1984) Nucleic Acids Res. 12:387-395; or MacVector 4.1 (Eastman Kodak Co., New Haven, Conn.). Thus, the present disclosure provides a codon usage frequency characteristic of the coding region of at least one of the polynucleotides of the present disclosure. The number of polynucleotides (3 nucleotides per amino acid) that can be used to determine a codon usage frequency can be any integer from 3 to the number of polynucleotides of the present disclosure as provided herein. Optionally, the polynucleotides will be full-length sequences. An exemplary number of sequences for statistical analysis can be at least 1, 5, 10, 20, 50 or 100.

### Sequence Shuffling

[0087] The present disclosure provides methods for sequence shuffling using polynucleotides of the present disclosure, and compositions resulting therefrom. Sequence shuffling is described in PCT Publication Number 1996/19256. See also, Zhang, et al., (1997) Proc. Natl. Acad. Sci. USA 94:4504-9 and Zhao, et al., (1998) Nature Biotech 16:258-61. Generally, sequence shuffling provides a means for generating libraries of polynucleotides having a desired characteristic, which can be selected or screened for. Libraries of recombinant polynucleotides are generated from a population of related sequence polynucleotides, which comprise sequence regions, which have substantial sequence identity and can be homologously recombined in vitro or in vivo. The population of sequence-recombined polynucleotides comprises a subpopulation of polynucleotides which possess desired or advantageous characteristics and which can be selected by a suitable selection or screening method. The characteristics can be any property or attribute capable of being selected for or detected in a screening system and may include properties of: an encoded protein, a transcriptional element, a sequence controlling transcription, RNA processing, RNA stability, chromatin conformation, translation or other expression property of a gene or transgene, a replicative element, a protein-binding element, or the like, such as any feature which confers a selectable or detectable property. In some embodiments, the selected characteristic will be an altered Kₘ and/or K_{cat} over the wild-type protein as provided herein. In other embodiments, a protein or polynucleotide generated from sequence shuffling will have a ligand binding affinity greater than the non-shuffled wild-type polynucleotide. In yet other embodiments, a protein or polynucleotide generated from sequence shuffling will have an altered pH optimum as compared to the non-shuffled wild-type polynucleotide. The increase in such properties can be at least 110%, 120%, 130%, 140% or greater than 150% of the wild-type value.

### Recombinant Expression Cassettes

[0088] The present disclosure further provides recombinant expression cassettes comprising a nucleic acid of the present disclosure. A nucleic acid sequence coding for the desired polynucleotide of the present disclosure, for example a cDNA or a genomic sequence encoding a polypeptide long enough to code for an active protein of the present disclosure, can be used to construct a recombinant expression cassette which can be introduced into the desired host cell. A recombinant expression cassette will typically comprise a polynucleotide of the present disclosure operably linked to transcriptional initiation regulatory sequences which will direct the transcription of the polynucleotide in the intended host cell, such as tissues of a transformed plant.

[0089] For example, plant expression vectors may include (1) a cloned plant gene under the transcriptional control of 5′ and 3′ regulatory sequences and (2) a dominant selectable marker. Such plant expression vectors may also contain, if desired, a promoter regulatory region (e.g., one conferring inducible or constitutive, environmentally- or developmentally-regulated, or cell- or tissue-specific/selective expression), a transcription initiation start site, a ribosome binding site, an RNA processing signal, a transcription termination site and/or a polyadenylation signal.

[0090] A plant promoter fragment can be employed which will direct expression of a polynucleotide of the present disclosure in all tissues of a regenerated plant. Such promoters are referred to herein as “constitutive” promoters and are active under most environmental conditions and states of development or cell differentiation. Examples of constitutive promoters include the 1′- or 2′-promoter derived from T-DNA of Agrobacterium tumefaciens, the Smas promoter, the cinnamyl alcohol dehydrogenase promoter (U.S. Pat. No. 5,683,439), the Nos promoter, the rubisco promoter, the GRP1-8 promoter, the 35S promoter from cauliflower mosaic virus (CaMV), as described in Odell, et al., (1985) Nature 313:810-2; rice actin (McElroy, et al., (1990) Plant Cell 163-171); ubiquitin (Christensen, et al., (1992) Plant Mol. Biol. 12:619-632 and Christensen, et al., (1992) Plant Mol. Biol. 18:675-89); pEMU (Last, et al., (1991) Theor. Appl. Genet. 81:581-8); MAS (Velten, et al., (1984) EMBO J. 3:2723-30) and maize H3 histone (Lepetit, et al., (1992) Mol. Gen. Genet. 231:276-85 and Atanassvoa, et al., (1992) Plant Journal 2(3):291-300); ALS promoter, as described in PCT Application Number WO 1996/30530; GOS2 (U.S. Pat. No. 6,504,083) and other transcription initiation regions from various plant genes known to those of skill. For the present disclosure ubiquitin is the preferred promoter for expression in monocot plants.

[0091] Alternatively, the plant promoter can direct expression of a polynucleotide of the present disclosure in a specific tissue or may be otherwise under more precise environmental or developmental control. Such promoters are referred to here as “inducible” promoters (Rab17, RAD29). Environmental conditions that may affect transcription by inducible promoters include pathogen attack, anaerobic conditions or the presence of light. Examples of inducible promoters are the Adh1 promoter, which is inducible by hypoxia or cold stress, the Hsp70 promoter, which is inducible by heat stress and the PPDK promoter, which is inducible by light.

[0092] Examples of promoters under developmental control include promoters that initiate transcription only, or preferentially, in certain tissues, such as leaves, roots, fruit, seeds or flowers. The operation of a promoter may also vary depending on its location in the genome. Thus, an inducible promoter may become fully or partially constitutive in certain locations.

[0093] If polypeptide expression is desired, it is generally desirable to include a polyadenylation region at the 3′-end of a polynucleotide coding region. The polyadenylation region can be derived from a variety of plant genes or from T-DNA. The 3′ end sequence to be added can be derived from, for example, the nopaline synthase or octopine synthase genes or alternatively from another plant gene or less preferably from any other eukaryotic gene. Examples of such regulatory elements include, but are not limited to, 3′ termination and/or polyadenylation regions such as those of the Agrobacterium tumefaciens nopaline synthase (nos) gene (Bevan, et al., (1983) Nucleic Acids Res. 12:369-85); the potato proteinase inhibitor II (PINII) gene (Keil, et al., (1986) Nucleic Acids Res. 14:5641-50 and An, et al., (1989) Plant Cell 1:115-22) and the CaMV 19S gene (Mogen, et al., (1990) Plant Cell 2:1261-72).

[0094] An intron sequence can be added to the 5′ untranslated region or the coding sequence of the partial coding sequence to increase the amount of the mature message that accumulates in the cytosol. Inclusion of a spliceable intron in the transcription unit in both plant and animal expression constructs has been shown to increase gene expression at both the mRNA and protein levels up to 1000-fold (Buchman and Berg, (1988) Mol. Cell Biol. 8:4395-4405; Callis, et al., (1987) Genes Dev. 1:1183-200). Such intron enhancement of gene expression is typically greatest when placed near the 5′ end of the transcription unit. Use of maize introns Adh1-S intron 1, 2 and 6, the Bronze-1 intron are known in the art. See generally, THE MAIZE HANDBOOK, Chapter 116, Freeling and Walbot, eds., Springer, New York (1994).

[0095] Plant signal sequences, including, but not limited to, signal-peptide encoding DNA/RNA sequences which target proteins to the extracellular matrix of the plant cell (Dratewka-Kos, et al., (1989) J. Biol. Chem. 264:4896-900), such as the Nicotiana plumbaginifolia extension gene (DeLoose, et al., (1991) Gene 99:95-100); signal peptides which target proteins to the vacuole, such as the sweet potato sporamin gene (Matsuka, et al., (1991) Proc. Natl. Acad. Sci. USA 88:834) and the barley lectin gene (Wilkins, et al., (1990) Plant Cell, 2:301-13); signal peptides which cause proteins to be secreted, such as that of PRIb (Lind, et al., (1992) Plant Mol. Biol. 18:47-53) or the barley alpha amylase (BAA) (Rahmatullah, et al., (1989) Plant Mol. Biol. 12:119, and hereby incorporated by reference) or signal peptides which target proteins to the plastids such as that of rapeseed enoyl-Acp reductase (Verwaert, et al., (1994) Plant Mol. Biol. 26:189-202) are useful in the disclosure.

[0096] The vector comprising the sequences from a polynucleotide of the present disclosure will typically comprise a marker gene, which confers a selectable phenotype on plant cells. Usually, the selectable marker gene will encode antibiotic resistance, with suitable genes including genes coding for resistance to the antibiotic spectinomycin (e.g., the aada gene), the streptomycin phosphotransferase (SPT) gene coding for streptomycin resistance, the neomycin phosphotransferase (NPTII) gene encoding kanamycin or geneticin resistance, the hygromycin phosphotransferase (HPT) gene coding for hygromycin resistance, genes coding for resistance to herbicides which act to inhibit the action of acetolactate synthase (ALS), in particular the sulfonylurea-type herbicides (e.g., the acetolactate synthase (ALS) gene containing mutations leading to such resistance in particular the S4 and/or Hra mutations), genes coding for resistance to herbicides which act to inhibit action of glutamine synthase, such as phosphinothricin or basta (e.g., the bar gene) or other such genes known in the art. The bar gene encodes resistance to the herbicide basta and the ALS gene encodes resistance to the herbicide chlorsulfuron.

[0097] Typical vectors useful for expression of genes in higher plants are well known in the art and include vectors derived from the tumor-inducing (Ti) plasmid of Agrobacterium tumefaciens described by Rogers, et al., (1987) Meth. Enzymol. 153:253-77. These vectors are plant integrating vectors in that on transformation, the vectors integrate a portion of vector DNA into the genome of the host plant. Exemplary A. tumefaciens vectors useful herein are plasmids pKYLX6 and pKYLX7 of Schardl, et al., (1987) Gene 61:1-11 and Berger, et al., (1989) Proc. Natl. Acad. Sci. USA, 86:8402-6. Another useful vector herein is plasmid pBI101.2 that is available from CLONTECH Laboratories, Inc. (Palo Alto, Calif.).

### Expression of Proteins in Host Cells

[0098] Using the nucleic acids of the present disclosure, one may express a protein of the present disclosure in a recombinantly engineered cell such as bacteria, yeast, insect, mammalian or preferably plant cells. The cells produce the protein in a non-natural condition (e.g., in quantity, composition, location and/or time), because they have been genetically altered through human intervention to do so.

[0099] It is expected that those of skill in the art are knowledgeable in the numerous expression systems available for expression of a nucleic acid encoding a protein of the present disclosure. No attempt to describe in detail the various methods known for the expression of proteins in prokaryotes or eukaryotes will be made.

[0100] In brief summary, the expression of isolated nucleic acids encoding a protein of the present disclosure will typically be achieved by operably linking, for example, the DNA or cDNA to a promoter (which is either constitutive or inducible), followed by incorporation into an expression vector. The vectors can be suitable for replication and integration in either prokaryotes or eukaryotes. Typical expression vectors contain transcription and translation terminators, initiation sequences, and promoters useful for regulation of the expression of the DNA encoding a protein of the present disclosure. To obtain high level expression of a cloned gene, it is desirable to construct expression vectors which contain, at the minimum, a strong promoter, such as ubiquitin, to direct transcription, a ribosome binding site for translational initiation and a transcription/translation terminator. Constitutive promoters are classified as providing for a range of constitutive expression. Thus, some are weak constitutive promoters and others are strong constitutive promoters. Generally, by “weak promoter” is intended a promoter that drives expression of a coding sequence at a low level. By “low level” is intended at levels of about 1/10,000 transcripts to about 1/100,000 transcripts to about 1/500,000 transcripts. Conversely, a “strong promoter” drives expression of a coding sequence at a “high level” or about 1/10 transcripts to about 1/100 transcripts to about 1/1,000 transcripts.

[0101] One of skill would recognize that modifications could be made to a protein of the present disclosure without diminishing its biological activity. Some modifications may be made to facilitate the cloning, expression or incorporation of the targeting molecule into a fusion protein. Such modifications are well known to those of skill in the art and include, for example, a methionine added at the amino terminus to provide an initiation site or additional amino acids (e.g., poly His) placed on either terminus to create conveniently located restriction sites or termination codons or purification sequences.

### Expression in Prokaryotes

[0102] Prokaryotic cells may be used as hosts for expression. Prokaryotes most frequently are represented by various strains of E. coli; however, other microbial strains may also be used. Commonly used prokaryotic control sequences which are defined herein to include promoters for transcription initiation, optionally with an operator, along with ribosome binding site sequences, include such commonly used promoters as the beta lactamase (penicillinase) and lactose (lac) promoter systems (Chang, et al., (1977) Nature 198:1056), the tryptophan (trp) promoter system (Goeddel, et al., (1980) Nucleic Acids Res. 8:4057) and the lambda derived P L promoter and N-gene ribosome binding site (Shimatake, et al., (1981) Nature 292:128). The inclusion of selection markers in DNA vectors transfected in E. coli is also useful. Examples of such markers include genes specifying resistance to ampicillin, tetracycline or chloramphenicol.

[0103] The vector is selected to allow introduction of the gene of interest into the appropriate host cell. Bacterial vectors are typically of plasmid or phage origin. Appropriate bacterial cells are infected with phage vector particles or transfected with naked phage vector DNA. If a plasmid vector is used, the bacterial cells are transfected with the plasmid vector DNA. Expression systems for expressing a protein of the present disclosure are available using Bacillus sp. and Salmonella (Palva, et al., (1983) Gene 22:229-35; Mosbach, et al., (1983) Nature 302:543-5). The pGEX-4T-1 plasmid vector from Pharmacia is the preferred E. coli expression vector for the present disclosure.

### Expression in Eukaryotes

[0104] A variety of eukaryotic expression systems such as yeast, insect cell lines, plant and mammalian cells, are known to those of skill in the art. As explained briefly below, the present disclosure can be expressed in these eukaryotic systems. In some embodiments, transformed/transfected plant cells, as discussed infra, are employed as expression systems for production of the proteins of the instant disclosure.

[0105] Synthesis of heterologous proteins in yeast is well known. Sherman, et al., (1982) METHODS IN YEAST GENETICS, Cold Spring Harbor Laboratory is a well recognized work describing the various methods available to produce the protein in yeast. Two widely utilized yeasts for production of eukaryotic proteins are Saccharomyces cerevisiae and Pichia pastoris. Vectors, strains and protocols for expression in Saccharomyces and Pichia are known in the art and available from commercial suppliers (e.g., Invitrogen). Suitable vectors usually have expression control sequences, such as promoters, including 3-phosphoglycerate kinase or alcohol oxidase and an origin of replication, termination sequences and the like as desired.

[0106] A protein of the present disclosure, once expressed, can be isolated from yeast by lysing the cells and applying standard protein isolation techniques to the lysates or the pellets. The monitoring of the purification process can be accomplished by using Western blot techniques or radioimmunoassay of other standard immunoassay techniques.

[0107] The sequences encoding proteins of the present disclosure can also be ligated to various expression vectors for use in transfecting cell cultures of, for instance, mammalian, insect or plant origin. Mammalian cell systems often will be in the form of monolayers of cells although mammalian cell suspensions may also be used. A number of suitable host cell lines capable of expressing intact proteins have been developed in the art, and include the HEK293, BHK21 and CHO cell lines. Expression vectors for these cells can include expression control sequences, such as an origin of replication, a promoter (e.g., the CMV promoter, a HSV tk promoter or pgk (phosphoglycerate kinase) promoter), an enhancer (Queen, et al., (1986) Immunol. Rev. 89:49) and necessary processing information sites, such as ribosome binding sites, RNA splice sites, polyadenylation sites (e.g., an SV40 large T Ag poly A addition site) and transcriptional terminator sequences. Other animal cells useful for production of proteins of the present disclosure are available, for instance, from the American Type Culture Collection Catalogue of Cell Lines and Hybridomas (7^{th} ed., 1992).

[0108] Appropriate vectors for expressing proteins of the present disclosure in insect cells are usually derived from the SF9 baculovirus. Suitable insect cell lines include mosquito larvae, silkworm, armyworm, moth, and Drosophila cell lines such as a Schneider cell line (see, e.g., Schneider, (1987) J. Embryol. Exp. Morphol. 27:353-65).

[0109] As with yeast, when higher animal or plant host cells are employed, polyadenlyation or transcription terminator sequences are typically incorporated into the vector. An example of a terminator sequence is the polyadenlyation sequence from the bovine growth hormone gene. Sequences for accurate splicing of the transcript may also be included. An example of a splicing sequence is the VP1 intron from SV40 (Sprague, et al., (1983) J. Virol. 45:773-81). Additionally, gene sequences to control replication in the host cell may be incorporated into the vector such as those found in bovine papilloma virus type-vectors (Saveria-Campo, “Bovine Papilloma Virus DNA a Eukaryotic Cloning Vector,” in DNA CLONING: A PRACTICAL APPROACH, vol. II, Glover, ed., IRL Press, Arlington, Va., pp. 213-38 (1985)).

[0110] In addition, the gene for yield improvement placed in the appropriate plant expression vector can be used to transform plant cells. The polypeptide can then be isolated from plant callus or the transformed cells can be used to regenerate transgenic plants. Such transgenic plants can be harvested, and the appropriate tissues (seed or leaves, for example) can be subjected to large scale protein extraction and purification techniques.

### Plant Transformation Methods

[0111] Numerous methods for introducing foreign genes into plants are known and can be used to insert a yield improvement polynucleotide into a plant host, including biological and physical plant transformation protocols. See, e.g., Miki, et al., “Procedure for Introducing Foreign DNA into Plants,” in METHODS IN PLANT MOLECULAR BIOLOGY AND BIOTECHNOLOGY, Glick and Thompson, eds., CRC Press, Inc., Boca Raton, pp. 67-88 (1993). The methods chosen vary with the host plant, and include chemical transfection methods such as calcium phosphate, microorganism-mediated gene transfer such as Agrobacterium (Horsch, et al., (1985) Science 227:1229-31), electroporation, micro-injection and biolistic bombardment.

[0112] Expression cassettes and vectors and in vitro culture methods for plant cell or tissue transformation and regeneration of plants are known and available. See, e.g., Gruber, et al., “Vectors for Plant Transformation,” in METHODS IN PLANT MOLECULAR BIOLOGY AND BIOTECHNOLOGY, supra, pp. 89-119.

[0113] The isolated polynucleotides or polypeptides may be introduced into the plant by one or more techniques typically used for direct delivery into cells. Such protocols may vary depending on the type of organism, cell, plant or plant cell, i.e., monocot or dicot, targeted for gene modification. Suitable methods of transforming plant cells include microinjection (Crossway, et al., (1986) Biotechniques 4:320-334 and U.S. Pat. No. 6,300,543), electroporation (Riggs, et al., (1986) Proc. Natl. Acad. Sci. USA 83:5602-5606), direct gene transfer (Paszkowski, et al., (1984) EMBO J. 3:2717-2722) and ballistic particle acceleration (see, for example, Sanford, et al., U.S. Pat. No. 4,945,050; WO 1991/10725 and McCabe, et al., (1988) Biotechnology 6:923-926). Also see, Tomes, et al., Direct DNA Transfer into Intact Plant Cells Via Microprojectile Bombardment. pp. 197-213 in Plant Cell, Tissue and Organ Culture, Fundamental Methods eds. Gamborg and Phillips, Springer-Verlag Berlin Heidelberg New York, 1995; U.S. Pat. No. 5,736,369 (meristem); Weissinger, et al., (1988) Ann. Rev. Genet. 22:421-477; Sanford, et al., (1987) Particulate Science and Technology 5:27-37 (onion); Christou, et al., (1988) Plant Physiol. 87:671-674 (soybean); Datta, et al., (1990) Biotechnology 8:736-740 (rice); Klein, et al., (1988) Proc. Natl. Acad. Sci. USA 85:4305-4309 (maize); Klein, et al., (1988) Biotechnology 6:559-563 (maize); WO 1991/10725 (maize); Klein, et al., (1988) Plant Physiol. 91:440-444 (maize); Fromm, et al., (1990) Biotechnology 8:833-839 and Gordon-Kamm, et al., (1990) Plant Cell 2:603-618 (maize); Hooydaas-Van Slogteren and Hooykaas, (1984) Nature (London) 311:763-764; Bytebier, et al., (1987) Proc. Natl. Acad. Sci. USA 84:5345-5349 (Liliaceae); De Wet, et al., (1985) In The Experimental Manipulation of Ovule Tissues, ed. Chapman, et al., pp. 197-209; Longman, N Y (pollen); Kaeppler, et al., (1990) Plant Cell Reports 9:415-418 and Kaeppler, et al., (1992) Theor. Appl. Genet. 84:560-566 (whisker-mediated transformation); U.S. Pat. No. 5,693,512 (sonication); D'Halluin, et al., (1992) Plant Cell 4:1495-1505 (electroporation); Li, et al., (1993) Plant Cell Reports 12:250-255 and Christou and Ford, (1995) Annals of Botany 75:407-413 (rice); Osjoda, et al., (1996) Nature Biotech. 14:745-750; Agrobacterium mediated maize transformation (U.S. Pat. No. 5,981,840); silicon carbide whisker methods (Frame, et al., (1994) Plant J. 6:941-948); laser methods (Guo, et al., (1995) Physiologia Plantarum 93:19-24); sonication methods (Bao, et al., (1997) Ultrasound in Medicine & Biology 23:953-959; Finer and Finer, (2000) Lett Appl Microbiol. 30:406-10; Amoah, et al., (2001) J Exp Bot 52:1135-42); polyethylene glycol methods (Krens, et al., (1982) Nature 296:72-77); protoplasts of monocot and dicot cells can be transformed using electroporation (Fromm, et al., (1985) Proc. Natl. Acad. Sci. USA 82:5824-5828) and microinjection (Crossway, et al., (1986) Mol. Gen. Genet. 202:179-185), all of which are herein incorporated by reference.

### Agrobacterium-Mediated Transformation

[0114] The most widely utilized method for introducing an expression vector into plants is based on the natural transformation system of Agrobacterium. A. tumefaciens and A. rhizogenes are plant pathogenic soil bacteria, which genetically transform plant cells. The Ti and Ri plasmids of A. tumefaciens and A. rhizogenes, respectively, carry genes responsible for genetic transformation of plants. See, e.g., Kado, (1991) Crit. Rev. Plant Sci. 10:1. Descriptions of the Agrobacterium vector systems and methods for Agrobacterium-mediated gene transfer are provided in Gruber, et al., supra; Miki, et al., supra; and Moloney, et al., (1989) Plant Cell Reports 8:238.

[0115] Similarly, the gene can be inserted into the T-DNA region of a Ti or Ri plasmid derived from A. tumefaciens or A. rhizogenes, respectively. Thus, expression cassettes can be constructed as above, using these plasmids. Many control sequences are known which when coupled to a heterologous coding sequence and transformed into a host organism show fidelity in gene expression with respect to tissue/organ specificity of the original coding sequence. See, e.g., Benfey and Chua, (1989) Science 244:174-81. Particularly suitable control sequences for use in these plasmids are promoters for constitutive leaf-specific expression of the gene in the various target plants. Other useful control sequences include a promoter and terminator from the nopaline synthase gene (NOS). The NOS promoter and terminator are present in the plasmid pARC2, available from the American Type Culture Collection and designated ATCC 67238. If such a system is used, the virulence (vir) gene from either the Ti or Ri plasmid must also be present, either along with the T-DNA portion or via a binary system where the vir gene is present on a separate vector. Such systems, vectors for use therein, and methods of transforming plant cells are described in U.S. Pat. No. 4,658,082; U.S. patent application Ser. No. 913,914, filed Oct. 1, 1986, as referenced in U.S. Pat. No. 5,262,306, issued Nov. 16, 1993 and Simpson, et al., (1986) Plant Mol. Biol. 6:403-15 (also referenced in the '306 patent), all incorporated by reference in their entirety.

[0116] Once constructed, these plasmids can be placed into A. rhizogenes or A. tumefaciens and these vectors used to transform cells of plant species, which are ordinarily susceptible to Fusarium or Alternaria infection. Several other transgenic plants are also contemplated by the present disclosure including but not limited to soybean, corn, sorghum, alfalfa, rice, clover, cabbage, banana, coffee, celery, tobacco, cowpea, cotton, melon and pepper. The selection of either A. tumefaciens or A. rhizogenes will depend on the plant being transformed thereby. In general A. tumefaciens is the preferred organism for transformation. Most dicotyledonous plants, some gymnosperms, and a few monocotyledonous plants (e.g., certain members of the Liliales and Arales) are susceptible to infection with A. tumefaciens. A. rhizogenes also has a wide host range, embracing most dicots and some gymnosperms, which includes members of the Leguminosae, Compositae and Chenopodiaceae. Monocot plants can now be transformed with some success. EP Patent Application Number 604 662 A1 discloses a method for transforming monocots using Agrobacterium. EP Patent Application Number 672 752 A1 discloses a method for transforming monocots with Agrobacterium using the scutellum of immature embryos. Ishida, et al., discuss a method for transforming maize by exposing immature embryos to A. tumefaciens (Nature Biotechnology 14:745-50 (1996)).

[0117] Once transformed, these cells can be used to regenerate transgenic plants. For example, whole plants can be infected with these vectors by wounding the plant and then introducing the vector into the wound site. Any part of the plant can be wounded, including leaves, stems and roots. Alternatively, plant tissue, in the form of an explant, such as cotyledonary tissue or leaf disks, can be inoculated with these vectors and cultured under conditions, which promote plant regeneration. Roots or shoots transformed by inoculation of plant tissue with A. rhizogenes or A. tumefaciens, containing the gene coding for the fumonisin degradation enzyme, can be used as a source of plant tissue to regenerate fumonisin-resistant transgenic plants, either via somatic embryogenesis or organogenesis. Examples of such methods for regenerating plant tissue are disclosed in Shahin, Theor. Appl. Genet. 69:235-40 (1985); U.S. Pat. No. 4,658,082; Simpson, et al., supra and U.S. patent application Ser. Nos. 913,913 and 913,914, both filed Oct. 1, 1986, as referenced in U.S. Pat. No. 5,262,306, issued Nov. 16, 1993, the entire disclosures therein incorporated herein by reference.

### Direct Gene Transfer

[0118] Despite the fact that the host range for Agrobacterium-mediated transformation is broad, some major cereal crop species and gymnosperms have generally been recalcitrant to this mode of gene transfer, even though some success has recently been achieved in rice (Hiei, et al., (1994) The Plant Journal 6:271-82). Several methods of plant transformation, collectively referred to as direct gene transfer, have been developed as an alternative to Agrobacterium-mediated transformation.

[0119] A generally applicable method of plant transformation is microprojectile-mediated transformation, where DNA is carried on the surface of microprojectiles measuring about 1 to 4 μm. The expression vector is introduced into plant tissues with a biolistic device that accelerates the microprojectiles to speeds of 300 to 600 m/s which is sufficient to penetrate the plant cell walls and membranes (Sanford, et al., (1987) Part. Sci. Technol. 5:27; Sanford, (1988) Trends Biotech 6:299; Sanford, (1990) Physiol. Plant 79:206 and Klein, et al., (1992) Biotechnology 10:268).

[0120] Another method for physical delivery of DNA to plants is sonication of target cells as described in Zang, et al., (1991) BioTechnology 9:996. Alternatively, liposome or spheroplast fusions have been used to introduce expression vectors into plants. See, e.g., Deshayes, et al., (1985) EMBO J. 4:2731 and Christou, et al., (1987) Proc. Natl. Acad. Sci. USA 84:3962. Direct uptake of DNA into protoplasts using CaCl₂ precipitation, polyvinyl alcohol or poly-L-ornithine has also been reported. See, e.g., Hain, et al., (1985) Mol. Gen. Genet. 199:161 and Draper, et al., (1982) Plant Cell Physiol. 23:451.

[0121] Electroporation of protoplasts and whole cells and tissues has also been described. See, e.g., Donn, et al., (1990) in Abstracts of the VIIth Intl. Congress on Plant Cell and Tissue Culture IAPTC, A2-38, p. 53; D'Halluin, et al., (1992) Plant Cell 4:1495-505 and Spencer, et al., (1994) Plant Mol. Biol. 24:51-61.

Increasing the Activity and/or Level of a Yield Improvement Polypeptide

[0122] Methods are provided to increase the activity and/or level of the yield improvement polypeptide of the disclosure. An increase in the level and/or activity of the yield improvement polypeptide of the disclosure can be achieved by providing to the plant a yield improvement polypeptide. The yield improvement polypeptide can be provided by introducing the amino acid sequence encoding the yield improvement polypeptide into the plant, introducing into the plant a nucleotide sequence encoding an yield improvement polypeptide or alternatively by modifying a genomic locus encoding the yield improvement polypeptide of the disclosure.

[0123] As discussed elsewhere herein, many methods are known the art for providing a polypeptide to a plant including, but not limited to, direct introduction of the polypeptide into the plant, introducing into the plant (transiently or stably) a polynucleotide construct encoding a polypeptide having cell number regulator activity. It is also recognized that the methods of the disclosure may employ a polynucleotide that is not capable of directing, in the transformed plant, the expression of a protein or an RNA. Thus, the level and/or activity of an yield improvement polypeptide may be increased by altering the gene encoding the yield improvement polypeptide or its promoter. See, e.g., Kmiec, U.S. Pat. No. 5,565,350; Zarling, et al., PCT/US93/03868. Therefore mutagenized plants that carry mutations in yield improvement genes, where the mutations increase expression of the yield improvement gene or increase the plant growth and/or organ development activity of the encoded yield improvement polypeptide are provided.

Reducing the Activity and/or Level of a Yield Improvement Polypeptide

[0124] Methods are provided to reduce or eliminate the activity of a yield improvement polypeptide of the disclosure by transforming a plant cell with an expression cassette that expresses a polynucleotide that inhibits the expression of the yield improvement polypeptide. The polynucleotide may inhibit the expression of the yield improvement polypeptide directly, by preventing translation of the yield improvement messenger RNA, or indirectly, by encoding a polypeptide that inhibits the transcription or translation of a yield improvement gene encoding a yield improvement polypeptide. Methods for inhibiting or eliminating the expression of a gene in a plant are well known in the art, and any such method may be used in the present disclosure to inhibit the expression of a yield improvement polypeptide.

[0125] In accordance with the present disclosure, the expression of a yield improvement polypeptide is inhibited if the protein level of the yield improvement polypeptide is less than 70% of the protein level of the same yield improvement polypeptide in a plant that has not been genetically modified or mutagenized to inhibit the expression of that yield improvement polypeptide. In particular embodiments of the disclosure, the protein level of the yield improvement polypeptide in a modified plant according to the disclosure is less than 60%, less than 50%, less than 40%, less than 30%, less than 20%, less than 10%, less than 5% or less than 2% of the protein level of the same yield improvement polypeptide in a plant that is not a mutant or that has not been genetically modified to inhibit the expression of that yield improvement polypeptide. The expression level of the yield improvement polypeptide may be measured directly, for example, by assaying for the level of yield improvement polypeptide expressed in the plant cell or plant, or indirectly, for example, by measuring the plant growth and/or organ development activity of the yield improvement polypeptide in the plant cell or plant or by measuring the biomass in the plant. Methods for performing such assays are described elsewhere herein.

[0126] In other embodiments of the disclosure, the activity of the yield improvement polypeptides is reduced or eliminated by transforming a plant cell with an expression cassette comprising a polynucleotide encoding a polypeptide that inhibits the activity of a yield improvement polypeptide. The plant growth and/or organ development activity of a yield improvement polypeptide is inhibited according to the present disclosure if the plant growth and/or organ development activity of the yield improvement polypeptide is less than 70% of the plant growth and/or organ development activity of the same yield improvement polypeptide in a plant that has not been modified to inhibit the plant growth and/or organ development activity of that yield improvement polypeptide. In particular embodiments of the disclosure, the plant growth and/or organ development activity of the yield improvement polypeptide in a modified plant according to the disclosure is less than 60%, less than 50%, less than 40%, less than 30%, less than 20%, less than 10% or less than 5% of the plant growth and/or organ development activity of the same yield improvement polypeptide in a plant that that has not been modified to inhibit the expression of that yield improvement polypeptide. The plant growth and/or organ development activity of a yield improvement polypeptide is “eliminated” according to the disclosure when it is not detectable by the assay methods described elsewhere herein. Methods of determining the plant growth and/or organ development activity of a yield improvement polypeptide are described elsewhere herein.

[0127] In other embodiments, the activity of a yield improvement polypeptide may be reduced or eliminated by disrupting the gene encoding the yield improvement polypeptide. The disclosure encompasses mutagenized plants that carry mutations in yield improvement genes, where the mutations reduce expression of the yield improvement gene or inhibit the plant growth and/or organ development activity of the encoded yield improvement polypeptide.

[0128] Thus, many methods may be used to reduce or eliminate the activity of a yield improvement polypeptide. In addition, more than one method may be used to reduce the activity of a single yield improvement polypeptide. Non-limiting examples of methods of reducing or eliminating the expression of yield improvement polypeptides are given below.

[0129] 1. Polynucleotide-Based Methods:

[0130] In some embodiments of the present disclosure, a plant is transformed with an expression cassette that is capable of expressing a polynucleotide that inhibits the expression of a yield improvement polypeptide of the disclosure. The term “expression” as used herein refers to the biosynthesis of a gene product, including the transcription and/or translation of said gene product. For example, for the purposes of the present disclosure, an expression cassette capable of expressing a polynucleotide that inhibits the expression of at least one yield improvement polypeptide is an expression cassette capable of producing an RNA molecule that inhibits the transcription and/or translation of at least one yield improvement polypeptide of the disclosure. The “expression” or “production” of a protein or polypeptide from a DNA molecule refers to the transcription and translation of the coding sequence to produce the protein or polypeptide, while the “expression” or “production” of a protein or polypeptide from an RNA molecule refers to the translation of the RNA coding sequence to produce the protein or polypeptide.

[0131] Examples of polynucleotides that inhibit the expression of a yield improvement polypeptide are given below.

[0132] i. Sense Suppression/Cosuppression

[0133] In some embodiments of the disclosure, inhibition of the expression of a yield improvement polypeptide may be obtained by sense suppression or cosuppression. For cosuppression, an expression cassette is designed to express an RNA molecule corresponding to all or part of a messenger RNA encoding a yield improvement polypeptide in the “sense” orientation. Over expression of the RNA molecule can result in reduced expression of the native gene. Accordingly, multiple plant lines transformed with the cosuppression expression cassette are screened to identify those that show the greatest inhibition of yield improvement polypeptide expression.

[0134] The polynucleotide used for cosuppression may correspond to all or part of the sequence encoding the yield improvement polypeptide, all or part of the 5′ and/or 3′ untranslated region of an yield improvement polypeptide transcript or all or part of both the coding sequence and the untranslated regions of a transcript encoding an yield improvement polypeptide. In some embodiments where the polynucleotide comprises all or part of the coding region for the yield improvement polypeptide, the expression cassette is designed to eliminate the start codon of the polynucleotide so that no protein product will be translated.

[0135] Cosuppression may be used to inhibit the expression of plant genes to produce plants having undetectable protein levels for the proteins encoded by these genes. See, for example, Broin, et al., (2002) Plant Cell 14:1417-1432. Cosuppression may also be used to inhibit the expression of multiple proteins in the same plant. See, for example, U.S. Pat. No. 5,942,657. Methods for using cosuppression to inhibit the expression of endogenous genes in plants are described in Flavell, et al., (1994) Proc. Natl. Acad. Sci. USA 91:3490-3496; Jorgensen, et al., (1996) Plant Mol. Biol. 31:957-973; Johansen and Carrington, (2001) Plant Physiol. 126:930-938; Broin, et al., (2002) Plant Cell 14:1417-1432; Stoutjesdijk, et al., (2002) Plant Physiol. 129:1723-1731; Yu, et al., (2003) Phytochemistry 63:753-763 and U.S. Pat. Nos. 5,034,323, 5,283,184 and 5,942,657, each of which is herein incorporated by reference. The efficiency of cosuppression may be increased by including a poly-dT region in the expression cassette at a position 3′ to the sense sequence and 5′ of the polyadenylation signal. See, US Patent Application Publication Number 2002/0048814, herein incorporated by reference. Typically, such a nucleotide sequence has substantial sequence identity to the sequence of the transcript of the endogenous gene, optimally greater than about 65% sequence identity, more optimally greater than about 85% sequence identity, most optimally greater than about 95% sequence identity. See U.S. Pat. Nos. 5,283,184 and 5,034,323, herein incorporated by reference.

[0136] ii. Antisense Suppression

[0137] In some embodiments of the disclosure, inhibition of the expression of the yield improvement polypeptide may be obtained by antisense suppression. For antisense suppression, the expression cassette is designed to express an RNA molecule complementary to all or part of a messenger RNA encoding the yield improvement polypeptide. Over expression of the antisense RNA molecule can result in reduced expression of the native gene. Accordingly, multiple plant lines transformed with the antisense suppression expression cassette are screened to identify those that show the greatest inhibition of yield improvement polypeptide expression.

[0138] The polynucleotide for use in antisense suppression may correspond to all or part of the complement of the sequence encoding the yield improvement polypeptide, all or part of the complement of the 5′ and/or 3′ untranslated region of the yield improvement transcript or all or part of the complement of both the coding sequence and the untranslated regions of a transcript encoding the yield improvement polypeptide. In addition, the antisense polynucleotide may be fully complementary (i.e., 100% identical to the complement of the target sequence) or partially complementary (i.e., less than 100% identical to the complement of the target sequence) to the target sequence. Antisense suppression may be used to inhibit the expression of multiple proteins in the same plant. See, for example, U.S. Pat. No. 5,942,657. Furthermore, portions of the antisense nucleotides may be used to disrupt the expression of the target gene. Generally, sequences of at least 50 nucleotides, 100 nucleotides, 200 nucleotides, 300, 400, 450, 500, 550 or greater may be used. Methods for using antisense suppression to inhibit the expression of endogenous genes in plants are described, for example, in Liu, et al., (2002) Plant Physiol. 129:1732-1743 and U.S. Pat. Nos. 5,759,829 and 5,942,657, each of which is herein incorporated by reference. Efficiency of antisense suppression may be increased by including a poly-dT region in the expression cassette at a position 3′ to the antisense sequence and 5′ of the polyadenylation signal. See, US Patent Application Publication Number 2002/0048814, herein incorporated by reference.

[0139] iii. Double-Stranded RNA Interference

[0140] In some embodiments of the disclosure, inhibition of the expression of a yield improvement polypeptide may be obtained by double-stranded RNA (dsRNA) interference. For dsRNA interference, a sense RNA molecule like that described above for cosuppression and an antisense RNA molecule that is fully or partially complementary to the sense RNA molecule are expressed in the same cell, resulting in inhibition of the expression of the corresponding endogenous messenger RNA.

[0141] Expression of the sense and antisense molecules can be accomplished by designing the expression cassette to comprise both a sense sequence and an antisense sequence. Alternatively, separate expression cassettes may be used for the sense and antisense sequences. Multiple plant lines transformed with the dsRNA interference expression cassette or expression cassettes are then screened to identify plant lines that show the greatest inhibition of yield improvement polypeptide expression. Methods for using dsRNA interference to inhibit the expression of endogenous plant genes are described in Waterhouse, et al., (1998) Proc. Natl. Acad. Sci. USA 95:13959-13964, Liu, et al., (2002) Plant Physiol. 129:1732-1743 and WO 1999/49029, WO 1999/53050, WO 1999/61631 and WO 2000/49035, each of which is herein incorporated by reference.

[0142] iv. Hairpin RNA Interference and Intron-Containing Hairpin RNA Interference

[0143] In some embodiments of the disclosure, inhibition of the expression of one or a yield improvement polypeptide may be obtained by hairpin RNA (hpRNA) interference or intron-containing hairpin RNA (ihpRNA) interference. These methods are highly efficient at inhibiting the expression of endogenous genes. See, Waterhouse and Helliwell, (2003) Nat. Rev. Genet. 4:29-38 and the references cited therein.

[0144] For hpRNA interference, the expression cassette is designed to express an RNA molecule that hybridizes with itself to form a hairpin structure that comprises a single-stranded loop region and a base-paired stem. The base-paired stem region comprises a sense sequence corresponding to all or part of the endogenous messenger RNA encoding the gene whose expression is to be inhibited, and an antisense sequence that is fully or partially complementary to the sense sequence. Thus, the base-paired stem region of the molecule generally determines the specificity of the RNA interference. hpRNA molecules are highly efficient at inhibiting the expression of endogenous genes, and the RNA interference they induce is inherited by subsequent generations of plants. See, for example, Chuang and Meyerowitz, (2000) Proc. Natl. Acad. Sci. USA 97:4985-4990; Stoutjesdijk, et al., (2002) Plant Physiol. 129:1723-1731 and Waterhouse and Helliwell, (2003) Nat. Rev. Genet. 4:29-38. Methods for using hpRNA interference to inhibit or silence the expression of genes are described, for example, in Chuang and Meyerowitz, (2000) Proc. Natl. Acad. Sci. USA 97:4985-4990; Stoutjesdijk, et al., (2002) Plant Physiol. 129:1723-1731; Waterhouse and Helliwell, (2003) Nat. Rev. Genet. 4:29-38; Pandolfini, et al., BMC Biotechnology 3:7 and US Patent Application Publication Number 2003/0175965, each of which is herein incorporated by reference. A transient assay for the efficiency of hpRNA constructs to silence gene expression in vivo has been described by Panstruga, et al., (2003) Mol. Biol. Rep. 30:135-140, herein incorporated by reference.

[0145] For ihpRNA, the interfering molecules have the same general structure as for hpRNA, but the RNA molecule additionally comprises an intron that is capable of being spliced in the cell in which the ihpRNA is expressed. The use of an intron minimizes the size of the loop in the hairpin RNA molecule following splicing, and this increases the efficiency of interference. See, for example, Smith, et al., (2000) Nature 407:319-320. In fact, Smith, et al., show 100% suppression of endogenous gene expression using ihpRNA-mediated interference. Methods for using ihpRNA interference to inhibit the expression of endogenous plant genes are described, for example, in Smith, et al., (2000) Nature 407:319-320; Wesley, et al., (2001) Plant J. 27:581-590; Wang and Waterhouse, (2001) Curr. Opin. Plant Biol. 5:146-150; Waterhouse and Helliwell, (2003) Nat. Rev. Genet. 4:29-38; Helliwell and Waterhouse, (2003) Methods 30:289-295 and US Patent Application Publication Number 2003/0180945, each of which is herein incorporated by reference.

[0146] The expression cassette for hpRNA interference may also be designed such that the sense sequence and the antisense sequence do not correspond to an endogenous RNA. In this embodiment, the sense and antisense sequence flank a loop sequence that comprises a nucleotide sequence corresponding to all or part of the endogenous messenger RNA of the target gene. Thus, it is the loop region that determines the specificity of the RNA interference. See, for example, WO 2002/00904, herein incorporated by reference.

[0147] v. Amplicon-Mediated Interference

[0148] Amplicon expression cassettes comprise a plant virus-derived sequence that contains all or part of the target gene but generally not all of the genes of the native virus. The viral sequences present in the transcription product of the expression cassette allow the transcription product to direct its own replication. The transcripts produced by the amplicon may be either sense or antisense relative to the target sequence (i.e., the messenger RNA for the yield improvement polypeptide). Methods of using amplicons to inhibit the expression of endogenous plant genes are described, for example, in Angell and Baulcombe, (1997) EMBO J. 16:3675-3684, Angell and Baulcombe, (1999) Plant J. 20:357-362 and U.S. Pat. No. 6,646,805, each of which is herein incorporated by reference.

[0149] vi. Ribozymes

[0150] In some embodiments, the polynucleotide expressed by the expression cassette of the disclosure is catalytic RNA or has ribozyme activity specific for the messenger RNA of the yield improvement polypeptide. Thus, the polynucleotide causes the degradation of the endogenous messenger RNA, resulting in reduced expression of the yield improvement polypeptide. This method is described, for example, in U.S. Pat. No. 4,987,071, herein incorporated by reference.

[0151] vii. Small Interfering RNA or Micro RNA

[0152] In some embodiments of the disclosure, inhibition of the expression of a yield improvement polypeptide may be obtained by RNA interference by expression of a gene encoding a micro RNA (miRNA). miRNAs are regulatory agents consisting of about 22 ribonucleotides. miRNA are highly efficient at inhibiting the expression of endogenous genes. See, for example, Javier, et al., (2003) Nature 425:257-263, herein incorporated by reference.

[0153] For miRNA interference, the expression cassette is designed to express an RNA molecule that is modeled on an endogenous miRNA gene. The miRNA gene encodes an RNA that forms a hairpin structure containing a circa 22-nucleotide sequence that is complementary to another endogenous gene (target sequence). For suppression of yield improvement expression, the 22-nucleotide sequence is selected from a yield improvement transcript sequence and contains 22 nucleotides of said yield improvement sequence in sense orientation and 21 nucleotides of a corresponding antisense sequence that is complementary to the sense sequence. miRNA molecules are highly efficient at inhibiting the expression of endogenous genes and the RNA interference they induce is inherited by subsequent generations of plants.

[0154] 2. Polypeptide-Based Inhibition of Gene Expression

[0155] In one embodiment, the polynucleotide encodes a zinc finger protein that binds to a gene encoding a yield improvement polypeptide, resulting in reduced expression of the gene. In particular embodiments, the zinc finger protein binds to a regulatory region of a yield improvement gene. In other embodiments, the zinc finger protein binds to a messenger RNA encoding a yield improvement polypeptide and prevents its translation. Methods of selecting sites for targeting by zinc finger proteins have been described, for example, in U.S. Pat. No. 6,453,242, and methods for using zinc finger proteins to inhibit the expression of genes in plants are described, for example, in US Patent Application Publication Number 2003/0037355, each of which is herein incorporated by reference.

[0156] 3. Polypeptide-Based Inhibition of Protein Activity

[0157] In some embodiments of the disclosure, the polynucleotide encodes an antibody that binds to at least one yield improvement polypeptide and reduces the cell number regulator activity of the yield improvement polypeptide. In another embodiment, the binding of the antibody results in increased turnover of the antibody-yield improvement complex by cellular quality control mechanisms. The expression of antibodies in plant cells and the inhibition of molecular pathways by expression and binding of antibodies to proteins in plant cells are well known in the art. See, for example, Conrad and Sonnewald, (2003) Nature Biotech. 21:35-36, incorporated herein by reference.

[0158] 4. Gene Disruption

[0159] In some embodiments of the present disclosure, the activity of an yield improvement polypeptide is reduced or eliminated by disrupting the gene encoding the yield improvement polypeptide. The gene encoding the yield improvement polypeptide may be disrupted by any method known in the art. For example, in one embodiment, the gene is disrupted by transposon tagging. In another embodiment, the gene is disrupted by mutagenizing plants using random or targeted mutagenesis and selecting for plants that have reduced cell number regulator activity.

[0160] i. Transposon Tagging

[0161] In one embodiment of the disclosure, transposon tagging is used to reduce or eliminate the yield improvement activity of one or more yield improvement polypeptide. Transposon tagging comprises inserting a transposon within an endogenous yield improvement gene to reduce or eliminate expression of the yield improvement polypeptide. “yield improvement gene” is intended to mean the gene that encodes a yield improvement polypeptide according to the disclosure.

[0162] In this embodiment, the expression of one or more yield improvement polypeptide is reduced or eliminated by inserting a transposon within a regulatory region or coding region of the gene encoding the yield improvement polypeptide. A transposon that is within an exon, intron, 5′ or 3′ untranslated sequence, a promoter or any other regulatory sequence of a yield improvement gene may be used to reduce or eliminate the expression and/or activity of the encoded yield improvement polypeptide.

[0163] Methods for the transposon tagging of specific genes in plants are well known in the art. See, for example, Maes, et al., (1999) Trends Plant Sci. 4:90-96; Dharmapuri and Sonti, (1999) FEMS Microbiol. Lett. 179:53-59; Meissner, et al., (2000) Plant J. 22:265-274; Phogat, et al., (2000) J. Biosci. 25:57-63; Walbot, (2000) Curr. Opin. Plant Biol. 2:103-107; Gai, et al., (2000) Nucleic Acids Res. 28:94-96; Fitzmaurice, et al., (1999) Genetics 153:1919-1928). In addition, the TUSC process for selecting Mu insertions in selected genes has been described in Bensen, et al., (1995) Plant Cell 7:75-84; Mena, et al., (1996) Science 274:1537-1540 and U.S. Pat. No. 5,962,764, each of which is herein incorporated by reference.

[0164] ii. Mutant Plants with Reduced Activity

[0165] Additional methods for decreasing or eliminating the expression of endogenous genes in plants are also known in the art and can be similarly applied to the instant disclosure. These methods include other forms of mutagenesis, such as ethyl methanesulfonate-induced mutagenesis, deletion mutagenesis and fast neutron deletion mutagenesis used in a reverse genetics sense (with PCR) to identify plant lines in which the endogenous gene has been deleted. For examples of these methods see, Ohshima, et al., (1998) Virology 243:472-481; Okubara, et al., (1994) Genetics 137:867-874 and Quesada, et al., (2000) Genetics 154:421-436, each of which is herein incorporated by reference. In addition, a fast and automatable method for screening for chemically induced mutations, TILLING (Targeting Induced Local Lesions In Genomes), using denaturing HPLC or selective endonuclease digestion of selected PCR products is also applicable to the instant disclosure. See, McCallum, et al., (2000) Nat. Biotechnol. 18:455-457, herein incorporated by reference.

[0166] Mutations that impact gene expression or that interfere with the function (cell number regulator activity) of the encoded protein are well known in the art. Insertional mutations in gene exons usually result in null-mutants. Mutations in conserved residues are particularly effective in inhibiting the cell number regulator activity of the encoded protein. Conserved residues of nutrient update improvement polypeptides suitable for mutagenesis with the goal to eliminate cell number regulator activity have been described. Such mutants can be isolated according to well-known procedures, and mutations in different yield improvement loci can be stacked by genetic crossing. See, for example, Gruis, et al., (2002) Plant Cell 14:2863-2882.

[0167] In another embodiment of this disclosure, dominant mutants can be used to trigger RNA silencing due to gene inversion and recombination of a duplicated gene locus. See, for example, Kusaba, et al., (2003) Plant Cell 15:1455-1467.

[0168] The disclosure encompasses additional methods for reducing or eliminating the activity of one or more yield improvement polypeptide. Examples of other methods for altering or mutating a genomic nucleotide sequence in a plant are known in the art and include, but are not limited to, the use of RNA:DNA vectors, RNA:DNA mutational vectors, RNA:DNA repair vectors, mixed-duplex oligonucleotides, self-complementary RNA:DNA oligonucleotides and recombinogenic oligonucleobases. Such vectors and methods of use are known in the art. See, for example, U.S. Pat. Nos. 5,565,350; 5,731,181; 5,756,325; 5,760,012; 5,795,972 and 5,871,984, each of which are herein incorporated by reference. See also, WO 1998/49350, WO 1999/07865, WO 1999/25821 and Beetham, et al., (1999) Proc. Natl. Acad. Sci. USA 96:8774-8778, each of which is herein incorporated by reference.

[0169] iii. Modulating Plant Growth and/or Organ Development Activity

[0170] In specific methods, the level and/or activity of a cell number regulator in a plant is increased by increasing the level or activity of the yield improvement polypeptide in the plant. Methods for increasing the level and/or activity of yield improvement polypeptides in a plant are discussed elsewhere herein. Briefly, such methods comprise providing a yield improvement polypeptide of the disclosure to a plant and thereby increasing the level and/or activity of the yield improvement polypeptide. In other embodiments, an yield improvement nucleotide sequence encoding an yield improvement polypeptide can be provided by introducing into the plant a polynucleotide comprising an yield improvement nucleotide sequence of the disclosure, expressing the yield improvement sequence, increasing the activity of the yield improvement polypeptide and thereby increasing the number of tissue cells in the plant or plant part. In other embodiments, the yield improvement nucleotide construct introduced into the plant is stably incorporated into the genome of the plant.

[0171] In other methods, the number of cells and biomass of a plant tissue is increased by increasing the level and/or activity of the yield improvement polypeptide in the plant. Such methods are disclosed in detail elsewhere herein. In one such method, a yield improvement nucleotide sequence is introduced into the plant and expression of said yield improvement nucleotide sequence decreases the activity of the yield improvement polypeptide and thereby increasing the plant growth and/or organ development in the plant or plant part. In other embodiments, the yield improvement nucleotide construct introduced into the plant is stably incorporated into the genome of the plant.

[0172] As discussed above, one of skill will recognize the appropriate promoter to use to modulate the level/activity of a plant growth and/or organ development polynucleotide and polypeptide in the plant. Exemplary promoters for this embodiment have been disclosed elsewhere herein.

[0173] Accordingly, the present disclosure further provides plants having a modified plant growth and/or organ development when compared to the plant growth and/or organ development of a control plant tissue. In one embodiment, the plant of the disclosure has an increased level/activity of the yield improvement polypeptide of the disclosure and thus has increased plant growth and/or organ development in the plant tissue. In other embodiments, the plant of the disclosure has a reduced or eliminated level of the yield improvement polypeptide of the disclosure and thus has decreased plant growth and/or organ development in the plant tissue. In other embodiments, such plants have stably incorporated into their genome a nucleic acid molecule comprising a yield improvement nucleotide sequence of the disclosure operably linked to a promoter that drives expression in the plant cell.

[0174] iv. Modulating Root Development

[0175] Methods for modulating root development in a plant are provided. By “modulating root development” is intended any alteration in the development of the plant root when compared to a control plant. Such alterations in root development include, but are not limited to, alterations in the growth rate of the primary root, the fresh root weight, the extent of lateral and adventitious root formation, the vasculature system, meristem development or radial expansion.

[0176] Methods for modulating root development in a plant are provided. The methods comprise modulating the level and/or activity of the yield improvement polypeptide in the plant. In one method, a yield improvement sequence of the disclosure is provided to the plant. In another method, the yield improvement nucleotide sequence is provided by introducing into the plant a polynucleotide comprising a yield improvement nucleotide sequence of the disclosure, expressing the yield improvement sequence and thereby modifying root development. In still other methods, the yield improvement nucleotide construct introduced into the plant is stably incorporated into the genome of the plant.

[0177] In other methods, root development is modulated by altering the level or activity of the yield improvement polypeptide in the plant. An increase in yield improvement activity can result in at least one or more of the following alterations to root development, including, but not limited to, larger root meristems, increased in root growth, enhanced radial expansion, an enhanced vasculature system, increased root branching, more adventitious roots and/or an increase in fresh root weight when compared to a control plant.

[0178] As used herein, “root growth” encompasses all aspects of growth of the different parts that make up the root system at different stages of its development in both monocotyledonous and dicotyledonous plants. It is to be understood that enhanced root growth can result from enhanced growth of one or more of its parts including the primary root, lateral roots, adventitious roots, etc.

[0179] Methods of measuring such developmental alterations in the root system are known in the art. See, for example, US Patent Application Publication Number 2003/0074698 and Werner, et al., (2001) PNAS 18:10487-10492, both of which are herein incorporated by reference.

[0180] As discussed above, one of skill will recognize the appropriate promoter to use to modulate root development in the plant. Exemplary promoters for this embodiment include constitutive promoters and root-preferred promoters. Exemplary root-preferred promoters have been disclosed elsewhere herein.

[0181] Stimulating root growth and increasing root mass by increasing the activity and/or level of the yield improvement polypeptide also finds use in improving the standability of a plant. The term “resistance to lodging” or “standability” refers to the ability of a plant to fix itself to the soil. For plants with an erect or semi-erect growth habit, this term also refers to the ability to maintain an upright position under adverse (environmental) conditions. This trait relates to the size, depth and morphology of the root system. In addition, stimulating root growth and increasing root mass by increasing the level and/or activity of the yield improvement polypeptide also finds use in promoting in vitro propagation of explants.

[0182] Furthermore, higher root biomass production due to an increased level and/or activity of yield improvement activity has a direct effect on the yield and an indirect effect of production of compounds produced by root cells or transgenic root cells or cell cultures of said transgenic root cells. One example of an interesting compound produced in root cultures is shikonin, the yield of which can be advantageously enhanced by said methods.

[0183] Accordingly, the present disclosure further provides plants having modulated root development when compared to the root development of a control plant. In some embodiments, the plant of the disclosure has an increased level/activity of the yield improvement polypeptide of the disclosure and has enhanced root growth and/or root biomass. In other embodiments, such plants have stably incorporated into their genome a nucleic acid molecule comprising a yield improvement nucleotide sequence of the disclosure operably linked to a promoter that drives expression in the plant cell.

[0184] v. Modulating Shoot and Leaf Development

[0185] Methods are also provided for modulating shoot and leaf development in a plant. By “modulating shoot and/or leaf development” is intended any alteration in the development of the plant shoot and/or leaf. Such alterations in shoot and/or leaf development include, but are not limited to, alterations in shoot meristem development, in leaf number, leaf size, leaf and stem vasculature, internode length and leaf senescence. As used herein, “leaf development” and “shoot development” encompasses all aspects of growth of the different parts that make up the leaf system and the shoot system, respectively, at different stages of their development, both in monocotyledonous and dicotyledonous plants. Methods for measuring such developmental alterations in the shoot and leaf system are known in the art. See, for example, Werner, et al., (2001) PNAS 98:10487-10492 and US Patent Application Publication Number 2003/0074698, each of which is herein incorporated by reference.

[0186] The method for modulating shoot and/or leaf development in a plant comprises modulating the activity and/or level of a yield improvement polypeptide of the disclosure. In one embodiment, a yield improvement sequence of the disclosure is provided. In other embodiments, the yield improvement nucleotide sequence can be provided by introducing into the plant a polynucleotide comprising a yield improvement nucleotide sequence of the disclosure, expressing the yield improvement sequence, and thereby modifying shoot and/or leaf development. In other embodiments, the yield improvement nucleotide construct introduced into the plant is stably incorporated into the genome of the plant.

[0187] In specific embodiments, shoot or leaf development is modulated by decreasing the level and/or activity of the yield improvement polypeptide in the plant. An decrease in yield improvement activity can result in at least one or more of the following alterations in shoot and/or leaf development, including, but not limited to, reduced leaf number, reduced leaf surface, reduced vascular, shorter internodes and stunted growth and retarded leaf senescence, when compared to a control plant.

[0188] As discussed above, one of skill will recognize the appropriate promoter to use to modulate shoot and leaf development of the plant. Exemplary promoters for this embodiment include constitutive promoters, shoot-preferred promoters, shoot meristem-preferred promoters and leaf-preferred promoters. Exemplary promoters have been disclosed elsewhere herein.

[0189] Decreasing yield improvement activity and/or level in a plant results in shorter internodes and stunted growth. Thus, the methods of the disclosure find use in producing dwarf plants. In addition, as discussed above, modulations of yield improvement activity in the plant modulates both root and shoot growth. Thus, the present disclosure further provides methods for altering the root/shoot ratio. Shoot or leaf development can further be modulated by decreasing the level and/or activity of the yield improvement polypeptide in the plant.

[0190] Accordingly, the present disclosure further provides plants having modulated shoot and/or leaf development when compared to a control plant. In some embodiments, the plant of the disclosure has an increased level/activity of the yield improvement polypeptide of the disclosure, altering the shoot and/or leaf development. Such alterations include, but are not limited to, increased leaf number, increased leaf surface, increased vascularity, longer internodes and increased plant stature, as well as alterations in leaf senescence, as compared to a control plant. In other embodiments, the plant of the disclosure has a decreased level/activity of the yield improvement polypeptide of the disclosure.

[0191] vi Modulating Reproductive Tissue Development

[0192] Methods for modulating reproductive tissue development are provided. In one embodiment, methods are provided to modulate floral development in a plant. By “modulating floral development” is intended any alteration in a structure of a plant's reproductive tissue as compared to a control plant in which the activity or level of the yield improvement polypeptide has not been modulated. “Modulating floral development” further includes any alteration in the timing of the development of a plant's reproductive tissue (i.e., a delayed or an accelerated timing of floral development) when compared to a control plant in which the activity or level of the yield improvement polypeptide has not been modulated. Macroscopic alterations may include changes in size, shape, number or location of reproductive organs, the developmental time period that these structures form or the ability to maintain or proceed through the flowering process in times of environmental stress. Microscopic alterations may include changes to the types or shapes of cells that make up the reproductive organs.

[0193] The method for modulating floral development in a plant comprises modulating yield improvement activity in a plant. In one method, a yield improvement sequence of the disclosure is provided. A yield improvement nucleotide sequence can be provided by introducing into the plant a polynucleotide comprising a yield improvement nucleotide sequence of the disclosure, expressing the yield improvement sequence and thereby modifying floral development. In other embodiments, the yield improvement nucleotide construct introduced into the plant is stably incorporated into the genome of the plant.

[0194] In specific methods, floral development is modulated by decreasing the level or activity of the yield improvement polypeptide in the plant. A decrease in yield improvement activity can result in at least one or more of the following alterations in floral development, including, but not limited to, retarded flowering, reduced number of flowers, partial male sterility and reduced seed set, when compared to a control plant. Inducing delayed flowering or inhibiting flowering can be used to enhance yield in forage crops such as alfalfa. Methods for measuring such developmental alterations in floral development are known in the art. See, for example, Mouradov, et al., (2002) The Plant Cell S111-S130, herein incorporated by reference.

[0195] As discussed above, one of skill will recognize the appropriate promoter to use to modulate floral development of the plant. Exemplary promoters for this embodiment include constitutive promoters, inducible promoters, shoot-preferred promoters and inflorescence-preferred promoters.

[0196] In other methods, floral development is modulated by increasing the level and/or activity of the yield improvement sequence of the disclosure. Such methods can comprise introducing a yield improvement nucleotide sequence into the plant and increasing the activity of the yield improvement polypeptide. In other methods, the yield improvement nucleotide construct introduced into the plant is stably incorporated into the genome of the plant. Increasing expression of the yield improvement sequence of the disclosure can modulate floral development during periods of stress. Such methods are described elsewhere herein. Accordingly, the present disclosure further provides plants having modulated floral development when compared to the floral development of a control plant. Compositions include plants having an increased level/activity of the yield improvement polypeptide of the disclosure and having an altered floral development. Compositions also include plants having an increased level/activity of the yield improvement polypeptide of the disclosure wherein the plant maintains or proceeds through the flowering process in times of stress.

[0197] Methods are also provided for the use of the yield improvement sequences of the disclosure to increase seed size and/or weight. The method comprises increasing the activity of the yield improvement sequences in a plant or plant part, such as the seed. An increase in seed size and/or weight comprises an increased size or weight of the seed and/or an increase in the size or weight of one or more seed parts including, for example, the embryo, endosperm, seed coat, aleurone or cotyledon.

[0198] As discussed above, one of skill will recognize the appropriate promoter to use to increase seed size and/or seed weight. Exemplary promoters of this embodiment include constitutive promoters, inducible promoters, seed-preferred promoters, embryo-preferred promoters and endosperm-preferred promoters.

[0199] The method for decreasing seed size and/or seed weight in a plant comprises decreasing yield improvement activity in the plant. In one embodiment, the yield improvement nucleotide sequence can be provided by introducing into the plant a polynucleotide comprising a yield improvement nucleotide sequence of the disclosure, expressing the yield improvement sequence, and thereby decreasing seed weight and/or size. In other embodiments, the yield improvement nucleotide construct introduced into the plant is stably incorporated into the genome of the plant.

[0200] It is further recognized that increasing seed size and/or weight can also be accompanied by an increase in the speed of growth of seedlings or an increase in early vigor. As used herein, the term “early vigor” refers to the ability of a plant to grow rapidly during early development, and relates to the successful establishment, after germination, of a well-developed root system and a well-developed photosynthetic apparatus. In addition, an increase in seed size and/or weight can also result in an increase in nutrient update when compared to a control.

[0201] Accordingly, the present disclosure further provides plants having an increased seed weight and/or seed size when compared to a control plant. In other embodiments, plants having an increased vigor and nutrient update are also provided. In some embodiments, the plant of the disclosure has an increased level/activity of the yield improvement polypeptide of the disclosure and has an increased seed weight and/or seed size. In other embodiments, such plants have stably incorporated into their genome a nucleic acid molecule comprising a yield improvement nucleotide sequence of the disclosure operably linked to a promoter that drives expression in the plant cell.

[0202] vii. Method of Use for Yield Improvement Promoter Polynucleotides

[0203] The polynucleotides comprising the yield improvement promoters disclosed in the present disclosure, as well as variants and fragments thereof, are useful in the genetic manipulation of any host cell, preferably plant cell, when assembled with a DNA construct such that the promoter sequence is operably linked to a nucleotide sequence comprising a polynucleotide of interest. In this manner, the yield improvement promoter polynucleotides of the disclosure are provided in expression cassettes along with a polynucleotide sequence of interest for expression in the host cell of interest. As discussed in Example 2 below, the yield improvement promoter sequences of the disclosure are expressed in a variety of tissues and thus the promoter sequences can find use in regulating the temporal and/or the spatial expression of polynucleotides of interest.

[0204] Synthetic hybrid promoter regions are known in the art. Such regions comprise upstream promoter elements of one polynucleotide operably linked to the promoter element of another polynucleotide. In an embodiment of the disclosure, heterologous sequence expression is controlled by a synthetic hybrid promoter comprising the yield improvement promoter sequences of the disclosure, or a variant or fragment thereof, operably linked to upstream promoter element(s) from a heterologous promoter. Upstream promoter elements that are involved in the plant defense system have been identified and may be used to generate a synthetic promoter. See, for example, Rushton, et al., (1998) Curr. Opin. Plant Biol. 1:311-315. Alternatively, a synthetic yield improvement promoter sequence may comprise duplications of the upstream promoter elements found within the yield improvement promoter sequences.

[0205] It is recognized that the promoter sequence of the disclosure may be used with its native yield improvement coding sequences. A DNA construct comprising the yield improvement promoter operably linked with its native yield improvement gene may be used to transform any plant of interest to bring about a desired phenotypic change, such as modulating cell number, modulating root, shoot, leaf, floral and embryo development, stress tolerance and any other phenotype described elsewhere herein.

[0206] The promoter nucleotide sequences and methods disclosed herein are useful in regulating expression of any heterologous nucleotide sequence in a host plant in order to vary the phenotype of a plant. Various changes in phenotype are of interest including modifying the fatty acid composition in a plant, altering the amino acid content of a plant, altering a plant's pathogen defense mechanism, and the like. These results can be achieved by providing expression of heterologous products or increased expression of endogenous products in plants. Alternatively, the results can be achieved by providing for a reduction of expression of one or more endogenous products, particularly enzymes or cofactors in the plant. These changes result in a change in phenotype of the transformed plant.

[0207] Genes of interest are reflective of the commercial markets and interests of those involved in the development of the crop. Crops and markets of interest change, and as developing nations open up world markets, new crops and technologies will emerge also. In addition, as our understanding of agronomic traits and characteristics such as yield and heterosis increase, the choice of genes for transformation will change accordingly. General categories of genes of interest include, for example, those genes involved in information, such as zinc fingers, those involved in communication, such as kinases and those involved in housekeeping, such as heat shock proteins. More specific categories of transgenes, for example, include genes encoding important traits for agronomics, insect resistance, disease resistance, herbicide resistance, sterility, grain characteristics and commercial products. Genes of interest include, generally, those involved in oil, starch, carbohydrate or nutrient metabolism as well as those affecting kernel size, sucrose loading, and the like.

[0208] In certain embodiments the nucleic acid sequences of the present disclosure can be used in combination (“stacked”) with other polynucleotide sequences of interest in order to create plants with a desired phenotype. The combinations generated can include multiple copies of any one or more of the polynucleotides of interest. The polynucleotides of the present disclosure may be stacked with any gene or combination of genes to produce plants with a variety of desired trait combinations, including but not limited to traits desirable for animal feed such as high oil genes (e.g., U.S. Pat. No. 6,232,529); balanced amino acids (e.g., hordothionins (U.S. Pat. Nos. 5,990,389; 5,885,801; 5,885,802 and 5,703,409); barley high lysine (Williamson, et al., (1987) Eur. J. Biochem. 165:99-106 and WO 1998/20122) and high methionine proteins (Pedersen, et al., (1986) J. Biol. Chem. 261:6279; Kirihara, et al., (1988) Gene 71:359 and Musumura, et al., (1989) Plant Mol. Biol. 12:123)); increased digestibility (e.g., modified storage proteins (U.S. patent application Ser. No. 10/053,410, filed Nov. 7, 2001) and thioredoxins (U.S. patent application Ser. No. 10/005,429, filed Dec. 3, 2001)), the disclosures of which are herein incorporated by reference. The polynucleotides of the present disclosure can also be stacked with traits desirable for insect, disease or herbicide resistance (e.g., Bacillus thuringiensis toxic proteins (U.S. Pat. Nos. 5,366,892; 5,747,450; 5,737,514; 5,723,756; 5,593,881; Geiser, et al., (1986) Gene 48:109); lectins (Van Damme, et al., (1994) Plant Mol. Biol. 24:825); fumonisin detoxification genes (U.S. Pat. No. 5,792,931); avirulence and disease resistance genes (Jones, et al., (1994) Science 266:789; Martin, et al., (1993) Science 262:1432; Mindrinos, et al., (1994) Cell 78:1089); acetolactate synthase (ALS) mutants that lead to herbicide resistance such as the S4 and/or Hra mutations; inhibitors of glutamine synthase such as phosphinothricin or basta (e.g., bar gene) and glyphosate resistance (EPSPS gene)) and traits desirable for processing or process products such as high oil (e.g., U.S. Pat. No. 6,232,529); modified oils (e.g., fatty acid desaturase genes (U.S. Pat. No. 5,952,544; WO 94/11516)); modified starches (e.g., ADPG pyrophosphorylases (AGPase), starch synthases (SS), starch branching enzymes (SBE) and starch debranching enzymes (SDBE)) and polymers or bioplastics (e.g., U.S. Pat. No. 5,602,321; beta-ketothiolase, polyhydroxybutyrate synthase and acetoacetyl-CoA reductase (Schubert, et al., (1988) J. Bacteriol. 170:5837-5847) facilitate expression of polyhydroxyalkanoates (PHAs)), the disclosures of which are herein incorporated by reference. One could also combine the polynucleotides of the present disclosure with polynucleotides affecting agronomic traits such as male sterility (e.g., see, U.S. Pat. No. 5,583,210), stalk strength, flowering time or transformation technology traits such as cell cycle regulation or gene targeting (e.g., WO 1999/61619; WO 2000/17364; WO 1999/25821), the disclosures of which are herein incorporated by reference.

[0209] In one embodiment, sequences of interest improve plant growth and/or crop yields. For example, sequences of interest include agronomically important genes that result in improved primary or lateral root systems. Such genes include, but are not limited to, nutrient/water transporters and growth induces. Examples of such genes, include but are not limited to, maize plasma membrane H⁺-ATPase (MHA2) (Frias, et al., (1996) Plant Cell 8:1533-44); AKT1, a component of the potassium uptake apparatus in Arabidopsis, (Spalding, et al., (1999) J Gen Physiol 113:909-18); RML genes which activate cell division cycle in the root apical cells (Cheng, et al., (1995) Plant Physiol 108:881); maize glutamine synthetase genes (Sukanya, et al., (1994) Plant Mol Biol 26:1935-46) and hemoglobin (Duff, et al., (1997) J. Biol. Chem 27:16749-16752, Arredondo-Peter, et al., (1997) Plant Physiol. 115:1259-1266; Arredondo-Peter, et al., (1997) Plant Physiol 114:493-500, and references sited therein). The sequence of interest may also be useful in expressing antisense nucleotide sequences of genes that that negatively affects root development.

[0210] Additional, agronomically important traits such as oil, starch and protein content can be genetically altered in addition to using traditional breeding methods. Modifications include increasing content of oleic acid, saturated and unsaturated oils, increasing levels of lysine and sulfur, providing essential amino acids and also modification of starch. Hordothionin protein modifications are described in U.S. Pat. Nos. 5,703,049, 5,885,801, 5,885,802 and 5,990,389, herein incorporated by reference. Another example is lysine and/or sulfur rich seed protein encoded by the soybean 2S albumin described in U.S. Pat. No. 5,850,016 and the chymotrypsin inhibitor from barley, described in Williamson, et al., (1987) Eur. J. Biochem. 165:99-106, the disclosures of which are herein incorporated by reference.

[0211] Derivatives of the coding sequences can be made by site-directed mutagenesis to increase the level of preselected amino acids in the encoded polypeptide. For example, the gene encoding the barley high lysine polypeptide (BHL) is derived from barley chymotrypsin inhibitor, U.S. patent application Ser. No. 08/740,682, filed Nov. 1, 1996 and WO 1998/20133, the disclosures of which are herein incorporated by reference. Other proteins include methionine-rich plant proteins such as from sunflower seed (Lilley, et al., (1989) Proceedings of the World Congress on Vegetable Protein Utilization in Human Foods and Animal Feedstuffs, ed. Applewhite, (American Oil Chemists Society, Champaign, Ill.), pp. 497-502, herein incorporated by reference); corn (Pedersen, et al., (1986) J. Biol. Chem. 261:6279; Kirihara, et al., (1988) Gene 71:359, both of which are herein incorporated by reference) and rice (Musumura, et al., (1989) Plant Mol. Biol. 12:123, herein incorporated by reference). Other agronomically important genes encode latex, Floury 2, growth factors, seed storage factors and transcription factors.

[0212] Insect resistance genes may encode resistance to pests that have great yield drag such as rootworm, cutworm, European Corn Borer, and the like. Such genes include, for example, Bacillus thuringiensis toxic protein genes (U.S. Pat. No. 5,366,892; 5,747,450; 5,736,514; 5,723,756; 5,593,881 and Geiser, et al., (1986) Gene 48:109), and the like.

[0213] Genes encoding disease resistance traits include detoxification genes, such as against fumonosin (U.S. Pat. No. 5,792,931); avirulence (avr) and disease resistance (R) genes (Jones, et al., (1994) Science 266:789; Martin, et al., (1993) Science 262:1432 and Mindrinos, et al., (1994) Cell 78:1089), and the like.

[0214] Herbicide resistance traits may include genes coding for resistance to herbicides that act to inhibit the action of acetolactate synthase (ALS), in particular the sulfonylurea-type herbicides (e.g., the acetolactate synthase (ALS) gene containing mutations leading to such resistance, in particular the S4 and/or Hra mutations), genes coding for resistance to herbicides that act to inhibit action of glutamine synthase, such as phosphinothricin or basta (e.g., the bar gene) or other such genes known in the art. The bar gene encodes resistance to the herbicide basta, the nptII gene encodes resistance to the antibiotics kanamycin and geneticin and the ALS-gene mutants encode resistance to the herbicide chlorsulfuron.

[0215] Sterility genes can also be encoded in an expression cassette and provide an alternative to physical detasseling. Examples of genes used in such ways include male tissue-preferred genes and genes with male sterility phenotypes such as QM, described in U.S. Pat. No. 5,583,210. Other genes include kinases and those encoding compounds toxic to either male or female gametophytic development.

[0216] The quality of grain is reflected in traits such as levels and types of oils, saturated and unsaturated, quality and quantity of essential amino acids and levels of cellulose. In corn, modified hordothionin proteins are described in U.S. Pat. Nos. 5,703,049, 5,885,801, 5,885,802 and 5,990,389.

[0217] Commercial traits can also be encoded on a gene or genes that could increase for example, starch for ethanol production, or provide expression of proteins. Another important commercial use of transformed plants is the production of polymers and bioplastics such as described in U.S. Pat. No. 5,602,321. Genes such as β-Ketothiolase, PHBase (polyhydroxyburyrate synthase) and acetoacetyl-CoA reductase (see, Schubert, et al., (1988) J. Bacteriol. 170:5837-5847) facilitate expression of polyhyroxyalkanoates (PHAs).

[0218] Exogenous products include plant enzymes and products as well as those from other sources including procaryotes and other eukaryotes. Such products include enzymes, cofactors, hormones and the like. The level of proteins, particularly modified proteins having improved amino acid distribution to improve the nutrient value of the plant, can be increased. This is achieved by the expression of such proteins having enhanced amino acid content.

[0219] When referring to the relationship between two genetic elements, such as a genetic element contributing to tolerance and a proximal marker, “coupling” phase linkage indicates the state where the “favorable” allele at the tolerance locus is physically associated on the same chromosome strand as the “favorable” allele of the respective linked marker locus. In coupling phase, both favorable alleles are inherited together by progeny that inherit that chromosome strand. In “repulsion” phase linkage, the “favorable” allele at the locus of interest (e.g., a QTL for tolerance) is physically linked with an “unfavorable” allele at the proximal marker locus, and the two “favorable” alleles are not inherited together (i.e., the two loci are “out of phase” with each other).

[0220] “Linkage disequilibrium” generally refers to a phenomenon wherein alleles tend to remain together in linkage groups when segregating from parents to offspring, with a greater frequency than expected from their individual frequencies.

[0221] “Linkage group” generally refers to traits or markers that generally co-segregate. A linkage group generally corresponds to a chromosomal region containing genetic material that encodes the traits or markers. “Locus” refers to a segment of DNA.

[0222] A “map location,” “map position” or “relative map position” is an assigned location on a genetic map relative to linked genetic markers where a specified marker can be found within a given species. Map positions are generally provided in centimorgans. A “physical position” or “physical location” is the position, typically in nucleotide bases, of a particular nucleotide, such as a SNP nucleotide, on the chromosome.

[0223] “Mapping” is the process of defining the linkage relationships of loci through the use of genetic markers, populations segregating for the markers and standard genetic principles of recombination frequency.

[0224] “Marker” or “molecular marker” is a term used to denote a nucleic acid or amino acid sequence that is sufficiently unique to characterize a specific locus on the genome. Any detectible polymorphic trait can be used as a marker so long as it is inherited differentially and exhibits linkage disequilibrium with a phenotypic trait of interest. Each marker is an indicator of a specific segment of DNA, having a unique nucleotide sequence. The map positions provide a measure of the relative positions of particular markers with respect to one another. When a trait is stated to be linked to a given marker, it will be understood that the actual DNA segment whose sequence affects the trait generally co-segregates with the marker. More precise and definite localization of a trait can be obtained if markers are identified on both sides of the trait. By measuring the appearance of the marker(s) in progeny of crosses, the existence of the trait can be detected by relatively simple molecular tests without actually evaluating the appearance of the trait itself, which can be difficult and time-consuming because the actual evaluation of the trait requires growing plants to a stage and/or under environmental conditions where the trait can be expressed. Molecular markers have been widely used to determine genetic composition in crop plants. “Marker assisted selection” refers to the process of selecting a desired trait or traits in a plant or plants by detecting one or more nucleic acids from the plant, where the nucleic acid is linked to the desired trait, and then selecting the plant or germplasm possessing those one or more nucleic acids.

[0225] “Haplotype” generally refers to a combination of particular alleles present within a particular plant's genome at two or more linked marker loci, for instance at two or more loci on a particular linkage group.

[0226] “Polymorphism” means a change or difference between two related nucleic acids. A “nucleotide polymorphism” refers to a nucleotide that is different in one sequence when compared to a related sequence when the two nucleic acids are aligned for maximal correspondence.

[0227] “Quantitative trait loci” or “QTL” refer to the genetic elements controlling a quantitative trait.

[0228] Provided are markers and haplotypes associated with tolerance of abiotic to root-knot nematode, as well as related primers and/or probes and methods for the use of any of the foregoing for identifying and/or selecting soybean plants with improved tolerance to root-knot nematode. A method for determining the presence or absence of at least one allele of a particular marker or haplotype associated with tolerance to root-knot nematode comprises analyzing genomic DNA from a soybean plant or germplasm to determine if at least one, or a plurality, of such markers is present or absent and if present, determining the allelic form of the marker(s). If a plurality of markers on a single linkage group are investigated, this information regarding the markers present in the particular plant or germplasm can be used to determine a haplotype for that plant/germplasm.

[0229] This disclosure can be better understood by reference to the following non-limiting examples. It will be appreciated by those skilled in the art that other embodiments of the disclosure may be practiced without departing from the spirit and the scope of the disclosure as herein disclosed and claimed.

### EXAMPLES

### Example 1

### Identification of Sequences of Interest

[0230] A multi-faceted computational analysis was done to identify a set of genes that can improve crop yield. The yield enhancement may occur through various physiological avenues, but especially via drought tolerance or WUE efficiency. These genes comprised a set of 1703 genes. These genes were identified by analyses relying on multiple sets of profiling data, pathway-network curation and literature interpretation. Most of the genes hail from sorghum, which is known to be a drought tolerant crop and many have root or root-preferred expression. This work consisted of several substeps, including: Part_{—}1. Generate sorghum orthologs for genes already in the testing pipeline as well as newly nominated genes slated for that pipeline. Part_{—}2. Literature and Nominations. A set of genes from literature were identified, and also a complex search of proprietary software that intersects various genomic and genetic information was used to generate a subset of genes of interest. Part_{—}3. Sorghum Profiling Analyses, especially emphasizing sorghum genes that are stress/drought responsive where the maize orthologs are not. Part_{—}4. Sorghum orthologs to maize mRNA profiling results of a proprietary set of elite germplasm tested under well-watered and drought conditions where this set of genes correlated to yield performance. These were dubbed yield stability genes, with the stability being under drought. Part_{—}5. Root Hair Specific Set. As set of sorghum orthologs were identified to the Arabidopsis root hair formation genes. All the genes from parts 1-5 were gathered, sequence redundancy removed and they were further filtered by whether the ORF was complete and the degree of sorghum root preference in expression.

### Example 2

### Transgenic FAST Corn

[0231] Transgenic FAST Corn plants transformed with three sorghum genes expressed from the constitutive ubiquitin promoter from maize were subjected to a reproductive drought screen at the T1 generation. The three constructs, Sb09g004150, Sb03g011680 and Sb06g033870, were selected for the T1 reproductive drought evaluation based on phenomic data from T0 FAST Corn plants. TO phenotyping involves measurement of overall growth of the plant as well as measurement of yield components. T1 reproductive drought assay involves imposition of a chronic drought stress starting at the vegetative stage and continuing through to the flowering stage. The experiment is terminated prior to grain filling, at 8 days after silking and the reproductive parameters including ear area, ear length, ear width and silk count are determined.

[0232] Evaluation of TO plants of Sb09g004150 indicated that 3 out 10 tested events had statistically significant increase in ear area and maximum total plant area. At the construct level, several traits were statistically significant on the positive side, and these traits include ear area, ear length, ear width, maximum total plant area and seed number. In the T1 reproductive drought assay, 6 events were evaluated, and some parameters were positive and some negative amongst these events. T0 plants of Sb03g011680 showed significantly positive maximum total plant area for 2 of 10 events. T1 assay under drought for 6 events of this construct revealed two events with significantly improved ear area of which one had significantly increased ear length as well. In the case of Sb06g033870, 4 of 10 events evaluated at the T0 stage had significantly positive ear area and three had significantly positive seed number as well. At the construct level, ear area, ear length, maximum total plant area and seed number were all significantly positive. This construct, when tested in the T1 reproductive assay, showed one of six events with significantly positive ear area, ear length and silk count. The anthesis silking interval was significantly high for this event as well.

### Example 3

### Transformation and Regeneration of Transgenic Plants

[0233] Immature maize embryos from greenhouse donor plants are bombarded with a plasmid containing the sorghum uptake or stress tolerance sequence operably linked to the drought-inducible promoter RAB17 promoter (Vilardell, et al., (1990) Plant Mol Biol 14:423-432) and the selectable marker gene PAT, which confers resistance to the herbicide Bialaphos. Alternatively, the selectable marker gene is provided on a separate plasmid. Transformation is performed as follows. Media recipes follow below.

[0234] Preparation of Target Tissue:

[0235] The ears are husked and surface sterilized in 30% Clorox® bleach plus 0.5% Micro detergent for 20 minutes and rinsed two times with sterile water. The immature embryos are excised and placed embryo axis side down (scutellum side up), 25 embryos per plate, on 560Y medium for 4 hours and then aligned within the 2.5-cm target zone in preparation for bombardment.

[0236] Preparation of DNA:

[0237] A plasmid vector comprising the nutrient uptake/stress tolerance sequence operably linked to an ubiquitin promoter is made. This plasmid DNA plus plasmid DNA containing a PAT selectable marker is precipitated onto 1.1 μm (average diameter) tungsten pellets using a CaCl₂ precipitation procedure as follows:

[0238] 100 μl prepared tungsten particles in water

[0239] 10 μl (1 μg) DNA in Tris EDTA buffer (1 μg total DNA)

[0240] 100 μl 2.5 M CaCl₂

[0241] 10 μl 0.1 M spermidine

[0242] Each reagent is added sequentially to the tungsten particle suspension, while maintained on the multitube vortexer. The final mixture is sonicated briefly and allowed to incubate under constant vortexing for 10 minutes. After the precipitation period, the tubes are centrifuged briefly, liquid removed, washed with 500 ml 100% ethanol and centrifuged for 30 seconds. Again the liquid is removed and 105 μl 100% ethanol is added to the final tungsten particle pellet. For particle gun bombardment, the tungsten/DNA particles are briefly sonicated and 10 μl spotted onto the center of each macrocarrier and allowed to dry about 2 minutes before bombardment.

[0243] Particle Gun Treatment:

[0244] The sample plates are bombarded at level #4 in particle gun #HE34-1 or #HE34-2. All samples receive a single shot at 650 PSI, with a total of ten aliquots taken from each tube of prepared particles/DNA.

[0245] Subsequent Treatment:

[0246] Following bombardment, the embryos are kept on 560Y medium for 2 days, then transferred to 560R selection medium containing 3 mg/liter Bialaphos and subcultured every 2 weeks. After approximately 10 weeks of selection, selection-resistant callus clones are transferred to 288J medium to initiate plant regeneration. Following somatic embryo maturation (2-4 weeks), well-developed somatic embryos are transferred to medium for germination and transferred to the lighted culture room. Approximately 7-10 days later, developing plantlets are transferred to 272V hormone-free medium in tubes for 7-10 days until plantlets are well established. Plants are then transferred to inserts in flats (equivalent to 2.5″ pot) containing potting soil and grown for 1 week in a growth chamber, subsequently grown an additional 1-2 weeks in the greenhouse, then transferred to classic 600 pots (1.6 gallon) and grown to maturity. Plants are monitored and scored for increased abiotic stress. Assays to measure improved abiotic stress are routine in the art and include, for example, increased kernel-earring capacity yields under drought conditions when compared to control maize plants under identical environmental conditions. Alternatively, the transformed plants can be monitored for a modulation in meristem development (i.e., a decrease in spikelet formation on the ear). See, for example, Bruce, et al., (2002) Journal of Experimental Botany 53:1-13.

[0247] Bombardment and Culture Media:

[0248] Bombardment medium (560Y) comprises 4.0 g/l N6 basal salts (SIGMA C-1416), 1.0 ml/l Eriksson's Vitamin Mix (1000×SIGMA-1511), 0.5 mg/l thiamine HCl, 120.0 g/l sucrose, 1.0 mg/l 2,4-D and 2.88 g/l L-proline (brought to volume with D-I H₂O following adjustment to pH 5.8 with KOH); 2.0 g/l Gelrite® (added after bringing to volume with D-I H₂O) and 8.5 mg/l silver nitrate (added after sterilizing the medium and cooling to room temperature). Selection medium (560R) comprises 4.0 g/l N6 basal salts (SIGMA C-1416), 1.0 ml/l Eriksson's Vitamin Mix (1000×SIGMA-1511), 0.5 mg/l thiamine HCl, 30.0 g/l sucrose and 2.0 mg/l 2,4-D (brought to volume with D-I H₂O following adjustment to pH 5.8 with KOH); 3.0 g/l Gelrite® (added after bringing to volume with D-I H₂O) and 0.85 mg/l silver nitrate and 3.0 mg/l bialaphos (both added after sterilizing the medium and cooling to room temperature).

[0249] Plant regeneration medium (288J) comprises 4.3 g/l MS salts (GIBCO 11117-074), 5.0 ml/l MS vitamins stock solution (0.100 g nicotinic acid, 0.02 g/l thiamine HCL, 0.10 g/l pyridoxine HCL and 0.40 g/l glycine brought to volume with polished D-I H₂O) (Murashige and Skoog, (1962) Physiol. Plant. 15:473), 100 mg/l myo-inositol, 0.5 mg/l zeatin, 60 g/l sucrose and 1.0 ml/l of 0.1 mM abscisic acid (brought to volume with polished D-I H₂O after adjusting to pH 5.6); 3.0 g/l Gelrite® (added after bringing to volume with D-I H₂O) and 1.0 mg/l indoleacetic acid and 3.0 mg/l bialaphos (added after sterilizing the medium and cooling to 60° C.). Hormone-free medium (272V) comprises 4.3 g/l MS salts (GIBCO 11117-074), 5.0 ml/l MS vitamins stock solution (0.100 g/l nicotinic acid, 0.02 g/l thiamine HCL, 0.10 g/l pyridoxine HCL and 0.40 g/l glycine brought to volume with polished D-I H₂O), 0.1 g/l myo-inositol and 40.0 g/l sucrose (brought to volume with polished D-I H₂O after adjusting pH to 5.6) and 6 g/l Bacto™-agar (added after bringing to volume with polished D-I H₂O), sterilized and cooled to 60° C.

### Example 4

### Agrobacterium-Mediated Transformation

[0250] For Agrobacterium-mediated transformation of maize with an antisense sequence of the nutrient uptake/stress tolerance sequence of the present disclosure, preferably the method of Zhao is employed (U.S. Pat. No. 5,981,840 and PCT Patent Publication WO 1998/32326, the contents of which are hereby incorporated by reference). Briefly, immature embryos are isolated from maize and the embryos contacted with a suspension of Agrobacterium, where the bacteria are capable of transferring the sequence to at least one cell of at least one of the immature embryos (step 1: the infection step). In this step the immature embryos are preferably immersed in an Agrobacterium suspension for the initiation of inoculation. The embryos are co-cultured for a time with the Agrobacterium (step 2: the co-cultivation step). Preferably the immature embryos are cultured on solid medium following the infection step. Following this co-cultivation period an optional “resting” step is contemplated. In this resting step, the embryos are incubated in the presence of at least one antibiotic known to inhibit the growth of Agrobacterium without the addition of a selective agent for plant transformants (step 3: resting step). Preferably the immature embryos are cultured on solid medium with antibiotic, but without a selecting agent, for elimination of Agrobacterium and for a resting phase for the infected cells. Next, inoculated embryos are cultured on medium containing a selective agent and growing transformed callus is recovered (step 4: the selection step). Preferably, the immature embryos are cultured on solid medium with a selective agent resulting in the selective growth of transformed cells. The callus is then regenerated into plants (step 5: the regeneration step) and preferably calli grown on selective medium are cultured on solid medium to regenerate the plants. Plants are monitored and scored for a modulation in meristem development, for instance, alterations of size and appearance of the shoot and floral meristems and/or increased yields of leaves, flowers and/or fruits.

### Example 5

### Transgenic Maize Plants Overexpressing Sorghum Genes Showed Improved Ear Traits and Yield Components

[0251] Sorghum genomic clones (SEQ ID NOS: 3553, 3563, 3564, 3589, 3680, 4042, 4548, 4202, 4306, 4345, 4530, 4724, 4887, 4910) containing the corresponding 13 genes were isolated and each individual gene was transformed into maize plants. In the designed vector, transgene expression was driven by a constitutive maize ubiquitin promoter. TO plants overexpressing the transgenes were generated. Transgenic plants from multiple events were subjected to T1 reproductive assay under low nitrogen stress treatment (4 mM concentration). Multiple ear traits were collected from multiple events of the transgenic plants corresponding to these 13 genes, respectively. Compared to non-transgenic controls, the transgenic plants showed significant improvement in plant growth especially ear traits, such as ear length, ear width, ear area and silk number, which reflects the seed number potential per ear (Table 2, below). These data demonstrate the efficacy of these sorghum genes in improving yield components and potential yield of maize and under stressed condition of low nitrogen.

TABLE 2

| | Seq | | | | | |
|---|---|---|---|---|---|---|
| | ID | | Ear length | Ear width | Silk count | Stress |
| Gene Loc | NO | Ear area (cm²) | (cm) | (cm) | (no.) | type |
| Sb03g011680 | 3553 | 2/6 events sig | 2/6 events sig | 2/6 events | 2/6 events | NUE |
| | | increase up to | increase up to | sig increase | sig increase | and |
| | | 31% | 22% | up to 8% | up to 23% | Drought |
| Sb06g033870 | 3563 | 1/6 events sig | 1/6 events sig | 4/6 events; | 1/6 events | NUE |
| | | increase up to | increase up to | NS | sig increase | and |
| | | 24% | 18% | | up to 16% | Drought |
| Sb03g034260 | 3564 | 1/6 events sig | 3/6 events; NS | 3/6 events; | 6/6 events; | NUE |
| | | increase up to | | NS | NS | |
| | | 15% | | | | |
| Sb09g029110 | 3589 | 2/6 events sig | 2/6 events sig | 2/6 events | 2/6 events | NUE |
| | | increase up to | increase up to | sig increase | sig increase | |
| | | 32% | 18% | up to 11% | up to 32% | |
| Sb03g029150 | 3680 | 1/6 events sig | 4/6 events; NS | 1/6 events | 3/6 events; | NUE |
| | | increase up to | | sig increase | NS | |
| | | 16% | | up to 5% | | |
| Sb02g000230 | 4042 | 4/5 events; NS | 4/5 events; NS | 4/5 events; | 4/5 events; | NUE |
| | | | | NS | NS | |
| Sb04g034130 | 4548 | 1/6 events sig | 5/6 events; NS | 1/6 events | 1/6 events | NUE |
| | | increase up to | | sig increase | sig increase | |
| | | 18% | | up to 6% | up to 18% | |
| Sb02g041830 | 4202 | 2/3 events; NS | 2/3 events; NS | 2/3 events; | 2/3 events | NUE |
| | | | | NS | sig increase | |
| | | | | | up to 26% | |
| Sb03g027470 | 4306 | 6/6 events; NS | 1/6 events sig | 1/6 events | 1/6 events | NUE |
| | | | increase up | sig increase | sig increase | |
| | | | to 14% | up to 6% | up to 16% | |
| Sb03g034500 | 4345 | 2/3 events; NS | 2/3 events; NS | 2/3 events; | 3/3 events; | NUE |
| | | | | NS | NS | |
| Sb04g030895 | 4530 | 1/6 events sig | 1/6 events sig | 1/6 events | 3/6 events; | NUE |
| | | increase up to | increase up to | sig increase | NS | |
| | | 21% | 16% | up to 6% | | |
| Sb06g029070 | 4724 | 1/6 events sig | 2/6 events sig | 1/6 events | 1/6 events; | NUE |
| | | increase up to | increase up to | sig increase | NS | |
| | | 31% | 26% | up to 10% | | |
| Sb08g021630 | 4887 | 4/6 events; NS | 3/6 events; NS | 3/6 events; | 3/6 events; | NUE |
| | | | | NS | NS | |
| Sb09g004150 | 4910 | 4/6 events; NS | 4/6 events; NS | 2/6 events; | 1/6 events | Drought |
| | | | | NS | sig increase | |
| | | | | | up to 25% | |

NS - increase not significant
P < 0.10

### Example 6

### Soybean Embryo Transformation

[0252] Soybean embryos are bombarded with a plasmid containing nutrient uptake/stress tolerance sequence operably linked to an ubiquitin promoter as follows. To induce somatic embryos, cotyledons, 3-5 mm in length dissected from surface-sterilized, immature seeds of the soybean cultivar A2872, are cultured in the light or dark at 26° C. on an appropriate agar medium for six to ten weeks. Somatic embryos producing secondary embryos are then excised and placed into a suitable liquid medium. After repeated selection for clusters of somatic embryos that multiplied as early, globular-staged embryos, the suspensions are maintained as described below.

[0253] Soybean embryogenic suspension cultures can be maintained in 35 ml liquid media on a rotary shaker, 150 rpm, at 26° C. with florescent lights on a 16:8 hour day/night schedule. Cultures are subcultured every two weeks by inoculating approximately 35 mg of tissue into 35 ml of liquid medium.

[0254] Soybean embryogenic suspension cultures may then be transformed by the method of particle gun bombardment (Klein, et al., (1987) Nature (London) 327:70-73, U.S. Pat. No. 4,945,050). A Du Pont Biolistic PDS1000/HE instrument (helium retrofit) can be used for these transformations.

[0255] A selectable marker gene that can be used to facilitate soybean transformation is a transgene composed of the 35S promoter from Cauliflower Mosaic Virus (Odell, et al., (1985) Nature 313:810-812), the hygromycin phosphotransferase gene from plasmid pJR225 (from E. coli; Gritz, et al., (1983) Gene 25:179-188) and the 3′ region of the nopaline synthase gene from the T-DNA of the Ti plasmid of Agrobacterium tumefaciens. The expression cassette comprising nutrient uptake/stress tolerance sense sequence operably linked to the ubiquitin promoter can be isolated as a restriction fragment. This fragment can then be inserted into a unique restriction site of the vector carrying the marker gene.

[0256] To 50 μl of a 60 mg/ml 1 μm gold particle suspension is added (in order): 5 μl DNA (1 μg/μl), 20 μl spermidine (0.1 M), and 50 μl CaCl₂ (2.5 M). The particle preparation is then agitated for three minutes, spun in a microfuge for 10 seconds and the supernatant removed. The DNA-coated particles are then washed once in 400 μl 70% ethanol and resuspended in 40 μl of anhydrous ethanol. The DNA/particle suspension can be sonicated three times for one second each. Five microliters of the DNA-coated gold particles are then loaded on each macro carrier disk.

[0257] Approximately 300-400 mg of a two-week-old suspension culture is placed in an empty 60×15 mm petri dish and the residual liquid removed from the tissue with a pipette. For each transformation experiment, approximately 5-10 plates of tissue are normally bombarded. Membrane rupture pressure is set at 1100 psi, and the chamber is evacuated to a vacuum of 28 inches mercury. The tissue is placed approximately 3.5 inches away from the retaining screen and bombarded three times. Following bombardment, the tissue can be divided in half and placed back into liquid and cultured as described above.

[0258] Five to seven days post bombardment, the liquid media may be exchanged with fresh media, and eleven to twelve days post-bombardment with fresh media containing 50 mg/ml hygromycin. This selective media can be refreshed weekly. Seven to eight weeks post-bombardment, green, transformed tissue may be observed growing from untransformed, necrotic embryogenic clusters. Isolated green tissue is removed and inoculated into individual flasks to generate new, clonally propagated, transformed embryogenic suspension cultures. Each new line may be treated as an independent transformation event. These suspensions can then be subcultured and maintained as clusters of immature embryos or regenerated into whole plants by maturation and germination of individual somatic embryos.

### Example 7

### Sunflower Meristem Tissue Transformation

[0259] Sunflower meristem tissues are transformed with an expression cassette containing the nutrient uptake/stress tolerance sequence operably linked to a ubiquitin promoter as follows (see also, EP Patent Number 0 486233, herein incorporated by reference and Malone-Schoneberg, et al., (1994) Plant Science 103:199-207). Mature sunflower seed (Helianthus annuus L.) are dehulled using a single wheat-head thresher. Seeds are surface sterilized for 30 minutes in a 20% Clorox® bleach solution with the addition of two drops of Tween® 20 per 50 ml of solution. The seeds are rinsed twice with sterile distilled water.

[0260] Split embryonic axis explants are prepared by a modification of procedures described by Schrammeijer, et al., (Schrammeijer, et al., (1990) Plant Cell Rep. 9:55-60). Seeds are imbibed in distilled water for 60 minutes following the surface sterilization procedure. The cotyledons of each seed are then broken off, producing a clean fracture at the plane of the embryonic axis. Following excision of the root tip, the explants are bisected longitudinally between the primordial leaves. The two halves are placed, cut surface up, on GBA medium consisting of Murashige and Skoog mineral elements (Murashige, et al., (1962) Physiol. Plant., 15:473-497), Shepard's vitamin additions (Shepard, (1980) in Emergent Techniques for the Genetic Improvement of Crops (University of Minnesota Press, St. Paul, Minn.), 40 mg/l adenine sulfate, 30 g/l sucrose, 0.5 mg/l 6-benzyl-aminopurine (BAP), 0.25 mg/I indole-3-acetic acid (IAA), 0.1 mg/l gibberellic acid (GA₃), pH 5.6 and 8 g/l Phytagar.

[0261] The explants are subjected to microprojectile bombardment prior to Agrobacterium treatment (Bidney, et al., (1992) Plant Mol. Biol. 18:301-313). Thirty to forty explants are placed in a circle at the center of a 60×20 mm plate for this treatment. Approximately 4.7 mg of 1.8 mm tungsten microprojectiles are resuspended in 25 ml of sterile TE buffer (10 mM Tris HCl, 1 mM EDTA, pH 8.0) and 1.5 ml aliquots are used per bombardment. Each plate is bombarded twice through a 150 mm nytex screen placed 2 cm above the samples in a PDS 1000® particle acceleration device.

[0262] Disarmed Agrobacterium tumefaciens strain EHA105 is used in all transformation experiments. A binary plasmid vector comprising the expression cassette that contains the nutrient uptake/stress tolerance gene operably linked to the ubiquitin promoter is introduced into Agrobacterium strain EHA105 via freeze-thawing as described by Holsters, et al., (1978) Mol. Gen. Genet. 163:181-187. This plasmid further comprises a kanamycin selectable marker gene (i.e, nptII). Bacteria for plant transformation experiments are grown overnight (28° C. and 100 RPM continuous agitation) in liquid YEP medium (10 gm/l yeast extract, 10 gm/l Bacto® peptone and 5 gm/l NaCl, pH 7.0) with the appropriate antibiotics required for bacterial strain and binary plasmid maintenance. The suspension is used when it reaches an OD₆₀₀ of about 0.4 to 0.8. The Agrobacterium cells are pelleted and resuspended at a final OD₆₀₀ of 0.5 in an inoculation medium comprised of 12.5 mM MES pH 5.7, 1 gm/l NH₄Cl and 0.3 gm/l MgSO₄.

[0263] Freshly bombarded explants are placed in an Agrobacterium suspension, mixed, and left undisturbed for 30 minutes. The explants are then transferred to GBA medium and co-cultivated, cut surface down, at 26° C. and 18-hour days. After three days of co-cultivation, the explants are transferred to 374B (GBA medium lacking growth regulators and a reduced sucrose level of 1%) supplemented with 250 mg/l cefotaxime and 50 mg/l kanamycin sulfate. The explants are cultured for two to five weeks on selection and then transferred to fresh 374B medium lacking kanamycin for one to two weeks of continued development. Explants with differentiating, antibiotic-resistant areas of growth that have not produced shoots suitable for excision are transferred to GBA medium containing 250 mg/l cefotaxime for a second 3-day phytohormone treatment. Leaf samples from green, kanamycin-resistant shoots are assayed for the presence of NPTII by ELISA and for the presence of transgene expression by assaying for a modulation in meristem development (i.e., an alteration of size and appearance of shoot and floral meristems).

[0264] NPTII-positive shoots are grafted to Pioneer® hybrid 6440 in vitro-grown sunflower seedling rootstock. Surface sterilized seeds are germinated in 48-0 medium (half-strength Murashige and Skoog salts, 0.5% sucrose, 0.3% Gelrite®, pH 5.6) and grown under conditions described for explant culture. The upper portion of the seedling is removed, a 1 cm vertical slice is made in the hypocotyl, and the transformed shoot inserted into the cut. The entire area is wrapped with Parafilm® to secure the shoot. Grafted plants can be transferred to soil following one week of in vitro culture. Grafts in soil are maintained under high humidity conditions followed by a slow acclimatization to the greenhouse environment. Transformed sectors of T₀ plants (parental generation) maturing in the greenhouse are identified by NPTII ELISA and/or by nutrient uptake/stress tolerance activity analysis of leaf extracts while transgenic seeds harvested from NPTII-positive T₀ plants are identified by nutrient uptake/stress tolerance activity analysis of small portions of dry seed cotyledon.

[0265] An alternative sunflower transformation protocol allows the recovery of transgenic progeny without the use of chemical selection pressure. Seeds are dehulled and surface-sterilized for 20 minutes in a 20% Clorox® bleach solution with the addition of two to three drops of Tween® 20 per 100 ml of solution, then rinsed three times with distilled water. Sterilized seeds are imbibed in the dark at 26° C. for 20 hours on filter paper moistened with water. The cotyledons and root radical are removed, and the meristem explants are cultured on 374E (GBA medium consisting of MS salts, Shepard vitamins, 40 mg/l adenine sulfate, 3% sucrose, 0.5 mg/l 6-BAP, 0.25 mg/l IAA, 0.1 mg/l GA, and 0.8% Phytagar at pH 5.6) for 24 hours under the dark. The primary leaves are removed to expose the apical meristem, around 40 explants are placed with the apical dome facing upward in a 2 cm circle in the center of 374M (GBA medium with 1.2% Phytagar) and then cultured on the medium for 24 hours in the dark.

[0266] Approximately 18.8 mg of 1.8 μm tungsten particles are resuspended in 150 μl absolute ethanol. After sonication, 8 μl of it is dropped on the center of the surface of macrocarrier. Each plate is bombarded twice with 650 psi rupture discs in the first shelf at 26 mm of Hg helium gun vacuum.

[0267] The plasmid of interest is introduced into Agrobacterium tumefaciens strain EHA105 via freeze thawing as described previously. The pellet of overnight-grown bacteria at 28° C. in a liquid YEP medium (10 g/l yeast extract, 10 g/l Bacto® peptone and 5 g/l NaCl, pH 7.0) in the presence of 50 μg/l kanamycin is resuspended in an inoculation medium (12.5 mM 2-mM 2-(N-morpholino) ethanesulfonic acid, MES, 1 g/l NH₄CI and 0.3 g/l MgSO₄ at pH 5.7) to reach a final concentration of 4.0 at OD 600. Particle-bombarded explants are transferred to GBA medium (374E) and a droplet of bacteria suspension is placed directly onto the top of the meristem. The explants are co-cultivated on the medium for 4 days, after which the explants are transferred to 374C medium (GBA with 1% sucrose and no BAP, IAA, GA3 and supplemented with 250 μg/ml cefotaxime). The plantlets are cultured on the medium for about two weeks under 16-hour day and 26° C. incubation conditions.

[0268] Explants (around 2 cm long) from two weeks of culture in 374C medium are screened for a modulation in meristem development (i.e., an alteration of size and appearance of shoot and floral meristems). After positive (i.e., a change in nutrient uptake/stress tolerance expression) explants are identified, those shoots that fail to exhibit an alteration in nutrient uptake/stress tolerance activity are discarded and every positive explant is subdivided into nodal explants. One nodal explant contains at least one potential node. The nodal segments are cultured on GBA medium for three to four days to promote the formation of auxiliary buds from each node. Then they are transferred to 374C medium and allowed to develop for an additional four weeks. Developing buds are separated and cultured for an additional four weeks on 374C medium. Pooled leaf samples from each newly recovered shoot are screened again by the appropriate protein activity assay. At this time, the positive shoots recovered from a single node will generally have been enriched in the transgenic sector detected in the initial assay prior to nodal culture.

[0269] Recovered shoots positive for altered nutrient uptake/stress tolerance expression are grafted to Pioneer hybrid 6440 in vitro-grown sunflower seedling rootstock. The rootstocks are prepared in the following manner. Seeds are dehulled and surface-sterilized for 20 minutes in a 20% Clorox® bleach solution with the addition of two to three drops of Tween® 20 per 100 ml of solution, and are rinsed three times with distilled water. The sterilized seeds are germinated on the filter moistened with water for three days, then they are transferred into 48 medium (half-strength MS salt, 0.5% sucrose, 0.3% Gelrite® pH 5.0) and grown at 26° C. under the dark for three days, then incubated at 16-hour-day culture conditions. The upper portion of selected seedling is removed, a vertical slice is made in each hypocotyl, and a transformed shoot is inserted into a V-cut. The cut area is wrapped with Parafilm®. After one week of culture on the medium, grafted plants are transferred to soil. In the first two weeks, they are maintained under high humidity conditions to acclimatize to a greenhouse environment.

### Example 8

### Abiotic Stress Screening of Transgenic Plants Expressing Sorghum Stress Tolerance Proteins

[0270] A qualitative drought screen was performed with plants over-expressing different sorghum stress tolerance genes under the control of different promoters. The soil is watered to saturation and then plants are grown under standard conditions (i.e., 16 hour light, 8 hour dark cycle; 22° C.; ˜60% relative humidity). No additional water is given.

[0271] Digital images of the plants are taken at the onset of visible drought stress symptoms. Images are taken once a day (at the same time of day), until the plants appear dessicated. Typically, four consecutive days of data is captured.

[0272] Color analysis is employed for identifying potential drought tolerant lines. Color analysis can be used to measure the increase in the percentage of leaf area that falls into a yellow color bin. Using hue, saturation and intensity data (“HSI”), the yellow color bin consists of hues 35 to 45.

[0273] Maintenance of leaf area is also used as another criterion for identifying potential drought tolerant lines, since Arabidopsis leaves wilt during drought stress. Maintenance of leaf area can be measured as reduction of rosette leaf area over time. Leaf area is measured in terms of the number of green pixels obtained using the LemnaTec imaging system. Transgenic and non-transgenic control plants are grown side by side in flats.

[0274] When wilting begins, images are taken for a number of days to monitor the wilting process. From these data wilting profiles are determined based on the green pixel counts obtained over four consecutive days for transgenic and accompanying control plants. The profile is selected from a series of measurements over the four day period that gives the largest degree of wilting.

[0275] The ability to withstand drought is measured by the tendency of transgenic plants to resist wilting compared to control plants.

[0276] Estimates of the leaf area of the Arabidopsis plants are obtained in terms of the number of green pixels. The data for each image is averaged to obtain estimates of mean and standard deviation for the green pixel counts for transgenic and non-transgenic control plants. Parameters for a noise function are obtained by straight line regression of the squared deviation versus the mean pixel count using data for all images in a batch. Error estimates for the mean pixel count data are calculated using the fit parameters for the noise function. The mean pixel counts for transgenic and control plants are summed to obtain an assessment of the overall leaf area for each image. The four-day interval with maximal wilting is obtained by selecting the interval that corresponds to the maximum difference in plant growth. The individual wilting responses of the transgenic and control plants are obtained by normalization of the data using the value of the green pixel count of the first day in the interval. The drought tolerance of the transgenic plant compared to the control plant is scored by summing the weighted difference between the wilting response of transgenic plants and control plants over day two to day four; the weights are estimated by propagating the error in the data. A positive drought tolerance score corresponds to a transgenic plant with slower wilting compared to the control plant. Significance of the difference in wilting response between transgenic and control plants is obtained from the weighted sum of the squared deviations.

[0277] Transgenic events with a significant delay in yellow color accumulation and/or with significant maintenance of rosette leaf area, when compared to the control are considered drought tolerant

### Example 9

### Variants of Sequences

[0278] A. Variant Nucleotide Sequences that do not Alter the Encoded Amino Acid Sequence

[0279] The nucleotide sequences are used to generate variant nucleotide sequences having the nucleotide sequence of the open reading frame with about 70%, 75%, 80%, 85%, 90% and 95% nucleotide sequence identity when compared to the starting unaltered ORF nucleotide sequence of the corresponding SEQ ID NO. These functional variants are generated using a standard codon table. While the nucleotide sequences of the variants are altered, the amino acid sequence encoded by the open reading frames does not change.

[0280] B. Variant Amino Acid Sequences of Polypeptides

[0281] Variant amino acid sequences of the polypeptides are generated. In this example, one amino acid is altered. Specifically, the open reading frames are reviewed to determine the appropriate amino acid alteration. The selection of the amino acid to change is made by consulting the protein alignment (with the other orthologs and other gene family members from various species). An amino acid is selected that is deemed not to be under high selection pressure (not highly conserved) and which is rather easily substituted by an amino acid with similar chemical characteristics (i.e., similar functional side-chain). Using a protein alignment, an appropriate amino acid can be changed. Once the targeted amino acid is identified, the procedure outlined in the following section C is followed. Variants having about 70%, 75%, 80%, 85%, 90% and 95% nucleic acid sequence identity are generated using this method.

[0282] C. Additional Variant Amino Acid Sequences of Polypeptides

[0283] In this example, artificial protein sequences are created having 80%, 85%, 90% and 95% identity relative to the reference protein sequence. This latter effort requires identifying conserved and variable regions and then the judicious application of an amino acid substitutions table. These parts will be discussed in more detail below.

[0284] Largely, the determination of which amino acid sequences are altered is made based on the conserved regions among protein or among the other polypeptides. Based on the sequence alignment, the various regions of the polypeptide that can likely be altered are represented in lower case letters, while the conserved regions are represented by capital letters. It is recognized that conservative substitutions can be made in the conserved regions below without altering function. In addition, one of skill will understand that functional variants of the sequence of the disclosure can have minor non-conserved amino acid alterations in the conserved domain.

[0285] Artificial protein sequences are then created that are different from the original in the intervals of 80-85%, 85-90%, 90-95% and 95-100% identity. Midpoints of these intervals are targeted, with liberal latitude of plus or minus 1%, for example. The amino acids substitutions will be effected by a custom Perl script. The substitution table is provided below in Table 3.

TABLE 3
Substitution Table

| | Strongly | | |
|---|---|---|---|
| | Similar and | Rank of | |
| | Optimal | Order to | |
| Amino Acid | Substitution | Change | Comment |
| I | L, V | 1 | 50:50 substitution |
| L | I, V | 2 | 50:50 substitution |
| V | I, L | 3 | 50:50 substitution |
| A | G | 4 | |
| G | A | 5 | |
| D | E | 6 | |
| E | D | 7 | |
| W | Y | 8 | |
| Y | W | 9 | |
| S | T | 10 | |
| T | S | 11 | |
| K | R | 12 | |
| R | K | 13 | |
| N | Q | 14 | |
| Q | N | 15 | |
| F | Y | 16 | |
| M | L | 17 | First methionine cannot change |
| H | | Na | No good substitutes |
| C | | Na | No good substitutes |
| P | | Na | No good substitutes |

[0286] First, any conserved amino acids in the protein that should not be changed is identified and “marked off” for insulation from the substitution. The start methionine will of course be added to this list automatically. Next, the changes are made.

[0287] H, C and P are not changed in any circumstance. The changes will occur with isoleucine first, sweeping N-terminal to C-terminal. Then leucine and so on down the list until the desired target it reached. Interim number substitutions can be made so as not to cause reversal of changes. The list is ordered 1-17, so start with as many isoleucine changes as needed before leucine and so on down to methionine. Clearly many amino acids will in this manner not need to be changed. L, I and V will involve a 50:50 substitution of the two alternate optimal substitutions.

[0288] The variant amino acid sequences are written as output. Perl script is used to calculate the percent identities. Using this procedure, variants of the polypeptides are generating having about 80%, 85%, 90% and 95% amino acid identity to the disclosed sequences.

[0289] All publications and patent applications in this specification are indicative of the level of ordinary skill in the art to which this disclosure pertains. All publications and patent applications are herein incorporated by reference to the same extent as if each individual publication or patent application was specifically and individually indicated by reference.

[0290] The disclosure has been described with reference to various specific and preferred embodiments and techniques. However, it should be understood that many variations and modifications may be made while remaining within the spirit and scope of the disclosure.

What is claimed is:

1. An isolated polynucleotide selected from the group consisting of:
a. a polynucleotide having at least 70% sequence identity, as determined by the GAP algorithm under default parameters, to the full length sequence of a polynucleotide selected from the group consisting of SEQ ID NOS: 1, 3, 5, 7, 9, 11, 13, 15, 17, 19, 21, 23, 25, 27, 29, 31, 33, 35, 37, 39, 41, 43, 45, 47, 49, 51, 53, 55, 57, 59, 61, 63, 65, 67, 69, 71, 73, 75, 77, 79, 81, 83, 85, 87, 89, 91, 93, 95, 97, 99, 101, 103, 105, 107, 109, 111, 113, 115, 117, 119, 121, 123, 125, 127, 129, 131, 133, 135, 137, 139, 141, 143, 145, 147, 149, 151, 153, 155, 157, 159, 161, 163, 165, 167, 169, 171, 173, 175, 177, 179, 181, 183, 185, 187, 189, 191, 193, 195, 197, 199, 201, 203, 205, 207, 209, 211, 213, 215, 217, 219, 221, 223, 225, 227, 229, 231, 233, 235, 237, 239, 241, 243, 245, 247, 249, 251, 253, 255, 257, 259, 261, 263, 265, 267, 269, 271, 273, 275, 277, 279, 281, 283, 285, 287, 289, 291, 293, 295, 297, 299, 301, 303, 305, 307, 309, 311, 313, 315, 317, 319, 321, 323, 325, 327, 329, 331, 333, 335, 337, 339, 341, 343, 345, 347, 349, 351, 353, 355, 357, 359, 361, 363, 365, 367, 369, 371, 373, 375, 377, 379, 381, 383, 385, 387, 389, 391, 393, 395, 397, 399, 401, 403, 405, 407, 409, 411, 413, 415, 417, 419, 421, 423, 425, 427, 429, 431, 433, 435, 437, 439, 441, 443, 445, 447, 449, 451, 453, 455, 457, 459, 461, 463, 465, 467, 469, 471, 473, 475, 477, 479, 481, 483, 485, 487, 489, 491, 493, 495, 497, 499, 501, 503, 505, 507, 509, 511, 513, 515, 517, 519, 521, 523, 525, 527, 529, 531, 533, 535, 537, 539, 541, 543, 545, 547, 549, 551, 553, 555, 557, 559, 561, 563, 565, 567, 569, 571, 573, 575, 577, 579, 581, 583, 585, 587, 589, 591, 593, 595, 597, 599, 601, 603, 605, 607, 609, 611, 613, 615, 617, 619, 621, 623, 625, 627, 629, 631, 633, 635, 637, 639, 641, 643, 645, 647, 649, 651, 653, 655, 657, 659, 661, 663, 665, 667, 669, 671, 673, 675, 677, 679, 681, 683, 685, 687, 689, 691, 693, 695, 697, 699, 701, 703, 705, 707, 709, 711, 713, 715, 717, 719, 721, 723, 725, 727, 729, 731, 733, 735, 737, 739, 741, 743, 745, 747, 749, 751, 753, 755, 757, 759, 761, 763, 765, 767, 769, 771, 773, 775, 777, 779, 781, 783, 785, 787, 789, 791, 793, 795, 797, 799, 801, 803, 805, 807, 809, 811, 813, 815, 817, 819, 821, 823, 825, 827, 829, 831, 833, 835, 837, 839, 841, 843, 845, 847, 849, 851, 853, 855, 857, 859, 861, 863, 865, 867, 869, 871, 873, 875, 877, 879, 881, 883, 885, 887, 889, 891, 893, 895, 897, 899, 901, 903, 905, 907, 909, 911, 913, 915, 917, 919, 921, 923, 925, 927, 929, 931, 933, 935, 937, 939, 941, 943, 945, 947, 949, 951, 953, 955, 957, 959, 961, 963, 965, 967, 969, 971, 973, 975, 977, 979, 981, 983, 985, 987, 989, 991, 993, 995, 997, 999, 1001, 1003, 1005, 1007, 1009, 1011, 1013, 1015, 1017, 1019, 1021, 1023, 1025, 1027, 1029, 1031, 1033, 1035, 1037, 1039, 1041, 1043, 1045, 1047, 1049, 1051, 1053, 1055, 1057, 1059, 1061, 1063, 1065, 1067, 1069, 1071, 1073, 1075, 1077, 1079, 1081, 1083, 1085, 1087, 1089, 1091, 1093, 1095, 1097, 1099, 1101, 1103, 1105, 1107, 1109, 1111, 1113, 1115, 1117, 1119, 1121, 1123, 1125, 1127, 1129, 1131, 1133, 1135, 1137, 1139, 1141, 1143, 1145, 1147, 1149, 1151, 1153, 1155, 1157, 1159, 1161, 1163, 1165, 1167, 1169, 1171, 1173, 1175, 1177, 1179, 1181, 1183, 1185, 1187, 1189, 1191, 1193, 1195, 1197, 1199, 1201, 1203, 1205, 1207, 1209, 1211, 1213, 1215, 1217, 1219, 1221, 1223, 1225, 1227, 1229, 1231, 1233, 1235, 1237, 1239, 1241, 1243, 1245, 1247, 1249, 1251, 1253, 1255, 1257, 1259, 1261, 1263, 1265, 1267, 1269, 1271, 1273, 1275, 1277, 1279, 1281, 1283, 1285, 1287, 1289, 1291, 1293, 1295, 1297, 1299, 1301, 1303, 1305, 1307, 1309, 1311, 1313, 1315, 1317, 1319, 1321, 1323, 1325, 1327, 1329, 1331, 1333, 1335, 1337, 1339, 1341, 1343, 1345, 1347, 1349, 1351, 1353, 1355, 1357, 1359, 1361, 1363, 1365, 1367, 1369, 1371, 1373, 1375, 1377, 1379, 1381, 1383, 1385, 1387, 1389, 1391, 1393, 1395, 1397, 1399, 1401, 1403, 1405, 1407, 1409, 1411, 1413, 1415, 1417, 1419, 1421, 1423, 1425, 1427, 1429, 1431, 1433, 1435, 1437, 1439, 1441, 1443, 1445, 1447, 1449, 1451, 1453, 1455, 1457, 1459, 1461, 1463, 1465, 1467, 1469, 1471, 1473, 1475, 1477, 1479, 1481, 1483, 1485, 1487, 1489, 1491, 1493, 1495, 1497, 1499, 1501, 1503, 1505, 1507, 1509, 1511, 1513, 1515, 1517, 1519, 1521, 1523, 1525, 1527, 1529, 1531, 1533, 1535, 1537, 1539, 1541, 1543, 1545, 1547, 1549, 1551, 1553, 1555, 1557, 1559, 1561, 1563, 1565, 1567, 1569, 1571, 1573, 1575, 1577, 1579, 1581, 1583, 1585, 1587, 1589, 1591, 1593, 1595, 1597, 1599, 1601, 1603, 1605, 1607, 1609, 1611, 1613, 1615, 1617, 1619, 1621, 1623, 1625, 1627, 1629, 1631, 1633, 1635, 1637, 1639, 1641, 1643, 1645, 1647, 1649, 1651, 1653, 1655, 1657, 1659, 1661, 1663, 1665, 1667, 1669, 1671, 1673, 1675, 1677, 1679, 1681, 1683, 1685, 1687, 1689, 1691, 1693, 1695, 1697, 1699, 1701, 1703, 1705, 1707, 1709, 1711, 1713, 1715, 1717, 1719, 1721, 1723, 1725, 1727, 1729, 1731, 1733, 1735, 1737, 1739, 1741, 1743, 1745, 1747, 1749, 1751, 1753, 1755, 1757, 1759, 1761, 1763, 1765, 1767, 1769, 1771, 1773, 1775, 1777, 1779, 1781, 1783, 1785, 1787, 1789, 1791, 1793, 1795, 1797, 1799, 1801, 1803, 1805, 1807, 1809, 1811, 1813, 1815, 1817, 1819, 1821, 1823, 1825, 1827, 1829, 1831, 1833, 1835, 1837, 1839, 1841, 1843, 1845, 1847, 1849, 1851, 1853, 1855, 1857, 1859, 1861, 1863, 1865, 1867, 1869, 1871, 1873, 1875, 1877, 1879, 1881, 1883, 1885, 1887, 1889, 1891, 1893, 1895, 1897, 1899, 1901, 1903, 1905, 1907, 1909, 1911, 1913, 1915, 1917, 1919, 1921, 1923, 1925, 1927, 1929, 1931, 1933, 1935, 1937, 1939, 1941, 1943, 1945, 1947, 1949, 1951, 1953, 1955, 1957, 1959, 1961, 1963, 1965, 1967, 1969, 1971, 1973, 1975, 1977, 1979, 1981, 1983, 1985, 1987, 1989, 1991, 1993, 1995, 1997, 1999, 2001, 2003, 2005, 2007, 2009, 2011, 2013, 2015, 2017, 2019, 2021, 2023, 2025, 2027, 2029, 2031, 2033, 2035, 2037, 2039, 2041, 2043, 2045, 2047, 2049, 2051, 2053, 2055, 2057, 2059, 2061, 2063, 2065, 2067, 2069, 2071, 2073, 2075, 2077, 2079, 2081, 2083, 2085, 2087, 2089, 2091, 2093, 2095, 2097, 2099, 2101, 2103, 2105, 2107, 2109, 2111, 2113, 2115, 2117, 2119, 2121, 2123, 2125, 2127, 2129, 2131, 2133, 2135, 2137, 2139, 2141, 2143, 2145, 2147, 2149, 2151, 2153, 2155, 2157, 2159, 2161, 2163, 2165, 2167, 2169, 2171, 2173, 2175, 2177, 2179, 2181, 2183, 2185, 2187, 2189, 2191, 2193, 2195, 2197, 2199, 2201, 2203, 2205, 2207, 2209, 2211, 2213, 2215, 2217, 2219, 2221, 2223, 2225, 2227, 2229, 2231, 2233, 2235, 2237, 2239, 2241, 2243, 2245, 2247, 2249, 2251, 2253, 2255, 2257, 2259, 2261, 2263, 2265, 2267, 2269, 2271, 2273, 2275, 2277, 2279, 2281, 2283, 2285, 2287, 2289, 2291, 2293, 2295, 2297, 2299, 2301, 2303, 2305, 2307, 2309, 2311, 2313, 2315, 2317, 2319, 2321, 2323, 2325, 2327, 2329, 2331, 2333, 2335, 2337, 2339, 2341, 2343, 2345, 2347, 2349, 2351, 2353, 2355, 2357, 2359, 2361, 2363, 2365, 2367, 2369, 2371, 2373, 2375, 2377, 2379, 2381, 2383, 2385, 2387, 2389, 2391, 2393, 2395, 2397, 2399, 2401, 2403, 2405, 2407, 2409, 2411, 2413, 2415, 2417, 2419, 2421, 2423, 2425, 2427, 2429, 2431, 2433, 2435, 2437, 2439, 2441, 2443, 2445, 2447, 2449, 2451, 2453, 2455, 2457, 2459, 2461, 2463, 2465, 2467, 2469, 2471, 2473, 2475, 2477, 2479, 2481, 2483, 2485, 2487, 2489, 2491, 2493, 2495, 2497, 2499, 2501, 2503, 2505, 2507, 2509, 2511, 2513, 2515, 2517, 2519, 2521, 2523, 2525, 2527, 2529, 2531, 2533, 2535, 2537, 2539, 2541, 2543, 2545, 2547, 2549, 2551, 2553, 2555, 2557, 2559, 2561, 2563, 2565, 2567, 2569, 2571, 2573, 2575, 2577, 2579, 2581, 2583, 2585, 2587, 2589, 2591, 2593, 2595, 2597, 2599, 2601, 2603, 2605, 2607, 2609, 2611, 2613, 2615, 2617, 2619, 2621, 2623, 2625, 2627, 2629, 2631, 2633, 2635, 2637, 2639, 2641, 2643, 2645, 2647, 2649, 2651, 2653, 2655, 2657, 2659, 2661, 2663, 2665, 2667, 2669, 2671, 2673, 2675, 2677, 2679, 2681, 2683, 2685, 2687, 2689, 2691, 2693, 2695, 2697, 2699, 2701, 2703, 2705, 2707, 2709, 2711, 2713, 2715, 2717, 2719, 2721, 2723, 2725, 2727, 2729, 2731, 2733, 2735, 2737, 2739, 2741, 2743, 2745, 2747, 2749, 2751, 2753, 2755, 2757, 2759, 2761, 2763, 2765, 2767, 2769, 2771, 2773, 2775, 2777, 2779, 2781, 2783, 2785, 2787, 2789, 2791, 2793, 2795, 2797, 2799, 2801, 2803, 2805, 2807, 2809, 2811, 2813, 2815, 2817, 2819, 2821, 2823, 2825, 2827, 2829, 2831, 2833, 2835, 2837, 2839, 2841, 2843, 2845, 2847, 2849, 2851, 2853, 2855, 2857, 2859, 2861, 2863, 2865, 2867, 2869, 2871, 2873, 2875, 2877, 2879, 2881, 2883, 2885, 2887, 2889, 2891, 2893, 2895, 2897, 2899, 2901, 2903, 2905, 2907, 2909, 2911, 2913, 2915, 2917, 2919, 2921, 2923, 2925, 2927, 2929, 2931, 2933, 2935, 2937, 2939, 2941, 2943, 2945, 2947, 2949, 2951, 2953, 2955, 2957, 2959, 2961, 2963, 2965, 2967, 2969, 2971, 2973, 2975, 2977, 2979, 2981, 2983, 2985, 2987, 2989, 2991, 2993, 2995, 2997, 2999, 3001, 3003, 3005, 3007, 3009, 3011, 3013, 3015, 3017, 3019, 3021, 3023, 3025, 3027, 3029, 3031, 3033, 3035, 3037, 3039, 3041, 3043, 3045, 3047, 3049, 3051, 3053, 3055, 3057, 3059, 3061, 3063, 3065, 3067, 3069, 3071, 3073, 3075, 3077, 3079, 3081, 3083, 3085, 3087, 3089, 3091, 3093, 3095, 3097, 3099, 3101, 3103, 3105, 3107, 3109, 3111, 3113, 3115, 3117, 3119, 3121, 3123, 3125, 3127, 3129, 3131, 3133, 3135, 3137, 3139, 3141, 3143, 3145, 3147, 3149, 3151, 3153, 3155, 3157, 3159, 3161, 3163, 3165, 3167, 3169, 3171, 3173, 3175, 3177, 3179, 3181, 3183, 3185, 3187, 3189, 3191, 3193, 3195, 3197, 3199, 3201, 3203, 3205, 3207, 3209, 3211, 3213, 3215, 3217, 3219, 3221, 3223, 3225, 3227, 3229, 3231, 3233, 3235, 3237, 3239, 3241, 3243, 3245, 3247, 3249, 3251, 3253, 3255, 3257, 3259, 3261, 3263, 3265, 3267, 3269, 3271, 3273, 3275, 3277, 3279, 3281, 3283, 3285, 3287, 3289, 3291, 3293, 3295, 3297, 3299, 3301, 3303, 3305, 3307, 3309, 3311, 3313, 3315, 3317, 3319, 3321, 3323, 3325, 3327, 3329, 3331, 3333, 3335, 3337, 3339, 3341, 3343, 3345, 3347, 3349, 3351, 3353, 3355, 3357, 3359, 3361, 3363, 3365, 3367, 3369, 3371, 3373, 3375, 3377, 3379, 3381, 3383, 3385, 3387, 3389, 3391, 3393, 3395, 3397, 3399, 3401, 3403 and 3404; wherein the polynucleotide encodes a polypeptide that functions as a modifier of nitrogen utilization efficiency;
b. a polynucleotide encoding a polypeptide that is at least 90% identical to the polypeptide selected from the group consisting of SEQ ID NO: 2, 4, 6, 8, 10, 12, 14, 16, 18, 20, 22, 24, 26, 28, 30, 32, 34, 36, 38, 40, 42, 44, 46, 48, 50, 52, 54, 56, 58, 60, 62, 64, 66, 68, 70, 72, 74, 76, 78, 80, 82, 84, 86, 88, 90, 92, 94, 96, 98, 100, 102, 104, 106, 108, 110, 112, 114, 116, 118, 120, 122, 124, 126, 128, 130, 132, 134, 136, 138, 140, 142, 144, 146, 148, 150, 152, 154, 156, 158, 160, 162, 164, 166, 168, 170, 172, 174, 176, 178, 180, 182, 184, 186, 188, 190, 192, 194, 196, 198, 200, 202, 204, 206, 208, 210, 212, 214, 216, 218, 220, 222, 224, 226, 228, 230, 232, 234, 236, 238, 240, 242, 244, 246, 248, 250, 252, 254, 256, 258, 260, 262, 264, 266, 268, 270, 272, 274, 276, 278, 280, 282, 284, 286, 288, 290, 292, 294, 296, 298, 300, 302, 304, 306, 308, 310, 312, 314, 316, 318, 320, 322, 324, 326, 328, 330, 332, 334, 336, 338, 340, 342, 344, 346, 348, 350, 352, 354, 356, 358, 360, 362, 364, 366, 368, 370, 372, 374, 376, 378, 380, 382, 384, 386, 388, 390, 392, 394, 396, 398, 400, 402, 404, 406, 408, 410, 412, 414, 416, 418, 420, 422, 424, 426, 428, 430, 432, 434, 436, 438, 440, 442, 444, 446, 448, 450, 452, 454, 456, 458, 460, 462, 464, 466, 468, 470, 472, 474, 476, 478, 480, 482, 484, 486, 488, 490, 492, 494, 496, 498, 500, 502, 504, 506, 508, 510, 512, 514, 516, 518, 520, 522, 524, 526, 528, 530, 532, 534, 536, 538, 540, 542, 544, 546, 548, 550, 552, 554, 556, 558, 560, 562, 564, 566, 568, 570, 572, 574, 576, 578, 580, 582, 584, 586, 588, 590, 592, 594, 596, 598, 600, 602, 604, 606, 608, 610, 612, 614, 616, 618, 620, 622, 624, 626, 628, 630, 632, 634, 636, 638, 640, 642, 644, 646, 648, 650, 652, 654, 656, 658, 660, 662, 664, 666, 668, 670, 672, 674, 676, 678, 680, 682, 684, 686, 688, 690, 692, 694, 696, 698, 700, 702, 704, 706, 708, 710, 712, 714, 716, 718, 720, 722, 724, 726, 728, 730, 732, 734, 736, 738, 740, 742, 744, 746, 748, 750, 752, 754, 756, 758, 760, 762, 764, 766, 768, 770, 772, 774, 776, 778, 780, 782, 784, 786, 788, 790, 792, 794, 796, 798, 800, 802, 804, 806, 808, 810, 812, 814, 816, 818, 820, 822, 824, 826, 828, 830, 832, 834, 836, 838, 840, 842, 844, 846, 848, 850, 852, 854, 856, 858, 860, 862, 864, 866, 868, 870, 872, 874, 876, 878, 880, 882, 884, 886, 888, 890, 892, 894, 896, 898, 900, 902, 904, 906, 908, 910, 912, 914, 916, 918, 920, 922, 924, 926, 928, 930, 932, 934, 936, 938, 940, 942, 944, 946, 948, 950, 952, 954, 956, 958, 960, 962, 964, 966, 968, 970, 972, 974, 976, 978, 980, 982, 984, 986, 988, 990, 992, 994, 996, 998, 1000, 1002, 1004, 1006, 1008, 1010, 1012, 1014, 1016, 1018, 1020, 1022, 1024, 1026, 1028, 1030, 1032, 1034, 1036, 1038, 1040, 1042, 1044, 1046, 1048, 1050, 1052, 1054, 1056, 1058, 1060, 1062, 1064, 1066, 1068, 1070, 1072, 1074, 1076, 1078, 1080, 1082, 1084, 1086, 1088, 1090, 1092, 1094, 1096, 1098, 1100, 1102, 1104, 1106, 1108, 1110, 1112, 1114, 1116, 1118, 1120, 1122, 1124, 1126, 1128, 1130, 1132, 1134, 1136, 1138, 1140, 1142, 1144, 1146, 1148, 1150, 1152, 1154, 1156, 1158, 1160, 1162, 1164, 1166, 1168, 1170, 1172, 1174, 1176, 1178, 1180, 1182, 1184, 1186, 1188, 1190, 1192, 1194, 1196, 1198, 1200, 1202, 1204, 1206, 1208, 1210, 1212, 1214, 1216, 1218, 1220, 1222, 1224, 1226, 1228, 1230, 1232, 1234, 1236, 1238, 1240, 1242, 1244, 1246, 1248, 1250, 1252, 1254, 1256, 1258, 1260, 1262, 1264, 1266, 1268, 1270, 1272, 1274, 1276, 1278, 1280, 1282, 1284, 1286, 1288, 1290, 1292, 1294, 1296, 1298, 1300, 1302, 1304, 1306, 1308, 1310, 1312, 1314, 1316, 1318, 1320, 1322, 1324, 1326, 1328, 1330, 1332, 1334, 1336, 1338, 1340, 1342, 1344, 1346, 1348, 1350, 1352, 1354, 1356, 1358, 1360, 1362, 1364, 1366, 1368, 1370, 1372, 1374, 1376, 1378, 1380, 1382, 1384, 1386, 1388, 1390, 1392, 1394, 1396, 1398, 1400, 1402, 1404, 1406, 1408, 1410, 1412, 1414, 1416, 1418, 1420, 1422, 1424, 1426, 1428, 1430, 1432, 1434, 1436, 1438, 1440, 1442, 1444, 1446, 1448, 1450, 1452, 1454, 1456, 1458, 1460, 1462, 1464, 1466, 1468, 1470, 1472, 1474, 1476, 1478, 1480, 1482, 1484, 1486, 1488, 1490, 1492, 1494, 1496, 1498, 1500, 1502, 1504, 1506, 1508, 1510, 1512, 1514, 1516, 1518, 1520, 1522, 1524, 1526, 1528, 1530, 1532, 1534, 1536, 1538, 1540, 1542, 1544, 1546, 1548, 1550, 1552, 1554, 1556, 1558, 1560, 1562, 1564, 1566, 1568, 1570, 1572, 1574, 1576, 1578, 1580, 1582, 1584, 1586, 1588, 1590, 1592, 1594, 1596, 1598, 1600, 1602, 1604, 1606, 1608, 1610, 1612, 1614, 1616, 1618, 1620, 1622, 1624, 1626, 1628, 1630, 1632, 1634, 1636, 1638, 1640, 1642, 1644, 1646, 1648, 1650, 1652, 1654, 1656, 1658, 1660, 1662, 1664, 1666, 1668, 1670, 1672, 1674, 1676, 1678, 1680, 1682, 1684, 1686, 1688, 1690, 1692, 1694, 1696, 1698, 1700, 1702, 1704, 1706, 1708, 1710, 1712, 1714, 1716, 1718, 1720, 1722, 1724, 1726, 1728, 1730, 1732, 1734, 1736, 1738, 1740, 1742, 1744, 1746, 1748, 1750, 1752, 1754, 1756, 1758, 1760, 1762, 1764, 1766, 1768, 1770, 1772, 1774, 1776, 1778, 1780, 1782, 1784, 1786, 1788, 1790, 1792, 1794, 1796, 1798, 1800, 1802, 1804, 1806, 1808, 1810, 1812, 1814, 1816, 1818, 1820, 1822, 1824, 1826, 1828, 1830, 1832, 1834, 1836, 1838, 1840, 1842, 1844, 1846, 1848, 1850, 1852, 1854, 1856, 1858, 1860, 1862, 1864, 1866, 1868, 1870, 1872, 1874, 1876, 1878, 1880, 1882, 1884, 1886, 1888, 1890, 1892, 1894, 1896, 1898, 1900, 1902, 1904, 1906, 1908, 1910, 1912, 1914, 1916, 1918, 1920, 1922, 1924, 1926, 1928, 1930, 1932, 1934, 1936, 1938, 1940, 1942, 1944, 1946, 1948, 1950, 1952, 1954, 1956, 1958, 1960, 1962, 1964, 1966, 1968, 1970, 1972, 1974, 1976, 1978, 1980, 1982, 1984, 1986, 1988, 1990, 1992, 1994, 1996, 1998, 2000, 2002, 2004, 2006, 2008, 2010, 2012, 2014, 2016, 2018, 2020, 2022, 2024, 2026, 2028, 2030, 2032, 2034, 2036, 2038, 2040, 2042, 2044, 2046, 2048, 2050, 2052, 2054, 2056, 2058, 2060, 2062, 2064, 2066, 2068, 2070, 2072, 2074, 2076, 2078, 2080, 2082, 2084, 2086, 2088, 2090, 2092, 2094, 2096, 2098, 2100, 2102, 2104, 2106, 2108, 2110, 2112, 2114, 2116, 2118, 2120, 2122, 2124, 2126, 2128, 2130, 2132, 2134, 2136, 2138, 2140, 2142, 2144, 2146, 2148, 2150, 2152, 2154, 2156, 2158, 2160, 2162, 2164, 2166, 2168, 2170, 2172, 2174, 2176, 2178, 2180, 2182, 2184, 2186, 2188, 2190, 2192, 2194, 2196, 2198, 2200, 2202, 2204, 2206, 2208, 2210, 2212, 2214, 2216, 2218, 2220, 2222, 2224, 2226, 2228, 2230, 2232, 2234, 2236, 2238, 2240, 2242, 2244, 2246, 2248, 2250, 2252, 2254, 2256, 2258, 2260, 2262, 2264, 2266, 2268, 2270, 2272, 2274, 2276, 2278, 2280, 2282, 2284, 2286, 2288, 2290, 2292, 2294, 2296, 2298, 2300, 2302, 2304, 2306, 2308, 2310, 2312, 2314, 2316, 2318, 2320, 2322, 2324, 2326, 2328, 2330, 2332, 2334, 2336, 2338, 2340, 2342, 2344, 2346, 2348, 2350, 2352, 2354, 2356, 2358, 2360, 2362, 2364, 2366, 2368, 2370, 2372, 2374, 2376, 2378, 2380, 2382, 2384, 2386, 2388, 2390, 2392, 2394, 2396, 2398, 2400, 2402, 2404, 2406, 2408, 2410, 2412, 2414, 2416, 2418, 2420, 2422, 2424, 2426, 2428, 2430, 2432, 2434, 2436, 2438, 2440, 2442, 2444, 2446, 2448, 2450, 2452, 2454, 2456, 2458, 2460, 2462, 2464, 2466, 2468, 2470, 2472, 2474, 2476, 2478, 2480, 2482, 2484, 2486, 2488, 2490, 2492, 2494, 2496, 2498, 2500, 2502, 2504, 2506, 2508, 2510, 2512, 2514, 2516, 2518, 2520, 2522, 2524, 2526, 2528, 2530, 2532, 2534, 2536, 2538, 2540, 2542, 2544, 2546, 2548, 2550, 2552, 2554, 2556, 2558, 2560, 2562, 2564, 2566, 2568, 2570, 2572, 2574, 2576, 2578, 2580, 2582, 2584, 2586, 2588, 2590, 2592, 2594, 2596, 2598, 2600, 2602, 2604, 2606, 2608, 2610, 2612, 2614, 2616, 2618, 2620, 2622, 2624, 2626, 2628, 2630, 2632, 2634, 2636, 2638, 2640, 2642, 2644, 2646, 2648, 2650, 2652, 2654, 2656, 2658, 2660, 2662, 2664, 2666, 2668, 2670, 2672, 2674, 2676, 2678, 2680, 2682, 2684, 2686, 2688, 2690, 2692, 2694, 2696, 2698, 2700, 2702, 2704, 2706, 2708, 2710, 2712, 2714, 2716, 2718, 2720, 2722, 2724, 2726, 2728, 2730, 2732, 2734, 2736, 2738, 2740, 2742, 2744, 2746, 2748, 2750, 2752, 2754, 2756, 2758, 2760, 2762, 2764, 2766, 2768, 2770, 2772, 2774, 2776, 2778, 2780, 2782, 2784, 2786, 2788, 2790, 2792, 2794, 2796, 2798, 2800, 2802, 2804, 2806, 2808, 2810, 2812, 2814, 2816, 2818, 2820, 2822, 2824, 2826, 2828, 2830, 2832, 2834, 2836, 2838, 2840, 2842, 2844, 2846, 2848, 2850, 2852, 2854, 2856, 2858, 2860, 2862, 2864, 2866, 2868, 2870, 2872, 2874, 2876, 2878, 2880, 2882, 2884, 2886, 2888, 2890, 2892, 2894, 2896, 2898, 2900, 2902, 2904, 2906, 2908, 2910, 2912, 2914, 2916, 2918, 2920, 2922, 2924, 2926, 2928, 2930, 2932, 2934, 2936, 2938, 2940, 2942, 2944, 2946, 2948, 2950, 2952, 2954, 2956, 2958, 2960, 2962, 2964, 2966, 2968, 2970, 2972, 2974, 2976, 2978, 2980, 2982, 2984, 2986, 2988, 2990, 2992, 2994, 2996, 2998, 3000, 3002, 3004, 3006, 3008, 3010, 3012, 3014, 3016, 3018, 3020, 3022, 3024, 3026, 3028, 3030, 3032, 3034, 3036, 3038, 3040, 3042, 3044, 3046, 3048, 3050, 3052, 3054, 3056, 3058, 3060, 3062, 3064, 3066, 3068, 3070, 3072, 3074, 3076, 3078, 3080, 3082, 3084, 3086, 3088, 3090, 3092, 3094, 3096, 3098, 3100, 3102, 3104, 3106, 3108, 3110, 3112, 3114, 3116, 3118, 3120, 3122, 3124, 3126, 3128, 3130, 3132, 3134, 3136, 3138, 3140, 3142, 3144, 3146, 3148, 3150, 3152, 3154, 3156, 3158, 3160, 3162, 3164, 3166, 3168, 3170, 3172, 3174, 3176, 3178, 3180, 3182, 3184, 3186, 3188, 3190, 3192, 3194, 3196, 3198, 3200, 3202, 3204, 3206, 3208, 3210, 3212, 3214, 3216, 3218, 3220, 3222, 3224, 3226, 3228, 3230, 3232, 3234, 3236, 3238, 3240, 3242, 3244, 3246, 3248, 3250, 3252, 3254, 3256, 3258, 3260, 3262, 3264, 3266, 3268, 3270, 3272, 3274, 3276, 3278, 3280, 3282, 3284, 3286, 3288, 3290, 3292, 3294, 3296, 3298, 3300, 3302, 3304, 3306, 3308, 3310, 3312, 3314, 3316, 3318, 3320, 3322, 3324, 3326, 3328, 3330, 3332, 3334, 3336, 3338, 3340, 3342, 3344, 3346, 3348, 3350, 3352, 3354, 3356, 3358, 3360, 3362, 3364, 3366, 3368, 3370, 3372, 3374, 3376, 3378, 3380, 3382, 3384, 3386, 3388, 3390, 3392, 3394, 3396, 3398, 3400, 3402;
c. a recombinant polynucleotide selected from the group consisting of SEQ ID NOS: 1, 3, 5, 7, 9, 11, 13, 15, 17, 19, 21, 23, 25, 27, 29, 31, 33, 35, 37, 39, 41, 43, 45, 47, 49, 51, 53, 55, 57, 59, 61, 63, 65, 67, 69, 71, 73, 75, 77, 79, 81, 83, 85, 87, 89, 91, 93, 95, 97, 99, 101, 103, 105, 107, 109, 111, 113, 115, 117, 119, 121, 123, 125, 127, 129, 131, 133, 135, 137, 139, 141, 143, 145, 147, 149, 151, 153, 155, 157, 159, 161, 163, 165, 167, 169, 171, 173, 175, 177, 179, 181, 183, 185, 187, 189, 191, 193, 195, 197, 199, 201, 203, 205, 207, 209, 211, 213, 215, 217, 219, 221, 223, 225, 227, 229, 231, 233, 235, 237, 239, 241, 243, 245, 247, 249, 251, 253, 255, 257, 259, 261, 263, 265, 267, 269, 271, 273, 275, 277, 279, 281, 283, 285, 287, 289, 291, 293, 295, 297, 299, 301, 303, 305, 307, 309, 311, 313, 315, 317, 319, 321, 323, 325, 327, 329, 331, 333, 335, 337, 339, 341, 343, 345, 347, 349, 351, 353, 355, 357, 359, 361, 363, 365, 367, 369, 371, 373, 375, 377, 379, 381, 383, 385, 387, 389, 391, 393, 395, 397, 399, 401, 403, 405, 407, 409, 411, 413, 415, 417, 419, 421, 423, 425, 427, 429, 431, 433, 435, 437, 439, 441, 443, 445, 447, 449, 451, 453, 455, 457, 459, 461, 463, 465, 467, 469, 471, 473, 475, 477, 479, 481, 483, 485, 487, 489, 491, 493, 495, 497, 499, 501, 503, 505, 507, 509, 511, 513, 515, 517, 519, 521, 523, 525, 527, 529, 531, 533, 535, 537, 539, 541, 543, 545, 547, 549, 551, 553, 555, 557, 559, 561, 563, 565, 567, 569, 571, 573, 575, 577, 579, 581, 583, 585, 587, 589, 591, 593, 595, 597, 599, 601, 603, 605, 607, 609, 611, 613, 615, 617, 619, 621, 623, 625, 627, 629, 631, 633, 635, 637, 639, 641, 643, 645, 647, 649, 651, 653, 655, 657, 659, 661, 663, 665, 667, 669, 671, 673, 675, 677, 679, 681, 683, 685, 687, 689, 691, 693, 695, 697, 699, 701, 703, 705, 707, 709, 711, 713, 715, 717, 719, 721, 723, 725, 727, 729, 731, 733, 735, 737, 739, 741, 743, 745, 747, 749, 751, 753, 755, 757, 759, 761, 763, 765, 767, 769, 771, 773, 775, 777, 779, 781, 783, 785, 787, 789, 791, 793, 795, 797, 799, 801, 803, 805, 807, 809, 811, 813, 815, 817, 819, 821, 823, 825, 827, 829, 831, 833, 835, 837, 839, 841, 843, 845, 847, 849, 851, 853, 855, 857, 859, 861, 863, 865, 867, 869, 871, 873, 875, 877, 879, 881, 883, 885, 887, 889, 891, 893, 895, 897, 899, 901, 903, 905, 907, 909, 911, 913, 915, 917, 919, 921, 923, 925, 927, 929, 931, 933, 935, 937, 939, 941, 943, 945, 947, 949, 951, 953, 955, 957, 959, 961, 963, 965, 967, 969, 971, 973, 975, 977, 979, 981, 983, 985, 987, 989, 991, 993, 995, 997, 999, 1001, 1003, 1005, 1007, 1009, 1011, 1013, 1015, 1017, 1019, 1021, 1023, 1025, 1027, 1029, 1031, 1033, 1035, 1037, 1039, 1041, 1043, 1045, 1047, 1049, 1051, 1053, 1055, 1057, 1059, 1061, 1063, 1065, 1067, 1069, 1071, 1073, 1075, 1077, 1079, 1081, 1083, 1085, 1087, 1089, 1091, 1093, 1095, 1097, 1099, 1101, 1103, 1105, 1107, 1109, 1111, 1113, 1115, 1117, 1119, 1121, 1123, 1125, 1127, 1129, 1131, 1133, 1135, 1137, 1139, 1141, 1143, 1145, 1147, 1149, 1151, 1153, 1155, 1157, 1159, 1161, 1163, 1165, 1167, 1169, 1171, 1173, 1175, 1177, 1179, 1181, 1183, 1185, 1187, 1189, 1191, 1193, 1195, 1197, 1199, 1201, 1203, 1205, 1207, 1209, 1211, 1213, 1215, 1217, 1219, 1221, 1223, 1225, 1227, 1229, 1231, 1233, 1235, 1237, 1239, 1241, 1243, 1245, 1247, 1249, 1251, 1253, 1255, 1257, 1259, 1261, 1263, 1265, 1267, 1269, 1271, 1273, 1275, 1277, 1279, 1281, 1283, 1285, 1287, 1289, 1291, 1293, 1295, 1297, 1299, 1301, 1303, 1305, 1307, 1309, 1311, 1313, 1315, 1317, 1319, 1321, 1323, 1325, 1327, 1329, 1331, 1333, 1335, 1337, 1339, 1341, 1343, 1345, 1347, 1349, 1351, 1353, 1355, 1357, 1359, 1361, 1363, 1365, 1367, 1369, 1371, 1373, 1375, 1377, 1379, 1381, 1383, 1385, 1387, 1389, 1391, 1393, 1395, 1397, 1399, 1401, 1403, 1405, 1407, 1409, 1411, 1413, 1415, 1417, 1419, 1421, 1423, 1425, 1427, 1429, 1431, 1433, 1435, 1437, 1439, 1441, 1443, 1445, 1447, 1449, 1451, 1453, 1455, 1457, 1459, 1461, 1463, 1465, 1467, 1469, 1471, 1473, 1475, 1477, 1479, 1481, 1483, 1485, 1487, 1489, 1491, 1493, 1495, 1497, 1499, 1501, 1503, 1505, 1507, 1509, 1511, 1513, 1515, 1517, 1519, 1521, 1523, 1525, 1527, 1529, 1531, 1533, 1535, 1537, 1539, 1541, 1543, 1545, 1547, 1549, 1551, 1553, 1555, 1557, 1559, 1561, 1563, 1565, 1567, 1569, 1571, 1573, 1575, 1577, 1579, 1581, 1583, 1585, 1587, 1589, 1591, 1593, 1595, 1597, 1599, 1601, 1603, 1605, 1607, 1609, 1611, 1613, 1615, 1617, 1619, 1621, 1623, 1625, 1627, 1629, 1631, 1633, 1635, 1637, 1639, 1641, 1643, 1645, 1647, 1649, 1651, 1653, 1655, 1657, 1659, 1661, 1663, 1665, 1667, 1669, 1671, 1673, 1675, 1677, 1679, 1681, 1683, 1685, 1687, 1689, 1691, 1693, 1695, 1697, 1699, 1701, 1703, 1705, 1707, 1709, 1711, 1713, 1715, 1717, 1719, 1721, 1723, 1725, 1727, 1729, 1731, 1733, 1735, 1737, 1739, 1741, 1743, 1745, 1747, 1749, 1751, 1753, 1755, 1757, 1759, 1761, 1763, 1765, 1767, 1769, 1771, 1773, 1775, 1777, 1779, 1781, 1783, 1785, 1787, 1789, 1791, 1793, 1795, 1797, 1799, 1801, 1803, 1805, 1807, 1809, 1811, 1813, 1815, 1817, 1819, 1821, 1823, 1825, 1827, 1829, 1831, 1833, 1835, 1837, 1839, 1841, 1843, 1845, 1847, 1849, 1851, 1853, 1855, 1857, 1859, 1861, 1863, 1865, 1867, 1869, 1871, 1873, 1875, 1877, 1879, 1881, 1883, 1885, 1887, 1889, 1891, 1893, 1895, 1897, 1899, 1901, 1903, 1905, 1907, 1909, 1911, 1913, 1915, 1917, 1919, 1921, 1923, 1925, 1927, 1929, 1931, 1933, 1935, 1937, 1939, 1941, 1943, 1945, 1947, 1949, 1951, 1953, 1955, 1957, 1959, 1961, 1963, 1965, 1967, 1969, 1971, 1973, 1975, 1977, 1979, 1981, 1983, 1985, 1987, 1989, 1991, 1993, 1995, 1997, 1999, 2001, 2003, 2005, 2007, 2009, 2011, 2013, 2015, 2017, 2019, 2021, 2023, 2025, 2027, 2029, 2031, 2033, 2035, 2037, 2039, 2041, 2043, 2045, 2047, 2049, 2051, 2053, 2055, 2057, 2059, 2061, 2063, 2065, 2067, 2069, 2071, 2073, 2075, 2077, 2079, 2081, 2083, 2085, 2087, 2089, 2091, 2093, 2095, 2097, 2099, 2101, 2103, 2105, 2107, 2109, 2111, 2113, 2115, 2117, 2119, 2121, 2123, 2125, 2127, 2129, 2131, 2133, 2135, 2137, 2139, 2141, 2143, 2145, 2147, 2149, 2151, 2153, 2155, 2157, 2159, 2161, 2163, 2165, 2167, 2169, 2171, 2173, 2175, 2177, 2179, 2181, 2183, 2185, 2187, 2189, 2191, 2193, 2195, 2197, 2199, 2201, 2203, 2205, 2207, 2209, 2211, 2213, 2215, 2217, 2219, 2221, 2223, 2225, 2227, 2229, 2231, 2233, 2235, 2237, 2239, 2241, 2243, 2245, 2247, 2249, 2251, 2253, 2255, 2257, 2259, 2261, 2263, 2265, 2267, 2269, 2271, 2273, 2275, 2277, 2279, 2281, 2283, 2285, 2287, 2289, 2291, 2293, 2295, 2297, 2299, 2301, 2303, 2305, 2307, 2309, 2311, 2313, 2315, 2317, 2319, 2321, 2323, 2325, 2327, 2329, 2331, 2333, 2335, 2337, 2339, 2341, 2343, 2345, 2347, 2349, 2351, 2353, 2355, 2357, 2359, 2361, 2363, 2365, 2367, 2369, 2371, 2373, 2375, 2377, 2379, 2381, 2383, 2385, 2387, 2389, 2391, 2393, 2395, 2397, 2399, 2401, 2403, 2405, 2407, 2409, 2411, 2413, 2415, 2417, 2419, 2421, 2423, 2425, 2427, 2429, 2431, 2433, 2435, 2437, 2439, 2441, 2443, 2445, 2447, 2449, 2451, 2453, 2455, 2457, 2459, 2461, 2463, 2465, 2467, 2469, 2471, 2473, 2475, 2477, 2479, 2481, 2483, 2485, 2487, 2489, 2491, 2493, 2495, 2497, 2499, 2501, 2503, 2505, 2507, 2509, 2511, 2513, 2515, 2517, 2519, 2521, 2523, 2525, 2527, 2529, 2531, 2533, 2535, 2537, 2539, 2541, 2543, 2545, 2547, 2549, 2551, 2553, 2555, 2557, 2559, 2561, 2563, 2565, 2567, 2569, 2571, 2573, 2575, 2577, 2579, 2581, 2583, 2585, 2587, 2589, 2591, 2593, 2595, 2597, 2599, 2601, 2603, 2605, 2607, 2609, 2611, 2613, 2615, 2617, 2619, 2621, 2623, 2625, 2627, 2629, 2631, 2633, 2635, 2637, 2639, 2641, 2643, 2645, 2647, 2649, 2651, 2653, 2655, 2657, 2659, 2661, 2663, 2665, 2667, 2669, 2671, 2673, 2675, 2677, 2679, 2681, 2683, 2685, 2687, 2689, 2691, 2693, 2695, 2697, 2699, 2701, 2703, 2705, 2707, 2709, 2711, 2713, 2715, 2717, 2719, 2721, 2723, 2725, 2727, 2729, 2731, 2733, 2735, 2737, 2739, 2741, 2743, 2745, 2747, 2749, 2751, 2753, 2755, 2757, 2759, 2761, 2763, 2765, 2767, 2769, 2771, 2773, 2775, 2777, 2779, 2781, 2783, 2785, 2787, 2789, 2791, 2793, 2795, 2797, 2799, 2801, 2803, 2805, 2807, 2809, 2811, 2813, 2815, 2817, 2819, 2821, 2823, 2825, 2827, 2829, 2831, 2833, 2835, 2837, 2839, 2841, 2843, 2845, 2847, 2849, 2851, 2853, 2855, 2857, 2859, 2861, 2863, 2865, 2867, 2869, 2871, 2873, 2875, 2877, 2879, 2881, 2883, 2885, 2887, 2889, 2891, 2893, 2895, 2897, 2899, 2901, 2903, 2905, 2907, 2909, 2911, 2913, 2915, 2917, 2919, 2921, 2923, 2925, 2927, 2929, 2931, 2933, 2935, 2937, 2939, 2941, 2943, 2945, 2947, 2949, 2951, 2953, 2955, 2957, 2959, 2961, 2963, 2965, 2967, 2969, 2971, 2973, 2975, 2977, 2979, 2981, 2983, 2985, 2987, 2989, 2991, 2993, 2995, 2997, 2999, 3001, 3003, 3005, 3007, 3009, 3011, 3013, 3015, 3017, 3019, 3021, 3023, 3025, 3027, 3029, 3031, 3033, 3035, 3037, 3039, 3041, 3043, 3045, 3047, 3049, 3051, 3053, 3055, 3057, 3059, 3061, 3063, 3065, 3067, 3069, 3071, 3073, 3075, 3077, 3079, 3081, 3083, 3085, 3087, 3089, 3091, 3093, 3095, 3097, 3099, 3101, 3103, 3105, 3107, 3109, 3111, 3113, 3115, 3117, 3119, 3121, 3123, 3125, 3127, 3129, 3131, 3133, 3135, 3137, 3139, 3141, 3143, 3145, 3147, 3149, 3151, 3153, 3155, 3157, 3159, 3161, 3163, 3165, 3167, 3169, 3171, 3173, 3175, 3177, 3179, 3181, 3183, 3185, 3187, 3189, 3191, 3193, 3195, 3197, 3199, 3201, 3203, 3205, 3207, 3209, 3211, 3213, 3215, 3217, 3219, 3221, 3223, 3225, 3227, 3229, 3231, 3233, 3235, 3237, 3239, 3241, 3243, 3245, 3247, 3249, 3251, 3253, 3255, 3257, 3259, 3261, 3263, 3265, 3267, 3269, 3271, 3273, 3275, 3277, 3279, 3281, 3283, 3285, 3287, 3289, 3291, 3293, 3295, 3297, 3299, 3301, 3303, 3305, 3307, 3309, 3311, 3313, 3315, 3317, 3319, 3321, 3323, 3325, 3327, 3329, 3331, 3333, 3335, 3337, 3339, 3341, 3343, 3345, 3347, 3349, 3351, 3353, 3355, 3357, 3359, 3361, 3363, 3365, 3367, 3369, 3371, 3373, 3375, 3377, 3379, 3381, 3383, 3385, 3387, 3389, 3391, 3393, 3395, 3397, 3399, 3401, 3403 and 3404; and
d. A polynucleotide which is complementary to the polynucleotide of (a), (b) or (c);
wherein the polynucleotide is operably linked, in sense or anti-sense orientation, to a promoter.

2. (canceled)

3. (canceled)

4. A transgenic plant comprising the recombinant expression cassette of claim 1.

5. (canceled)

6. (canceled)

7. (canceled)

8. A transgenic seed from the transgenic plant of claim 4.

9. A method of modulating nitrogen utilization efficiency in plants, comprising:
a. introducing into a plant cell a recombinant expression cassette comprising the polynucleotide of claim 1 operably linked to a promoter; and
b. culturing the plant under plant cell growing conditions; wherein the nitrogen utilization in said plant cell is modulated.

10. The method of claim 9, wherein the plant cell is from a plant selected from the group consisting of: maize, soybean, sunflower, sorghum, canola, wheat, alfalfa, cotton, rice, barley, millet, peanut and cocoa.

11. A method of modulating the nitrogen utilization efficiency in a plant, comprising:
a. introducing into a plant cell a recombinant expression cassette comprising the polynucleotide of claim 1 operably linked to a promoter;
b. culturing the plant cell under plant cell growing conditions; and
c. regenerating a plant form said plant cell; wherein the nitrogen utilization efficiency in said plant is modulated.

12. The method of claim 11, wherein the plant is selected from the group consisting of: maize, soybean, sorghum, canola, wheat, alfalfa, cotton, rice, barley, millet, peanut and cocoa.

13. A method of decreasing the NUE polypeptide activity in a plant cell, comprising:
a. providing a nucleotide sequence comprising at least 18 consecutive nucleotides of the complement of SEQ ID NOS: 1, 3, 5, 7, 9, 11, 13, 15, 17, 19, 21, 23, 25, 27, 29, 31, 33, 35, 37, 39, 41, 43, 45, 47, 49, 51, 53, 55, 57, 59, 61, 63, 65, 67, 69, 71, 73, 75, 77, 79, 81, 83, 85, 87, 89, 91, 93, 95, 97, 99, 101, 103, 105, 107, 109, 111, 113, 115, 117, 119, 121, 123, 125, 127, 129, 131, 133, 135, 137, 139, 141, 143, 145, 147, 149, 151, 153, 155, 157, 159, 161, 163, 165, 167, 169, 171, 173, 175, 177, 179, 181, 183, 185, 187, 189, 191, 193, 195, 197, 199, 201, 203, 205, 207, 209, 211, 213, 215, 217, 219, 221, 223, 225, 227, 229, 231, 233, 235, 237, 239, 241, 243, 245, 247, 249, 251, 253, 255, 257, 259, 261, 263, 265, 267, 269, 271, 273, 275, 277, 279, 281, 283, 285, 287, 289, 291, 293, 295, 297, 299, 301, 303, 305, 307, 309, 311, 313, 315, 317, 319, 321, 323, 325, 327, 329, 331, 333, 335, 337, 339, 341, 343, 345, 347, 349, 351, 353, 355, 357, 359, 361, 363, 365, 367, 369, 371, 373, 375, 377, 379, 381, 383, 385, 387, 389, 391, 393, 395, 397, 399, 401, 403, 405, 407, 409, 411, 413, 415, 417, 419, 421, 423, 425, 427, 429, 431, 433, 435, 437, 439, 441, 443, 445, 447, 449, 451, 453, 455, 457, 459, 461, 463, 465, 467, 469, 471, 473, 475, 477, 479, 481, 483, 485, 487, 489, 491, 493, 495, 497, 499, 501, 503, 505, 507, 509, 511, 513, 515, 517, 519, 521, 523, 525, 527, 529, 531, 533, 535, 537, 539, 541, 543, 545, 547, 549, 551, 553, 555, 557, 559, 561, 563, 565, 567, 569, 571, 573, 575, 577, 579, 581, 583, 585, 587, 589, 591, 593, 595, 597, 599, 601, 603, 605, 607, 609, 611, 613, 615, 617, 619, 621, 623, 625, 627, 629, 631, 633, 635, 637, 639, 641, 643, 645, 647, 649, 651, 653, 655, 657, 659, 661, 663, 665, 667, 669, 671, 673, 675, 677, 679, 681, 683, 685, 687, 689, 691, 693, 695, 697, 699, 701, 703, 705, 707, 709, 711, 713, 715, 717, 719, 721, 723, 725, 727, 729, 731, 733, 735, 737, 739, 741, 743, 745, 747, 749, 751, 753, 755, 757, 759, 761, 763, 765, 767, 769, 771, 773, 775, 777, 779, 781, 783, 785, 787, 789, 791, 793, 795, 797, 799, 801, 803, 805, 807, 809, 811, 813, 815, 817, 819, 821, 823, 825, 827, 829, 831, 833, 835, 837, 839, 841, 843, 845, 847, 849, 851, 853, 855, 857, 859, 861, 863, 865, 867, 869, 871, 873, 875, 877, 879, 881, 883, 885, 887, 889, 891, 893, 895, 897, 899, 901, 903, 905, 907, 909, 911, 913, 915, 917, 919, 921, 923, 925, 927, 929, 931, 933, 935, 937, 939, 941, 943, 945, 947, 949, 951, 953, 955, 957, 959, 961, 963, 965, 967, 969, 971, 973, 975, 977, 979, 981, 983, 985, 987, 989, 991, 993, 995, 997, 999, 1001, 1003, 1005, 1007, 1009, 1011, 1013, 1015, 1017, 1019, 1021, 1023, 1025, 1027, 1029, 1031, 1033, 1035, 1037, 1039, 1041, 1043, 1045, 1047, 1049, 1051, 1053, 1055, 1057, 1059, 1061, 1063, 1065, 1067, 1069, 1071, 1073, 1075, 1077, 1079, 1081, 1083, 1085, 1087, 1089, 1091, 1093, 1095, 1097, 1099, 1101, 1103, 1105, 1107, 1109, 1111, 1113, 1115, 1117, 1119, 1121, 1123, 1125, 1127, 1129, 1131, 1133, 1135, 1137, 1139, 1141, 1143, 1145, 1147, 1149, 1151, 1153, 1155, 1157, 1159, 1161, 1163, 1165, 1167, 1169, 1171, 1173, 1175, 1177, 1179, 1181, 1183, 1185, 1187, 1189, 1191, 1193, 1195, 1197, 1199, 1201, 1203, 1205, 1207, 1209, 1211, 1213, 1215, 1217, 1219, 1221, 1223, 1225, 1227, 1229, 1231, 1233, 1235, 1237, 1239, 1241, 1243, 1245, 1247, 1249, 1251, 1253, 1255, 1257, 1259, 1261, 1263, 1265, 1267, 1269, 1271, 1273, 1275, 1277, 1279, 1281, 1283, 1285, 1287, 1289, 1291, 1293, 1295, 1297, 1299, 1301, 1303, 1305, 1307, 1309, 1311, 1313, 1315, 1317, 1319, 1321, 1323, 1325, 1327, 1329, 1331, 1333, 1335, 1337, 1339, 1341, 1343, 1345, 1347, 1349, 1351, 1353, 1355, 1357, 1359, 1361, 1363, 1365, 1367, 1369, 1371, 1373, 1375, 1377, 1379, 1381, 1383, 1385, 1387, 1389, 1391, 1393, 1395, 1397, 1399, 1401, 1403, 1405, 1407, 1409, 1411, 1413, 1415, 1417, 1419, 1421, 1423, 1425, 1427, 1429, 1431, 1433, 1435, 1437, 1439, 1441, 1443, 1445, 1447, 1449, 1451, 1453, 1455, 1457, 1459, 1461, 1463, 1465, 1467, 1469, 1471, 1473, 1475, 1477, 1479, 1481, 1483, 1485, 1487, 1489, 1491, 1493, 1495, 1497, 1499, 1501, 1503, 1505, 1507, 1509, 1511, 1513, 1515, 1517, 1519, 1521, 1523, 1525, 1527, 1529, 1531, 1533, 1535, 1537, 1539, 1541, 1543, 1545, 1547, 1549, 1551, 1553, 1555, 1557, 1559, 1561, 1563, 1565, 1567, 1569, 1571, 1573, 1575, 1577, 1579, 1581, 1583, 1585, 1587, 1589, 1591, 1593, 1595, 1597, 1599, 1601, 1603, 1605, 1607, 1609, 1611, 1613, 1615, 1617, 1619, 1621, 1623, 1625, 1627, 1629, 1631, 1633, 1635, 1637, 1639, 1641, 1643, 1645, 1647, 1649, 1651, 1653, 1655, 1657, 1659, 1661, 1663, 1665, 1667, 1669, 1671, 1673, 1675, 1677, 1679, 1681, 1683, 1685, 1687, 1689, 1691, 1693, 1695, 1697, 1699, 1701, 1703, 1705, 1707, 1709, 1711, 1713, 1715, 1717, 1719, 1721, 1723, 1725, 1727, 1729, 1731, 1733, 1735, 1737, 1739, 1741, 1743, 1745, 1747, 1749, 1751, 1753, 1755, 1757, 1759, 1761, 1763, 1765, 1767, 1769, 1771, 1773, 1775, 1777, 1779, 1781, 1783, 1785, 1787, 1789, 1791, 1793, 1795, 1797, 1799, 1801, 1803, 1805, 1807, 1809, 1811, 1813, 1815, 1817, 1819, 1821, 1823, 1825, 1827, 1829, 1831, 1833, 1835, 1837, 1839, 1841, 1843, 1845, 1847, 1849, 1851, 1853, 1855, 1857, 1859, 1861, 1863, 1865, 1867, 1869, 1871, 1873, 1875, 1877, 1879, 1881, 1883, 1885, 1887, 1889, 1891, 1893, 1895, 1897, 1899, 1901, 1903, 1905, 1907, 1909, 1911, 1913, 1915, 1917, 1919, 1921, 1923, 1925, 1927, 1929, 1931, 1933, 1935, 1937, 1939, 1941, 1943, 1945, 1947, 1949, 1951, 1953, 1955, 1957, 1959, 1961, 1963, 1965, 1967, 1969, 1971, 1973, 1975, 1977, 1979, 1981, 1983, 1985, 1987, 1989, 1991, 1993, 1995, 1997, 1999, 2001, 2003, 2005, 2007, 2009, 2011, 2013, 2015, 2017, 2019, 2021, 2023, 2025, 2027, 2029, 2031, 2033, 2035, 2037, 2039, 2041, 2043, 2045, 2047, 2049, 2051, 2053, 2055, 2057, 2059, 2061, 2063, 2065, 2067, 2069, 2071, 2073, 2075, 2077, 2079, 2081, 2083, 2085, 2087, 2089, 2091, 2093, 2095, 2097, 2099, 2101, 2103, 2105, 2107, 2109, 2111, 2113, 2115, 2117, 2119, 2121, 2123, 2125, 2127, 2129, 2131, 2133, 2135, 2137, 2139, 2141, 2143, 2145, 2147, 2149, 2151, 2153, 2155, 2157, 2159, 2161, 2163, 2165, 2167, 2169, 2171, 2173, 2175, 2177, 2179, 2181, 2183, 2185, 2187, 2189, 2191, 2193, 2195, 2197, 2199, 2201, 2203, 2205, 2207, 2209, 2211, 2213, 2215, 2217, 2219, 2221, 2223, 2225, 2227, 2229, 2231, 2233, 2235, 2237, 2239, 2241, 2243, 2245, 2247, 2249, 2251, 2253, 2255, 2257, 2259, 2261, 2263, 2265, 2267, 2269, 2271, 2273, 2275, 2277, 2279, 2281, 2283, 2285, 2287, 2289, 2291, 2293, 2295, 2297, 2299, 2301, 2303, 2305, 2307, 2309, 2311, 2313, 2315, 2317, 2319, 2321, 2323, 2325, 2327, 2329, 2331, 2333, 2335, 2337, 2339, 2341, 2343, 2345, 2347, 2349, 2351, 2353, 2355, 2357, 2359, 2361, 2363, 2365, 2367, 2369, 2371, 2373, 2375, 2377, 2379, 2381, 2383, 2385, 2387, 2389, 2391, 2393, 2395, 2397, 2399, 2401, 2403, 2405, 2407, 2409, 2411, 2413, 2415, 2417, 2419, 2421, 2423, 2425, 2427, 2429, 2431, 2433, 2435, 2437, 2439, 2441, 2443, 2445, 2447, 2449, 2451, 2453, 2455, 2457, 2459, 2461, 2463, 2465, 2467, 2469, 2471, 2473, 2475, 2477, 2479, 2481, 2483, 2485, 2487, 2489, 2491, 2493, 2495, 2497, 2499, 2501, 2503, 2505, 2507, 2509, 2511, 2513, 2515, 2517, 2519, 2521, 2523, 2525, 2527, 2529, 2531, 2533, 2535, 2537, 2539, 2541, 2543, 2545, 2547, 2549, 2551, 2553, 2555, 2557, 2559, 2561, 2563, 2565, 2567, 2569, 2571, 2573, 2575, 2577, 2579, 2581, 2583, 2585, 2587, 2589, 2591, 2593, 2595, 2597, 2599, 2601, 2603, 2605, 2607, 2609, 2611, 2613, 2615, 2617, 2619, 2621, 2623, 2625, 2627, 2629, 2631, 2633, 2635, 2637, 2639, 2641, 2643, 2645, 2647, 2649, 2651, 2653, 2655, 2657, 2659, 2661, 2663, 2665, 2667, 2669, 2671, 2673, 2675, 2677, 2679, 2681, 2683, 2685, 2687, 2689, 2691, 2693, 2695, 2697, 2699, 2701, 2703, 2705, 2707, 2709, 2711, 2713, 2715, 2717, 2719, 2721, 2723, 2725, 2727, 2729, 2731, 2733, 2735, 2737, 2739, 2741, 2743, 2745, 2747, 2749, 2751, 2753, 2755, 2757, 2759, 2761, 2763, 2765, 2767, 2769, 2771, 2773, 2775, 2777, 2779, 2781, 2783, 2785, 2787, 2789, 2791, 2793, 2795, 2797, 2799, 2801, 2803, 2805, 2807, 2809, 2811, 2813, 2815, 2817, 2819, 2821, 2823, 2825, 2827, 2829, 2831, 2833, 2835, 2837, 2839, 2841, 2843, 2845, 2847, 2849, 2851, 2853, 2855, 2857, 2859, 2861, 2863, 2865, 2867, 2869, 2871, 2873, 2875, 2877, 2879, 2881, 2883, 2885, 2887, 2889, 2891, 2893, 2895, 2897, 2899, 2901, 2903, 2905, 2907, 2909, 2911, 2913, 2915, 2917, 2919, 2921, 2923, 2925, 2927, 2929, 2931, 2933, 2935, 2937, 2939, 2941, 2943, 2945, 2947, 2949, 2951, 2953, 2955, 2957, 2959, 2961, 2963, 2965, 2967, 2969, 2971, 2973, 2975, 2977, 2979, 2981, 2983, 2985, 2987, 2989, 2991, 2993, 2995, 2997, 2999, 3001, 3003, 3005, 3007, 3009, 3011, 3013, 3015, 3017, 3019, 3021, 3023, 3025, 3027, 3029, 3031, 3033, 3035, 3037, 3039, 3041, 3043, 3045, 3047, 3049, 3051, 3053, 3055, 3057, 3059, 3061, 3063, 3065, 3067, 3069, 3071, 3073, 3075, 3077, 3079, 3081, 3083, 3085, 3087, 3089, 3091, 3093, 3095, 3097, 3099, 3101, 3103, 3105, 3107, 3109, 3111, 3113, 3115, 3117, 3119, 3121, 3123, 3125, 3127, 3129, 3131, 3133, 3135, 3137, 3139, 3141, 3143, 3145, 3147, 3149, 3151, 3153, 3155, 3157, 3159, 3161, 3163, 3165, 3167, 3169, 3171, 3173, 3175, 3177, 3179, 3181, 3183, 3185, 3187, 3189, 3191, 3193, 3195, 3197, 3199, 3201, 3203, 3205, 3207, 3209, 3211, 3213, 3215, 3217, 3219, 3221, 3223, 3225, 3227, 3229, 3231, 3233, 3235, 3237, 3239, 3241, 3243, 3245, 3247, 3249, 3251, 3253, 3255, 3257, 3259, 3261, 3263, 3265, 3267, 3269, 3271, 3273, 3275, 3277, 3279, 3281, 3283, 3285, 3287, 3289, 3291, 3293, 3295, 3297, 3299, 3301, 3303, 3305, 3307, 3309, 3311, 3313, 3315, 3317, 3319, 3321, 3323, 3325, 3327, 3329, 3331, 3333, 3335, 3337, 3339, 3341, 3343, 3345, 3347, 3349, 3351, 3353, 3355, 3357, 3359, 3361, 3363, 3365, 3367, 3369, 3371, 3373, 3375, 3377, 3379, 3381, 3383, 3385, 3387, 3389, 3391, 3393, 3395, 3397, 3399, 3401, 3403 or 3404;
b. providing a plant cell comprising an mRNA having the sequence set forth in SEQ ID NOS: 1, 3, 5, 7, 9, 11, 13, 15, 17, 19, 21, 23, 25, 27, 29, 31, 33, 35, 37, 39, 41, 43, 45, 47, 49, 51, 53, 55, 57, 59, 61, 63, 65, 67, 69, 71, 73, 75, 77, 79, 81, 83, 85, 87, 89, 91, 93, 95, 97, 99, 101, 103, 105, 107, 109, 111, 113, 115, 117, 119, 121, 123, 125, 127, 129, 131, 133, 135, 137, 139, 141, 143, 145, 147, 149, 151, 153, 155, 157, 159, 161, 163, 165, 167, 169, 171, 173, 175, 177, 179, 181, 183, 185, 187, 189, 191, 193, 195, 197, 199, 201, 203, 205, 207, 209, 211, 213, 215, 217, 219, 221, 223, 225, 227, 229, 231, 233, 235, 237, 239, 241, 243, 245, 247, 249, 251, 253, 255, 257, 259, 261, 263, 265, 267, 269, 271, 273, 275, 277, 279, 281, 283, 285, 287, 289, 291, 293, 295, 297, 299, 301, 303, 305, 307, 309, 311, 313, 315, 317, 319, 321, 323, 325, 327, 329, 331, 333, 335, 337, 339, 341, 343, 345, 347, 349, 351, 353, 355, 357, 359, 361, 363, 365, 367, 369, 371, 373, 375, 377, 379, 381, 383, 385, 387, 389, 391, 393, 395, 397, 399, 401, 403, 405, 407, 409, 411, 413, 415, 417, 419, 421, 423, 425, 427, 429, 431, 433, 435, 437, 439, 441, 443, 445, 447, 449, 451, 453, 455, 457, 459, 461, 463, 465, 467, 469, 471, 473, 475, 477, 479, 481, 483, 485, 487, 489, 491, 493, 495, 497, 499, 501, 503, 505, 507, 509, 511, 513, 515, 517, 519, 521, 523, 525, 527, 529, 531, 533, 535, 537, 539, 541, 543, 545, 547, 549, 551, 553, 555, 557, 559, 561, 563, 565, 567, 569, 571, 573, 575, 577, 579, 581, 583, 585, 587, 589, 591, 593, 595, 597, 599, 601, 603, 605, 607, 609, 611, 613, 615, 617, 619, 621, 623, 625, 627, 629, 631, 633, 635, 637, 639, 641, 643, 645, 647, 649, 651, 653, 655, 657, 659, 661, 663, 665, 667, 669, 671, 673, 675, 677, 679, 681, 683, 685, 687, 689, 691, 693, 695, 697, 699, 701, 703, 705, 707, 709, 711, 713, 715, 717, 719, 721, 723, 725, 727, 729, 731, 733, 735, 737, 739, 741, 743, 745, 747, 749, 751, 753, 755, 757, 759, 761, 763, 765, 767, 769, 771, 773, 775, 777, 779, 781, 783, 785, 787, 789, 791, 793, 795, 797, 799, 801, 803, 805, 807, 809, 811, 813, 815, 817, 819, 821, 823, 825, 827, 829, 831, 833, 835, 837, 839, 841, 843, 845, 847, 849, 851, 853, 855, 857, 859, 861, 863, 865, 867, 869, 871, 873, 875, 877, 879, 881, 883, 885, 887, 889, 891, 893, 895, 897, 899, 901, 903, 905, 907, 909, 911, 913, 915, 917, 919, 921, 923, 925, 927, 929, 931, 933, 935, 937, 939, 941, 943, 945, 947, 949, 951, 953, 955, 957, 959, 961, 963, 965, 967, 969, 971, 973, 975, 977, 979, 981, 983, 985, 987, 989, 991, 993, 995, 997, 999, 1001, 1003, 1005, 1007, 1009, 1011, 1013, 1015, 1017, 1019, 1021, 1023, 1025, 1027, 1029, 1031, 1033, 1035, 1037, 1039, 1041, 1043, 1045, 1047, 1049, 1051, 1053, 1055, 1057, 1059, 1061, 1063, 1065, 1067, 1069, 1071, 1073, 1075, 1077, 1079, 1081, 1083, 1085, 1087, 1089, 1091, 1093, 1095, 1097, 1099, 1101, 1103, 1105, 1107, 1109, 1111, 1113, 1115, 1117, 1119, 1121, 1123, 1125, 1127, 1129, 1131, 1133, 1135, 1137, 1139, 1141, 1143, 1145, 1147, 1149, 1151, 1153, 1155, 1157, 1159, 1161, 1163, 1165, 1167, 1169, 1171, 1173, 1175, 1177, 1179, 1181, 1183, 1185, 1187, 1189, 1191, 1193, 1195, 1197, 1199, 1201, 1203, 1205, 1207, 1209, 1211, 1213, 1215, 1217, 1219, 1221, 1223, 1225, 1227, 1229, 1231, 1233, 1235, 1237, 1239, 1241, 1243, 1245, 1247, 1249, 1251, 1253, 1255, 1257, 1259, 1261, 1263, 1265, 1267, 1269, 1271, 1273, 1275, 1277, 1279, 1281, 1283, 1285, 1287, 1289, 1291, 1293, 1295, 1297, 1299, 1301, 1303, 1305, 1307, 1309, 1311, 1313, 1315, 1317, 1319, 1321, 1323, 1325, 1327, 1329, 1331, 1333, 1335, 1337, 1339, 1341, 1343, 1345, 1347, 1349, 1351, 1353, 1355, 1357, 1359, 1361, 1363, 1365, 1367, 1369, 1371, 1373, 1375, 1377, 1379, 1381, 1383, 1385, 1387, 1389, 1391, 1393, 1395, 1397, 1399, 1401, 1403, 1405, 1407, 1409, 1411, 1413, 1415, 1417, 1419, 1421, 1423, 1425, 1427, 1429, 1431, 1433, 1435, 1437, 1439, 1441, 1443, 1445, 1447, 1449, 1451, 1453, 1455, 1457, 1459, 1461, 1463, 1465, 1467, 1469, 1471, 1473, 1475, 1477, 1479, 1481, 1483, 1485, 1487, 1489, 1491, 1493, 1495, 1497, 1499, 1501, 1503, 1505, 1507, 1509, 1511, 1513, 1515, 1517, 1519, 1521, 1523, 1525, 1527, 1529, 1531, 1533, 1535, 1537, 1539, 1541, 1543, 1545, 1547, 1549, 1551, 1553, 1555, 1557, 1559, 1561, 1563, 1565, 1567, 1569, 1571, 1573, 1575, 1577, 1579, 1581, 1583, 1585, 1587, 1589, 1591, 1593, 1595, 1597, 1599, 1601, 1603, 1605, 1607, 1609, 1611, 1613, 1615, 1617, 1619, 1621, 1623, 1625, 1627, 1629, 1631, 1633, 1635, 1637, 1639, 1641, 1643, 1645, 1647, 1649, 1651, 1653, 1655, 1657, 1659, 1661, 1663, 1665, 1667, 1669, 1671, 1673, 1675, 1677, 1679, 1681, 1683, 1685, 1687, 1689, 1691, 1693, 1695, 1697, 1699, 1701, 1703, 1705, 1707, 1709, 1711, 1713, 1715, 1717, 1719, 1721, 1723, 1725, 1727, 1729, 1731, 1733, 1735, 1737, 1739, 1741, 1743, 1745, 1747, 1749, 1751, 1753, 1755, 1757, 1759, 1761, 1763, 1765, 1767, 1769, 1771, 1773, 1775, 1777, 1779, 1781, 1783, 1785, 1787, 1789, 1791, 1793, 1795, 1797, 1799, 1801, 1803, 1805, 1807, 1809, 1811, 1813, 1815, 1817, 1819, 1821, 1823, 1825, 1827, 1829, 1831, 1833, 1835, 1837, 1839, 1841, 1843, 1845, 1847, 1849, 1851, 1853, 1855, 1857, 1859, 1861, 1863, 1865, 1867, 1869, 1871, 1873, 1875, 1877, 1879, 1881, 1883, 1885, 1887, 1889, 1891, 1893, 1895, 1897, 1899, 1901, 1903, 1905, 1907, 1909, 1911, 1913, 1915, 1917, 1919, 1921, 1923, 1925, 1927, 1929, 1931, 1933, 1935, 1937, 1939, 1941, 1943, 1945, 1947, 1949, 1951, 1953, 1955, 1957, 1959, 1961, 1963, 1965, 1967, 1969, 1971, 1973, 1975, 1977, 1979, 1981, 1983, 1985, 1987, 1989, 1991, 1993, 1995, 1997, 1999, 2001, 2003, 2005, 2007, 2009, 2011, 2013, 2015, 2017, 2019, 2021, 2023, 2025, 2027, 2029, 2031, 2033, 2035, 2037, 2039, 2041, 2043, 2045, 2047, 2049, 2051, 2053, 2055, 2057, 2059, 2061, 2063, 2065, 2067, 2069, 2071, 2073, 2075, 2077, 2079, 2081, 2083, 2085, 2087, 2089, 2091, 2093, 2095, 2097, 2099, 2101, 2103, 2105, 2107, 2109, 2111, 2113, 2115, 2117, 2119, 2121, 2123, 2125, 2127, 2129, 2131, 2133, 2135, 2137, 2139, 2141, 2143, 2145, 2147, 2149, 2151, 2153, 2155, 2157, 2159, 2161, 2163, 2165, 2167, 2169, 2171, 2173, 2175, 2177, 2179, 2181, 2183, 2185, 2187, 2189, 2191, 2193, 2195, 2197, 2199, 2201, 2203, 2205, 2207, 2209, 2211, 2213, 2215, 2217, 2219, 2221, 2223, 2225, 2227, 2229, 2231, 2233, 2235, 2237, 2239, 2241, 2243, 2245, 2247, 2249, 2251, 2253, 2255, 2257, 2259, 2261, 2263, 2265, 2267, 2269, 2271, 2273, 2275, 2277, 2279, 2281, 2283, 2285, 2287, 2289, 2291, 2293, 2295, 2297, 2299, 2301, 2303, 2305, 2307, 2309, 2311, 2313, 2315, 2317, 2319, 2321, 2323, 2325, 2327, 2329, 2331, 2333, 2335, 2337, 2339, 2341, 2343, 2345, 2347, 2349, 2351, 2353, 2355, 2357, 2359, 2361, 2363, 2365, 2367, 2369, 2371, 2373, 2375, 2377, 2379, 2381, 2383, 2385, 2387, 2389, 2391, 2393, 2395, 2397, 2399, 2401, 2403, 2405, 2407, 2409, 2411, 2413, 2415, 2417, 2419, 2421, 2423, 2425, 2427, 2429, 2431, 2433, 2435, 2437, 2439, 2441, 2443, 2445, 2447, 2449, 2451, 2453, 2455, 2457, 2459, 2461, 2463, 2465, 2467, 2469, 2471, 2473, 2475, 2477, 2479, 2481, 2483, 2485, 2487, 2489, 2491, 2493, 2495, 2497, 2499, 2501, 2503, 2505, 2507, 2509, 2511, 2513, 2515, 2517, 2519, 2521, 2523, 2525, 2527, 2529, 2531, 2533, 2535, 2537, 2539, 2541, 2543, 2545, 2547, 2549, 2551, 2553, 2555, 2557, 2559, 2561, 2563, 2565, 2567, 2569, 2571, 2573, 2575, 2577, 2579, 2581, 2583, 2585, 2587, 2589, 2591, 2593, 2595, 2597, 2599, 2601, 2603, 2605, 2607, 2609, 2611, 2613, 2615, 2617, 2619, 2621, 2623, 2625, 2627, 2629, 2631, 2633, 2635, 2637, 2639, 2641, 2643, 2645, 2647, 2649, 2651, 2653, 2655, 2657, 2659, 2661, 2663, 2665, 2667, 2669, 2671, 2673, 2675, 2677, 2679, 2681, 2683, 2685, 2687, 2689, 2691, 2693, 2695, 2697, 2699, 2701, 2703, 2705, 2707, 2709, 2711, 2713, 2715, 2717, 2719, 2721, 2723, 2725, 2727, 2729, 2731, 2733, 2735, 2737, 2739, 2741, 2743, 2745, 2747, 2749, 2751, 2753, 2755, 2757, 2759, 2761, 2763, 2765, 2767, 2769, 2771, 2773, 2775, 2777, 2779, 2781, 2783, 2785, 2787, 2789, 2791, 2793, 2795, 2797, 2799, 2801, 2803, 2805, 2807, 2809, 2811, 2813, 2815, 2817, 2819, 2821, 2823, 2825, 2827, 2829, 2831, 2833, 2835, 2837, 2839, 2841, 2843, 2845, 2847, 2849, 2851, 2853, 2855, 2857, 2859, 2861, 2863, 2865, 2867, 2869, 2871, 2873, 2875, 2877, 2879, 2881, 2883, 2885, 2887, 2889, 2891, 2893, 2895, 2897, 2899, 2901, 2903, 2905, 2907, 2909, 2911, 2913, 2915, 2917, 2919, 2921, 2923, 2925, 2927, 2929, 2931, 2933, 2935, 2937, 2939, 2941, 2943, 2945, 2947, 2949, 2951, 2953, 2955, 2957, 2959, 2961, 2963, 2965, 2967, 2969, 2971, 2973, 2975, 2977, 2979, 2981, 2983, 2985, 2987, 2989, 2991, 2993, 2995, 2997, 2999, 3001, 3003, 3005, 3007, 3009, 3011, 3013, 3015, 3017, 3019, 3021, 3023, 3025, 3027, 3029, 3031, 3033, 3035, 3037, 3039, 3041, 3043, 3045, 3047, 3049, 3051, 3053, 3055, 3057, 3059, 3061, 3063, 3065, 3067, 3069, 3071, 3073, 3075, 3077, 3079, 3081, 3083, 3085, 3087, 3089, 3091, 3093, 3095, 3097, 3099, 3101, 3103, 3105, 3107, 3109, 3111, 3113, 3115, 3117, 3119, 3121, 3123, 3125, 3127, 3129, 3131, 3133, 3135, 3137, 3139, 3141, 3143, 3145, 3147, 3149, 3151, 3153, 3155, 3157, 3159, 3161, 3163, 3165, 3167, 3169, 3171, 3173, 3175, 3177, 3179, 3181, 3183, 3185, 3187, 3189, 3191, 3193, 3195, 3197, 3199, 3201, 3203, 3205, 3207, 3209, 3211, 3213, 3215, 3217, 3219, 3221, 3223, 3225, 3227, 3229, 3231, 3233, 3235, 3237, 3239, 3241, 3243, 3245, 3247, 3249, 3251, 3253, 3255, 3257, 3259, 3261, 3263, 3265, 3267, 3269, 3271, 3273, 3275, 3277, 3279, 3281, 3283, 3285, 3287, 3289, 3291, 3293, 3295, 3297, 3299, 3301, 3303, 3305, 3307, 3309, 3311, 3313, 3315, 3317, 3319, 3321, 3323, 3325, 3327, 3329, 3331, 3333, 3335, 3337, 3339, 3341, 3343, 3345, 3347, 3349, 3351, 3353, 3355, 3357, 3359, 3361, 3363, 3365, 3367, 3369, 3371, 3373, 3375, 3377, 3379, 3381, 3383, 3385, 3387, 3389, 3391, 3393, 3395, 3397, 3399, 3401, 3403 or 3404; and
c. introducing the nucleotide sequence of step (a) into the plant cell of step (b), wherein the nucleotide sequence inhibits expression of the mRNA in the plant cell.

14. (canceled)

15. (canceled)

16. (canceled)

17. The transgenic plant of claim 4, wherein the nitrogen utilization efficiency activity in said plant is increased.

18. (canceled)

19. (canceled)

20. (canceled)

21. (canceled)

22. (canceled)

23. (canceled)

24. (canceled)

25. (canceled)

26. A method of improving an agronomic parameter of a maize plant, the method comprising expressing a polynucleotide that encodes a polypeptide of at least 90% identical to the amino acid sequence selected from the group consisting of SEQ ID NOS: 298, 318, 320, 370, 552, 1276, 2288, 1596, 1804, 1882, 2252, 2640 and 2966.

27. The method of claim 26 wherein the agronomic parameter is selected from the group consisting of increased grain filling, increased silking, increased ear area, increased ear length, increased ear width and increased silk count.

28. A method for increasing abiotic stress tolerance in a plant, said method comprising:
a. expressing a recombinant nucleotide sequence encoding a polypeptide of claim 26, wherein said nucleotide sequence is operably linked to a heterologous promoter selected from the group consisting of a weak constitutive promoter, an organ- or tissue-preferred promoter a stress-inducible promoter, a chemical-induced promoter, a light-responsive promoter, and a diurnally-regulated promoter; and
b. expressing said nucleotide sequence in said plant; whereby abiotic stress tolerance of said plant is increased relative to a control plant.

29. (canceled)

30. (canceled)

31. A method for increasing yield of a seed crop plant exposed to drought stress, said method comprising increasing expression of a polypeptide of claim 26 in said plant.

32. The method of claim 31, wherein the polynucleotide sequence is selected from the group consisting of SEQ ID NOS: 297, 317, 319, 369, 552, 1275, 2287, 1595, 1803, 1881, 2251, 2639 and 2965 or a sequence that is at least 90% identical to one of SEQ ID NOS: 297, 317, 319, 369, 552, 1275, 2287, 1595, 1803, 1881, 2251, 2639 and 2965.

33. The method of claim 28, wherein the plant further comprises a gene conferring tolerance to a herbicide or an insect.

34. (canceled)

35. (canceled)

36. (canceled)

37. (canceled)

38. (canceled)

39. (canceled)

40. (canceled)

41. A method for increasing abiotic stress tolerance or yield in a plant, said method comprising:
a. expressing a genomic nucleotide sequence encoding a polypeptide of claim 26, wherein said nucleotide sequence is operably linked to a heterologous promoter selected from the group consisting of a weak constitutive promoter, an organ- or tissue-preferred promoter a stress-inducible promoter, a chemical-induced promoter, a light-responsive promoter and a diurnally-regulated promoter; and
b. expressing said nucleotide sequence in said plant; whereby abiotic stress tolerance of said plant is increased relative to a control plant.

42. A method of developing a marker for marker-assisted breeding of sorghum, the method comprising identifying a marker within a polynucleotide sequence of claim 1 or in linkage disequilibrium with the nucleotide sequences and identifying a sorghum plant that comprises the marker.

43. A method of identifying an allelic variant of a polynucleotide in a sorghum plant that is associated with increased tolerance to an abiotic stress or increased yield, the method comprising the steps of:
a. crossing two sorghum plants with differing levels of abiotic stress tolerance;
b. evaluating allelic variations in the progeny plants with respect to a polynucleotide sequence of claim 1 or in the genomic region that regulates the expression of the polynucleotide encoding the protein;
c. phenotyping the progeny plants for abiotic stress tolerance;
d. associating allelic variations with said tolerance; and
e. identifying the alleles that are associated with increased tolerance to said abiotic stress.

44. A method of identifying a sorghum plant that exhibits an improved agronomic parameter, the method comprising screening a population of sorghum plants for enhanced nutrient utilization efficiency or drought tolerance and analyzing the sequence of a polynucleotide encoding a protein comprising a polypeptide of claim 1 or a regulatory sequence thereof and identifying the sorghum plant with enhanced nutrient utilization efficiency or drought tolerance.

45. A method of identifying alleles in sorghum plants or germplasm that are associated with tolerance to abiotic stress, the method comprising:
a. obtaining a population of sorghum plants, wherein one or more plants exhibit differing levels of enhanced tolerance to abiotic stress;
b. evaluating allelic variations with respect to the polynucleotide sequence encoding a protein comprising a polypeptide of claim 1 or in the genomic region that regulates the expression of the polynucleotide encoding the protein;
c. obtaining phenotypic values of abiotic stress tolerance for a plurality of maize plants in the population;
d. associating the allelic variations in the genomic region with a polynucleotide of claim 1; and
e. identifying the alleles that are associated with increased tolerance to abiotic stress.

The application's sequence listing, which the Patent Office published only in electronic form, follows.

SEQUENCE LISTING (5105 sequences)

SEQ ID NO: 1 - DNA, 2061 bp, Sorghum bicolor
atggcggcggcagaggcgcggggaggggagttccccgtggggatgaaggtgctggtcgtggacgacgacccgacgtgcctcctcgtgctcaagaggatgctccttgactgcagatacgacgtgacaacatgtcctcaggctacaagagcactaactatgctgcgagagaataggcgtggttttgatgttataataagtgatgtccacatgcctgatatggatggattcaggctacttgaacttgtaggccttgagatggaccttccagttatcatgatgtctgctgattcaagaacggatattgtaatgaagggaattaaacatggagcgtgtgactatttaataaaacctgtcagaatggaggagttgaaaaacatctggcaacatgttgttaggaaaaaatttaatgaaaacaaggatcatgagcattctggtagcctagatgataccgatcgtaacagaccaaccaataatgataatgaatatgcttcctctgcgaatgatggaggtgatggcagctggaaatctcagaaaaagaaaagagagaaagaagatgatgaaactgacctggaaaatggcgatccttcttctacatcaaagaaaccaagagttgtttggtcagttgagcttcatcaacaatttgtgaatgcagtcaatcacctcgggatagacaaagctgttccaaagaaaattttggaattgatgaatgtccctggcttaaccagggaaaatgttgccagccatttgcagaaattcagactatacctgaagagaattgctcagcatcatgcaggaatacctcatccatttgttgcgcctgcttctagtgctaaagttgctcctttaggaggactggaattccaagctttggctgcttctggtcagatccctcctcaagctctggctgctttgcaggatgaactccttggtcgacctacaagcagtttggcgttgcctggaagggaccagtcatctttgcgactggctgcaatcaaaggaaacaagtcccatggagagagagaaatagcatttggtcaacccatatacaagtgtcagaataacgcatatggcgcattccctcaaagcagcccatcagttggaggattgccatcttttgcagcttggcccaataacaaacttggtatgactgattcaccaagcacattgggaaatgtgggcagttctcaaaataataatatgctattgcatgaattgcagcaacagccagacacattgctgtcaggaacccttcacaatattgatgtcaaaccttctggtgtagttatgccatctcagtcgttaaatgcattcccggctagtgagggtatctcacctaatcaaaatcccttgattctaccatctcaatcctcaagttttctggcatcaattcctccatccatgaaacatgaacctcttcttggatcaccttcaccgtcaactagtctgttgggtgggcttgatatggttaatcaagcttcaacaagtcagcctctgattagtagccatggagcaaatcttcctggtctcataaaccgcagcacaaatgcaatgccttcaccaggaattaataattttcaaagtgggaacataccttatctggttaatcagaatgctatgggagttagctcaagaccaccaggtgttctaaagactgagagcactgactcgctgagtcgtagttatggctatattggtggtagtaccagtgtggactctgtcttgctgtcttctcagtccaaaaatgcacagtatggtttactgcagagtcaaaatgatgttagcggcagctggtcgccttcacaagattttgatagttttggaaattctcttgggcaaggccaccctggttccacttcatctaacttccagagttctgcccttggcaagctacctgaccaaggacgagggaggaatcatgggtttgtcgggaaaggcacttgcattccaagccgctttgcagtggatgaggttgaatctccaactaacaacttgagccacagcattggaaacagtggagacatagtgaaccccgacatattcggatttagtggacagatgtga

SEQ ID NO: 2 - protein, 686 aa, Sorghum bicolor
MAAAEARGGEFPVGMKVLVVDDDPTCLLVLKRMLLDCRYDVTTCPQATRALTMLRENRRGFDVIISDVHMPDMDGFRLLELVGLEMDLPVIMMSADSRTDIVMKGIKHGACDYLIKPVRMEELKNIWQHVVRKKFNENKDHEHSGSLDDTDRNRPTNNDNEYASSANDGGDGSWKSQKKKREKEDDETDLENGDPSSTSKKPRVVWSVELHQQFVNAVNHLGIDKAVPKKILELMNVPGLTRENVASHLQKFRLYLKRIAQHHAGIPHPFVAPASSAKVAPLGGLEFQALAASGQIPPQALAALQDELLGRPTSSLALPGRDQSSLRLAAIKGNKSHGEREIAFGQPIYKCQNNAYGAFPQSSPSVGGLPSFAAWPNNKLGMTDSPSTLGNVGSSQNNNMLLHELQQQPDTLLSGTLHNIDVKPSGVVMPSQSLNAFPASEGISPNQNPLILPSQSSSFLASIPPSMKHEPLLGSPSPSTSLLGGLDMVNQASTSQPLISSHGANLPGLINRSTNAMPSPGINNFQSGNIPYLVNQNAMGVSSRPPGVLKTESTDSLSRSYGYIGGSTSVDSVLLSSQSKNAQYGLLQSQNDVSGSWSPSQDFDSFGNSLGQGHPGSTSSNFQSSALGKLPDQGRGRNHGFVGKGTCIPSRFAVDEVESPTNNLSHSIGNSGDIVNPDIFGFSGQM

SEQ ID NO: 3 - DNA, 1476 bp, Sorghum bicolor
atgggtgctcgctgctccaagctctccgtctgctggtggcctccccacttcaaatcgccgatgctcgagaatggcgccgccgaggatgacggcagcggcgtgccggtgttcgccgagtacagcctcgacgagctccgggcggccaccgacggcttcgcccccgaccgcatcgtgtcggagcacggcgagaaggcgcccaacgtggtctaccgcggcacgctcttcagctccggccgcaccgttgccatcaagcgcttcggccgctccgcctggccggactcacgccagttcctggaggaggcgagggctgttgggcagctgcgcagtggccggctggccaatctgatcggttgctgctgcgagagcggcgagcgtctcctcgttgccgagttcatgcctcacgagaccttggcaaagcatctcttccactgggagacaaatccattgagttgggcaatgaggatgagggctgcgctttatgtggcacaggcgttggactactgcagtagcaaagggagggcactctatcatgatctgcatgcatacagggtcgtctttgatgtggatggtaacccaagactatcatgttttggtctgatgaagaacagcagggacgggaagagttatagtactaatttggctttcacacctcctgagtatcttaagacaggcagagtaagtcctgagagtgtggtttacagttttgggactgtcttgcttgatctcctgagtggaaagcacattccaccaagtcatgcacttgaccttataagaggaaagaactttctagtgctgatggattcttgcttggaaggtcatgtatccaactccgatggaactgacttgatgcgattagcatcccgttgcttgcaatatgaagcacgtgaccggccaaatctgaaaactgtggtatctggtctcgcaagtctccagagagatgcttctactccttcacacactttgctggggatccaacatgataagaaaaacccagatctagtttccttgtctgctattgggaaagctttcgccagagcagacctgaatgaggtgcatgaaatactgctgcatgatggttataatgaggatgacgcagctaatgctgagctatctctccagtcatggaatggtgatctatctgagagctttgttgttaagaggcatgcagacaatgccttcaagtctaaggaattcgtgactgcaattgagtgctactcaaggttcctcgactcaggcgcagcggtggctccaaccatgctggggcggagatgcttcgcatatgtggtgattggcaacccacaggaaggccttgaggatgcaaagagagctgtggttatggcatccgactggccgatgggatactacctgcaggccatagcacttcataaccttggaagggaggctgaaagccaagaagcactgaagattggcactgccttggaagctgcaaggaatagtagagctagatctgtatag

SEQ ID NO: 4 - protein, 491 aa, Sorghum bicolor
MGARCSKLSVCWWPPHFKSPMLENGAAEDDGSGVPVFAEYSLDELRAATDGFAPDRIVSEHGEKAPNVVYRGTLFSSGRTVAIKRFGRSAWPDSRQFLEEARAVGQLRSGRLANLIGCCCESGERLLVAEFMPHETLAKHLFHWETNPLSWAMRMRAALYVAQALDYCSSKGRALYHDLHAYRVVFDVDGNPRLSCFGLMKNSRDGKSYSTNLAFTPPEYLKTGRVSPESVVYSFGTVLLDLLSGKHIPPSHALDLIRGKNFLVLMDSCLEGHVSNSDGTDLMRLASRCLQYEARDRPNLKTVVSGLASLQRDASTPSHTLLGIQHDKKNPDLVSLSAIGKAFARADLNEVHEILLHDGYNEDDAANAELSLQSWNGDLSESFVVKRHADNAFKSKEFVTAIECYSRFLDSGAAVAPTMLGRRCFAYVVIGNPQEGLEDAKRAVVMASDWPMGYYLQAIALHNLGREAESQEALKIGTALEAARNSRARSV

SEQ ID NO: 5 - DNA, 441 bp, Sorghum bicolor
atgagcaccggccggccggaggacatccagcagctaatcaacagtgccactagtagccccaaccgcactagtccatccgcctcgcccagcgacatggagagcggcggcggaagcgcgtcctcgccgcgcgcttcgacgtccgaccggcgcctgcagagggccgcccacagtcacagggaggagtgggagcctgctgctgctgctagcggcgatggcggcacgggtagcctctggtccaggtacttctcgctcccggtcctcctgctcgtcggcgtcaccgcgtcgctggtgatcctcccgctcgtgctccccccgctaccgccgccgccgtcgatgctgatgctggtcccggtggcaatgctggtcttgctgctcgtgctggcgttcatgccgacgtcgagcgtccgcgctgggacggggacggggccgacctacatgtag

SEQ ID NO: 6 - protein, 146 aa, Sorghum bicolor
MSTGRPEDIQQLINSATSSPNRTSPSASPSDMESGGGSASSPRASTSDRRLQRAAHSHREEWEPAAAASGDGGTGSLWSRYFSLPVLLLVGVTASLVILPLVLPPLPPPPSMLMLVPVAMLVLLLVLAFMPTSSVRAGTGTGPTYM

SEQ ID NO: 7 - DNA, 864 bp, Sorghum bicolor
atgtcgacgcgtgaggagtggagcatgtccgacttcgagatcggcaagtacatcggtgagggcaagttcggcaaggtctacctcgcccgcgagaagcagagcgggtacgttgtggcgctcaaggtgatatttaaggcgaaactggagaagtaccgcttccacgcgcacctgcggcgggagatcgagatccagcacagtctcgaccaccccaacgtgctccgcctcttcacctggttccacgacgaagagcgagtcgtcctcgttctcgagtacgcggcccgtggcgagctctacaaggtcctccgcgctgctggccgcttcaccgagcgcacgtctgccacatatgtcgcgagccttgctggtgcattggcatactgccacaagaagcaagtcatccacagggacatcaagcctgagaatttgctactagacattgagggccggcttaaaattgcagattttggatgggcagctcgttcaaatgctaagcgacacacactctgtggcacaatcgattatctggcaccagagatggtagagaaaaaagctcatgaccatgctgtggacaactggacactaggaatcttgtgctatgagttcttatatggttcacctccttttgaagctgatgaacaggatgataccttgagaaggatagttaaggtggatttggcattcccttcaactcctcatgtatcttcagaggctaaggatctcatttccaagctgctagttaaggattcaagcaagaggctttgtcttgaagacattatgaaacatccatggataaagaagaatgcagacccttcaggaagttgcattaagcaaaaagatgtaacaagagcaaaggtaagcgataagtga

SEQ ID NO: 8 - protein, 287 aa, Sorghum bicolor
MSTREEWSMSDFEIGKYIGEGKFGKVYLAREKQSGYVVALKVIFKAKLEKYRFHAHLRREIEIQHSLDHPNVLRLFTWFHDEERVVLVLEYAARGELYKVLRAAGRFTERTSATYVASLAGALAYCHKKQVIHRDIKPENLLLDIEGRLKIADFGWAARSNAKRHTLCGTIDYLAPEMVEKKAHDHAVDNWTLGILCYEFLYGSPPFEADEQDDTLRRIVKVDLAFPSTPHVSSEAKDLISKLLVKDSSKRLCLEDIMKHPWIKKNADPSGSCIKQKDVTRAKVSDK

SEQ ID NO: 9 - DNA, 1056 bp, Sorghum bicolor
atggcgctggaagctctgtgcacgaccaccagcgacgtcctcgtctacgacaccttcaacgccgccgccgccgcgtgcgccgcttctgcggggacggggagcttcctcttcggcaatgcagcaccggtggaggtgccgccggcggcggcgatggcgtcccaggcgaacggggaaagcggcgtgcagcaggtgcggaggaaccggcggcggcggcagaggagcgccaagaacgccgtggacgccgagagccagcggatgaaccacatcgccgtcgagcgcaaccgccgccgccagatgaacgagtacctcgccgcgctccgctcgctcatgccggactcctacgtccaccggagcgataaggcggccgtggtcagcggcgccataaattgcgtgaaggagctcgagctgcacctgcaggcccttgaggcgcagaagctagcgctgaaccggcagcagctgctgctgcagcagcagcagcggcgcagcgacacggcggcagagcgcaacgcggcgaaactgtcaccaggccatgacaacccggcgtccgccggcaacaacagcggggacgccgcggcgcgcggcgaggtgccggcgccggcgccgcagccgcctccgttcgcgtggttcttccggtacccgcagtacgcgtggcgccaggccaagcaagcgcggaagtacgccgccgccgtcgtggagggggaggaggcgagccgccgcgcggccgcggtggcggacgtggaggtgggcatggtggaccacgggcacgccagcctccgcgtgatggcgccgcggcggcccgggcagctgctgcggatggtggccgtgatgcaggagctcggcctccacgtgctgcacctcaccgtggccaccgcgcccgacgccacggtgctctacacgttcaacctcctggcggaggaagggtgcagcctggccacggaggaggaaatcgccgcggcggtgcaccacgtcctctgcatcatcgacgccgaggtgacggcgcacaggctgctcgccgccggagctgcagggcacccgggcctcgagcggtctagctag

SEQ ID NO: 10 - protein, 351 aa, Sorghum bicolor
MALEALCTTTSDVLVYDTFNAAAAACAASAGTGSFLFGNAAPVEVPPAAAMASQANGESGVQQVRRNRRRRQRSAKNAVDAESQRMNHIAVERNRRRQMNEYLAALRSLMPDSYVHRSDKAAVVSGAINCVKELELHLQALEAQKLALNRQQLLLQQQQRRSDTAAERNAAKLSPGHDNPASAGNNSGDAAARGEVPAPAPQPPPFAWFFRYPQYAWRQAKQARKYAAAVVEGEEASRRAAAVADVEVGMVDHGHASLRVMAPRRPGQLLRMVAVMQELGLHVLHLTVATAPDATVLYTFNLLAEEGCSLATEEEIAAAVHHVLCIIDAEVTAHRLLAAGAAGHPGLERSS

SEQ ID NO: 11 - DNA, 240 bp, Sorghum bicolor
atgccgccgctggcgccgacgacgacgtcgtcgtcggagccggaaccgccgttccggccgcgggagaagatcctggagaagcagaggtacttccagagcgtccgcaggccgacgtacctcaagggccgccacgacgtgatcacctccgtcgccatcccgctcgccctcgcactctccagcatgtacctcgttgggcgcgggatttacaacatgtcccacggcatagggaagaaggaatga

SEQ ID NO: 12 - protein, 79 aa, Sorghum bicolor
MPPLAPTTTSSSEPEPPFRPREKILEKQRYFQSVRRPTYLKGRHDVITSVAIPLALALSSMYLVGRGIYNMSHGIGKKE

SEQ ID NO: 13 - DNA, 2892 bp, Sorghum bicolor
atgccgtttcccaccgcctccaccgcgcggcggcggcggcggtacgagggcgccgccggtgggtggtgcggggtcgtggtcctggctctggtggcgctcgcggccggcgcggcggcggagacgtcgccgtcggacgttgcggcgatgcaggcggtggcgaaggcgcttggcgcggacaagacgctgggatgggacgtcgccggcgacccctgctcgccgaagcggtgggacggggtgtcctgcgactcgtcgggccgcgtcaccgcgatccaggtcgggaagcgcggcctcacggggaccctgcccccggaggtgggcgacctcaccgcgctcacccgcctcgaggttttcgagaacaagctctccggcccgctgccctcgctcccggggctctcctcgcttcagattttacttgcccacaacaacagcttcgcctccatccccgccgacttcttcaaaggcctcaccgggctcaccgccgtctccatcgactacaacccgttcgcgtcatggacgctccccgccgacctcgccgcctgcgcttccctcgccaacttctccgccaacggcgccaacgtctctggcacgctcccggacttcttgggtgcgatgccggggctccagcggctgtcgttggccttaaaccagctgtcaggacccgtaccggcctcgctggccggcgcgcagctggtgcagctctggctcaatcacgccaacctcaatgggtcgattagctttatcagcaacatgacctctctggagcaactgtggctgcattctaacgaattcactgggcccttgccggacttcgcgatgttgaataatctatgggatttgcaacttcgcgacaacaagctcacaggaccggtgcctgagagtcttttcaagttgaaggccctgaagaaggtgaccctgacgaataatttgctgcaggggccgatgcctcagattcctgttcaacttgttgcagggacagacatgaaagcagattcagagcggttctgtgtgctggaagccgggaaactatgcgatccccgtgtgagcctgctgcttgagattgctgctgggttcatgtacccggcctcacttgctgaggattggaaggggaatgatccgtgtagctttccgggtgttatttgcagccaaggtaacattactgggctgacttttaccaacaagggtctcagtggcagtatctcaccggccatcgggaagattagctcacttaaggtgctaaatcttgctaacaataacatcactggtactgtgcctgaggaggttgccgcgttgcctttgctgacagatgtcgatttgtcaaacaacaatctctatgggaaacttcctacctttgcttccaagagtgcagtggtgaaaactgctggtaaccctaacataggcaaggatgctcctgcgccagcggcaggatcaggtgatagcaacaacaatccatcagggggaggcagcagcgggagcaatggtaacattggtggctcctcttcgtcttctgttggagtcattgcaggctcagtggttggtacagttgttggactaggcctcgttgctgcattaggattctattgctacaagaggaagcagaagcctttcggaagggtgcagagtccacatgccatggttatccatcctcggcactcaggttcagatgacatggttaaaatcacagttgcagggggggacgctaatggtggtgctcgtgcaagcgagacatatagccaagcaagcagtggtccaagggacatccatgttgttgaaagtggaaatatggtcatttcgatccaagttctccgcaatgtgaccaacaacttcagtgaggagaacatccttggtcgaggagggtttggcactgtttacaagggtgagcttcatgatggcacgaaaattgctgtaaagcgcatggaggctggtgtgatgggtaacaaggggctaaatgagtttaaatcagagattgctgttttgaccaaggttcgtcaccggaaccttgtctcactgctgggctactgccttgatggcaatgaaaggattcttgtgtatgagtacatgccacaggggacactgagccaacacctgtttgagtggtcagagaacaatttgcggcctttggaatggaaaaagcgactaagcgttgcacttgatgttgcaaggggtgttgagtaccttcacagccttgcccagcagacctttatccacagagatttgaagccatcaaacatacttcttggcgatgacatgaaggccaaggtggcagactttggattggtcagacttgcaccagctgatgggaagtgtgtctccatagagacaaggcttgctggcacttttgggtacctcgcaccagagtatgcagttactggacgagtgaccacaaaagctgatgtcttcagctttggggtcatcttgatggaactgattacaggacgcaaggcacttgatgagactcagcctgaagacagcatgcatttagttacatggttccggagaatgcagctcaacaaggaaacattccgcaaagcaatcgaccctgttattgaccttgatgaggagacatatgctagtgtttgtactgtttcagagcttgctggtcactgctgtgctagggaagcacaccaaaggcccgacatgggccatgctgttaatgtgctgtctaccctttcggaagtttggaaaccaaccgacccagactccgatgacagctatggtatcgacctgaacatgaccctgccacaggctctgaagagatggcaggcattcgaggatagcagccactttgacggtgcaacctcttcatttgttgcaagtttggataatactcagaccagcatccctacgaggcctcctggattcgcggagtcattcacctctgctgatggaagatag

SEQ ID NO: 14 - protein, 963 aa, Sorghum bicolor
MPFPTASTARRRRRYEGAAGGWCGVVVLALVALAAGAAAETSPSDVAAMQAVAKALGADKTLGWDVAGDPCSPKRWDGVSCDSSGRVTAIQVGKRGLTGTLPPEVGDLTALTRLEVFENKLSGPLPSLPGLSSLQILLAHNNSFASIPADFFKGLTGLTAVSIDYNPFASWTLPADLAACASLANFSANGANVSGTLPDFLGAMPGLQRLSLALNQLSGPVPASLAGAQLVQLWLNHANLNGSISFISNMTSLEQLWLHSNEFTGPLPDFAMLNNLWDLQLRDNKLTGPVPESLFKLKALKKVTLTNNLLQGPMPQIPVQLVAGTDMKADSERFCVLEAGKLCDPRVSLLLEIAAGFMYPASLAEDWKGNDPCSFPGVICSQGNITGLTFTNKGLSGSISPAIGKISSLKVLNLANNNITGTVPEEVAALPLLTDVDLSNNNLYGKLPTFASKSAVVKTAGNPNIGKDAPAPAAGSGDSNNNPSGGGSSGSNGNIGGSSSSSVGVIAGSVVGTVVGLGLVAALGFYCYKRKQKPFGRVQSPHAMVIHPRHSGSDDMVKITVAGGDANGGARASETYSQASSGPRDIHVVESGNMVISIQVLRNVTNNFSEENILGRGGFGTVYKGELHDGTKIAVKRMEAGVMGNKGLNEFKSEIAVLTKVRHRNLVSLLGYCLDGNERILVYEYMPQGTLSQHLFEWSENNLRPLEWKKRLSVALDVARGVEYLHSLAQQTFIHRDLKPSNILLGDDMKAKVADFGLVRLAPADGKCVSIETRLAGTFGYLAPEYAVTGRVTTKADVFSFGVILMELITGRKALDETQPEDSMHLVTWFRRMQLNKETFRKAIDPVIDLDEETYASVCTVSELAGHCCAREAHQRPDMGHAVNVLSTLSEVWKPTDPDSDDSYGIDLNMTLPQALKRWQAFEDSSHFDGATSSFVASLDNTQTSIPTRPPGFAESFTSADGR

SEQ ID NO: 15 - DNA, 2757 bp, Sorghum bicolor
atgggcggcccgggccaccagcaggtggtgggcgcgtcgctgctccggaccagctccagcctcctcggcggcggcggagccggcgcgggtgccggtggacagccggggatggggatggggatgggcggcggcggcggggtgctcccttcgcagtcgcccttctcgtccctcgtctcgccgcgcacgcagtatggcggcggcgggaacggcttgctggcgggcgcgtccagcgtcgcgtccatgctcagcaggcagcagtcgtatgggaatggggggactggggcaatgccgggcaccggtgctggtctccccatcggtgggatgcagcatagaggcggccttgatggcgttggtgatttggttgccactggagggcccgattccatggtgttctcgtcctcgggccctggtagtttgggcaaccagcttggtgctgacggcttacagcagcagcagcagcagctggatgcaccacaagattcacaaaatcagcagcagcagcagcagcaacagcaacagcaaatgtcaatggcatataatcagcagcatatgatgccacaaactcagcagcagcaacagcagcagcagcctgcagtgaagttggagaacggaggcgtccttggcggggtcaaactggagcagcagatggggcagcctgatcagagtgtttccacacagatgctgcgcagttcgagtggcggcgtgaagctcgagccgcagttgcaagcgttgaggagcttgggtgctgtcaagatggagcaccaaagctcagacccatctgtgttcctacagcaacagcagcagcaacatatgatgcagctgtctaagcagaacccccaggctgcagctactcagttgagtctcctacaacagcagcagcggttcttacagctgcagcaacagcaacagcagcagcagattctcaagaacctgcctttgcagagaaaccaattgcagcaacagcagcagcagcagcaacagcaacaacaacagcagcagcaacatcagcaccagcagttgcttcgtcaacaaagtctgaatatgcgaactggtaaaacacctgcttatgaaccagggacctgtgcaaagagattgacacattacatgtatcaccagcaaaacaggccacaggacaataacatcgagtactggagaaactttgtcaatgaatactttgccccaagtgccaagaagaggtggtgcgtttctctctatggcaatggtcgtcaaactactggagttttccctcaggatgtttggcattgtgagatatgcaataggaagccaggccgaggttttgaaacgacggttgaggtcttgccacggttgtgccaaatcaaatatgccagtggtacacttgaggagcttctgtatgttgatatgccaagagagtcccaaaattcatctggacagattgttttggactataccaaagcgatccaggagagtgtctttgagcaactgcgagtagttcgtgaggggcatctaagaattgtattcaaccaagacctgaagattgcatcttgggagttctgtgcccggcgtcacgaggaacttattcctcggagatcaatcataccacaggtcagtcaacttggttctgtggtgcaaaagtatcagtcttccgttcaaagttcagcatcgctctcaagtcaggacctgcaaaacaattgtaactcgtttgtcgcatgtgctcgccagttggctaaggcattggaagtgccgttggtaaatgatttaggatacacgaaaagatatgtccgctgcctccagattgcagaggtggtcaattgtatgaaagatttgattgatcacagcaggcagactgggtctggtccaatagagagcttgcataaattccctaggagggggaattcagggggggttagttctgttcaagcccagcagccatctgaggagcagaaacctgttccacagaattctaaccagagtggtcaaaattctgctcctgcaactggaatgcaaatctctgcctctgtcaatggtgatgctgcgtcaaacaattcactcaattgtgcaccatctacttccgcaccatcttcttcatctgttgttggtctcctccaaggctcagtaagtggcagacaagaccatccaacaagcagtggcaatggtctgtataatggtggaaacagtgcttcagttgctaaggccaactcaacgaactccatgcaatcaaatgggccagcatcgtttccttcaccagcaccctcggcatcaaatggcaatatgatgcctgctcctcagcactcaagccaaatgaattcgccaaccatgtcatcaaacccacctcctatgcaaacacctacaagtcgacttcaggaacctgagccaaatgagtctcaaagctcggtccagaggatattgcaagacttgatgatgcagtcccatattaatggtgttggaccagtgggaagcgatatgaggagagcaaacacaattactcctggtcttaatggtgtcaactccttagttggtaaccctatgacaaataaccctggaatcaatggaatgggatttggggctatgggtggccttggtcaacaaatgagaacggcaatggggaccaacgcattggcaatgaatggaaggaccgggatgaatcacagtgcgcatgacctgacacagttgagccaccagcagcaacagcgagatttaggaaaccaattgctcgggggccttagagctgcaaacagcttcaataaccttcaatacgactggaaatcggctcagtag

SEQ ID NO: 16 - protein, 918 aa, Sorghum bicolor
MGGPGHQQVVGASLLRTSSSLLGGGGAGAGAGGQPGMGMGMGGGGGVLPSQSPFSSLVSPRTQYGGGGNGLLAGASSVASMLSRQQSYGNGGTGAMPGTGAGLPIGGMQHRGGLDGVGDLVATGGPDSMVFSSSGPGSLGNQLGADGLQQQQQQLDAPQDSQNQQQQQQQQQQQMSMAYNQQHMMPQTQQQQQQQQPAVKLENGGVLGGVKLEQQMGQPDQSVSTQMLRSSSGGVKLEPQLQALRSLGAVKMEHQSSDPSVFLQQQQQQHMMQLSKQNPQAAATQLSLLQQQQRFLQLQQQQQQQQILKNLPLQRNQLQQQQQQQQQQQQQQQQHQHQQLLRQQSLNMRTGKTPAYEPGTCAKRLTHYMYHQQNRPQDNNIEYWRNFVNEYFAPSAKKRWCVSLYGNGRQTTGVFPQDVWHCEICNRKPGRGFETTVEVLPRLCQIKYASGTLEELLYVDMPRESQNSSGQIVLDYTKAIQESVFEQLRVVREGHLRIVFNQDLKIASWEFCARRHEELIPRRSIIPQVSQLGSVVQKYQSSVQSSASLSSQDLQNNCNSFVACARQLAKALEVPLVNDLGYTKRYVRCLQIAEVVNCMKDLIDHSRQTGSGPIESLHKFPRRGNSGGVSSVQAQQPSEEQKPVPQNSNQSGQNSAPATGMQISASVNGDAASNNSLNCAPSTSAPSSSSVVGLLQGSVSGRQDHPTSSGNGLYNGGNSASVAKANSTNSMQSNGPASFPSPAPSASNGNMMPAPQHSSQMNSPTMSSNPPPMQTPTSRLQEPEPNESQSSVQRILQDLMMQSHINGVGPVGSDMRRANTITPGLNGVNSLVGNPMTNNPGINGMGFGAMGGLGQQMRTAMGTNALAMNGRTGMNHSAHDLTQLSHQQQQRDLGNQLLGGLRAANSFNNLQYDWKSAQ

SEQ ID NO: 17 - DNA, 2949 bp, Sorghum bicolor
atgcctgtccgcagctcagtggccatgacgacgacggccgcccgtgctctcgtcgccctcctcctcgtcgccgtcgccgtcgccgacgatggggcgacgctggtggagatcaagaagtccttccgcaacgtcggcaacgtactgtacgattgggccggcgacgactactgctcctggcgcggcgtcctgtgcgacaacgtcacattcgccgtcgctgcgctcaacctctctggcctcaaccttgagggcgagatctctccagccgtcggcagcctcaagagcctcgtctccatcgatctgaagtcaaatgggctatccgggcagatccctgatgagattggtgattgttcatcacttaggacgctggacttttctttcaacaacttggatggcgacataccattttctatatcaaagctgaagcacctggagaacttgatattgaagaacaaccagctgattggtgcgatcccatcaacattgtcacagctcccaaatttgaagattttggatttggcacaaaacaaactgactggggagataccaaggcttatctactggaatgaggttcttcaatatctgggcttacggggcaatcatttagaaggaagcctctctcctgatatgtgccagctgactggcctttggtactttgatgtgaagaacaatagcttgaccggggtgataccagacaccattgggaactgtacaagttttcaagtcttggatttgtcttacaaccgctttactggaccaatcccattcaacattggtttcctacaagtggctacactatccttgcaagggaacaagttcaccggtccaattccttcagtaattggtcttatgcaggctctcgctgttctagatctgagttacaaccaattatctggtcctataccatcaatactaggcaacttgacatacactgagaagctgtacatccaaggcaataagttaactgggtcgataccaccagagttaggaaatatgtcaacacttcattacctagaactgaacgataatcaacttactgggtcaattccaccagagcttggaaggctaacaggcttgtttgacctgaaccttgcgaataaccacctggaaggaccaattcctgacaacctaagttcatgtgtgaatctcaatagcttcaatgcttatggcaacaagttaaatgggaccattcctcgttcgttgcggaaacttgaaagcatgacctatttaaatctgtcatcaaacttcataagtggctctattcctattgagttatcaaggatcaacaatttggacacgctggatttatcctgtaacatgatgactggtccaattccatcatcaattggcagcctagagcatctattgagacttaacttgagcaagaatggtctagttggattcatccccgcggagtttggtaatttgaggagtgtcatggagattgatttatcctataatcaccttggtggcctgattcctcaagaacttgaaatgctgcaaaacctgatgttgctaaaactggaaaataacaatataactggtgatctgtcgtctctgatgaactgcttcagcctcaatatcttaaatgtgtcgtacaataatttggctggtgttgtccctgctgacaacaacttcacacggttttcacctgacagctttttaggtaatcctggactctgtggatactggcttggttcgtcgtgtcgttccactggccaccacgagaaaccgcctatctcaaaggctgccataattggtgttgctgtgggtggacttgttatcctcttgatgatcttagtagctgtttgcaggccacatcgtccacctgcttttaaagatgtcactgtaagcaagccagtgagaaatgctccccccaagctggtgatccttcatatgaacatggcccttcatgtatacgatgacataatgaggatgactgagaacttgagtgagaaatacatcattggatacggggcgtcaagtacagtttataaatgtgtcctaaagaattgcaaaccggtggcaataaaaaagctgtatgcccactacccacagagccttaaggaatttgaaactgagcttgagactgttggtagcatcaagcaccggaatctagtcagccttcaagggtactcattatcacctgttgggaacctcctcttttatgattatatggaatgtggcagcttatgggatgttttacatgaaggttcatccaagaagaaaaaacttgactgggagactcgcctacggattgctcttggtgcagctcaaggccttgcttaccttcaccatgactgcagtccacggataattcatcgggatgtaaaatcaaagaatatactccttgacaaagattatgaggcccatcttacagactttggaattgctaagagcttatgtgtctcaaaaactcacacatcaacctatgtcatgggaactattggctacattgatcctgagtacgcccgcacttcccgtctcaacgaaaagtctgatgtctacagctatggcattgttctgctggagctgctgactggcaagaagccagtggacaacgagtgcaatctccatcacttgatcctatcgaagacggcaagcaacgaggtcatggataccgtggaccctgacatcggggacacctgcaaggacctcggcgaggtgaagaagctgttccagctggcgctcctttgcaccaagcggcaaccctcggaccgaccgacgatgcacgaggtggtgcgcgtcctggactgcctggtgaacccggacccgccgccaaagccgtcggcgcaccagctgccgcagccgtcgccagccgtgccaagctacatcaacgagtacgtcagcctgcggggcaccggcgctctctcctgcgccaactcgaccagcacctcggacgccgagctgttcctcaagttcggcgaggccatctcgcagaacatggagtag

SEQ ID NO: 18 - protein, 982 aa, Sorghum bicolor
MPVRSSVAMTTTAARALVALLLVAVAVADDGATLVEIKKSFRNVGNVLYDWAGDDYCSWRGVLCDNVTFAVAALNLSGLNLEGEISPAVGSLKSLVSIDLKSNGLSGQIPDEIGDCSSLRTLDFSFNNLDGDIPFSISKLKHLENLILKNNQLIGAIPSTLSQLPNLKILDLAQNKLTGEIPRLIYWNEVLQYLGLRGNHLEGSLSPDMCQLTGLWYFDVKNNSLTGVIPDTIGNCTSFQVLDLSYNRFTGPIPFNIGFLQVATLSLQGNKFTGPIPSVIGLMQALAVLDLSYNQLSGPIPSILGNLTYTEKLYIQGNKLTGSIPPELGNMSTLHYLELNDNQLTGSIPPELGRLTGLFDLNLANNHLEGPIPDNLSSCVNLNSFNAYGNKLNGTIPRSLRKLESMTYLNLSSNFISGSIPIELSRINNLDTLDLSCNMMTGPIPSSIGSLEHLLRLNLSKNGLVGFIPAEFGNLRSVMEIDLSYNHLGGLIPQELEMLQNLMLLKLENNNITGDLSSLMNCFSLNILNVSYNNLAGVVPADNNFTRFSPDSFLGNPGLCGYWLGSSCRSTGHHEKPPISKAAIIGVAVGGLVILLMILVAVCRPHRPPAFKDVTVSKPVRNAPPKLVILHMNMALHVYDDIMRMTENLSEKYIIGYGASSTVYKCVLKNCKPVAIKKLYAHYPQSLKEFETELETVGSIKHRNLVSLQGYSLSPVGNLLFYDYMECGSLWDVLHEGSSKKKKLDWETRLRIALGAAQGLAYLHHDCSPRIIHRDVKSKNILLDKDYEAHLTDFGIAKSLCVSKTHTSTYVMGTIGYIDPEYARTSRLNEKSDVYSYGIVLLELLTGKKPVDNECNLHHLILSKTASNEVMDTVDPDIGDTCKDLGEVKKLFQLALLCTKRQPSDRPTMHEVVRVLDCLVNPDPPPKPSAHQLPQPSPAVPSYINEYVSLRGTGALSCANSTSTSDAELFLKFGEAISQNME

SEQ ID NO: 19 - DNA, 1557 bp, Sorghum bicolor
atgggatgtattttgtccatcccggggagcgtagattatagcaatctgaagttcaaagataatcatccatctctatctgccacagcaggaatctctgctaataatggttgcattatgccaaatgatcatagggatgaacctgctcaaggtttttcagctggtgatgaatcaatggcttcaactgtccctgagctggactggatatggcaaggtggttttgagctgcagaggactggaagatcaccggagctgtgtgatggtttccaagcccacttatcatgttctgcttcacagttagtgctggatgtagttaagaaattcccttctaaagtccagcttgaggaagttcctcggcagaattcatggccgacacaatttcaggaaaatggtccaacttatgacaacataggtctttttttctttgctagggatgttcagagctatgaaaatcactacagtaaattagttgaaaatatgctgaagaatgatttagttctcagaggaagtgttggtactgttgagttgctcatattcccttccaatatcctgtcaaagaacttccaaaggtggaatatgttctactttctatggggtctattcagagttagcaaaaaagattcctctaacctcggccccaatttggtaaagtcaactaattttgcaccgagcttggaagccagtcatgaggtgtgtttggatggggagatatctttgaatcaacctctatgcagaagagctctagatgatcacctagattcagatacaaaagcaagttcaacaattagcaatggtgctatgggtccctctgccatgtctatgcaaagaaaacatcagaaacctgattatccagaacaccaagataaaatgagggacacttttggtggtaatgttagtgaaagagattttgatgtgaacatggtgcccgttacttgttctgtctccttaacccaccttgaggaagaatctggcaaggtgagcacaaccatcaaccttaatgacgcagacaaccttatggatatagaccatgtaaatacctgtgaggttagcacaggtgcactggatcgttcacatgcatcagttggtgcaaataaaagaagttttgagatggccaaagtagctgatgaagtcgatgaagaacccgagcataagaaaattaaattggaaaatgtagtgcctatgaactctggttcatgcgagaatgcctacaatggaaggttatcatctaaggtgcatcccctttcagcttcctctgtgaacgatggcactagcaataaactgatggctggaagctcaaacagtgatggaaagtgtgtgtttccacttgatctaaatgcagtggatgatgagaacatcgtaaatattccatcttcagatgatgaagagttgccagaacctgtttcgttacaggttggaaagcagaccaagggagatctatccctctcgcttgcatttccatctgggaaggaactaggtagcaaaccacaatttgagccacagagccacttgcctgagaggagcaataagaataatacatcatccatttggggccaacagtga

SEQ ID NO: 20 - protein, 518 aa, Sorghum bicolor
MGCILSIPGSVDYSNLKFKDNHPSLSATAGISANNGCIMPNDHRDEPAQGFSAGDESMASTVPELDWIWQGGFELQRTGRSPELCDGFQAHLSCSASQLVLDVVKKFPSKVQLEEVPRQNSWPTQFQENGPTYDNIGLFFFARDVQSYENHYSKLVENMLKNDLVLRGSVGTVELLIFPSNILSKNFQRWNMFYFLWGLFRVSKKDSSNLGPNLVKSTNFAPSLEASHEVCLDGEISLNQPLCRRALDDHLDSDTKASSTISNGAMGPSAMSMQRKHQKPDYPEHQDKMRDTFGGNVSERDFDVNMVPVTCSVSLTHLEEESGKVSTTINLNDADNLMDIDHVNTCEVSTGALDRSHASVGANKRSFEMAKVADEVDEEPEHKKIKLENVVPMNSGSCENAYNGRLSSKVHPLSASSVNDGTSNKLMAGSSNSDGKCVFPLDLNAVDDENIVNIPSSDDEELPEPVSLQVGKQTKGDLSLSLAFPSGKELGSKPQFEPQSHLPERSNKNNTSSIWGQQ

SEQ ID NO: 21 - DNA, 522 bp, Sorghum bicolor
atgtctagatctgtggagtctctcatagttggtcgggtgattggagaagttctcgactcctttagcccatgtgtgaagatggtagtgacctacaactcaaacaagcttgtcttcaatggccatgagatctacccatcagcagttgtatccaaaccaagagtagaggttcaagggggtgacttgcggtctttcttcacattggttatgacagacccagatgttccagggccaagtgatccatatctaagggagcaccttcactggatcgtgactgatatacctgggacaacagatgcctcattcgggcgagaagttataagctatgagagcccaagacctagcattggtatccacaggttcatttttgttctcttcaagcagaagcgcaggcaaactgtagctatgccatcctccagggaccatttcatcacacgacagtttgctgaggaaaatgatcttggactccctgtagctgctgtctacttcaacgctcagagagaaactgctgctaggaggcgctga

SEQ ID NO: 22 - protein, 173 aa, Sorghum bicolor
MSRSVESLIVGRVIGEVLDSFSPCVKMVVTYNSNKLVFNGHEIYPSAVVSKPRVEVQGGDLRSFFTLVMTDPDVPGPSDPYLREHLHWIVTDIPGTTDASFGREVISYESPRPSIGIHRFIFVLFKQKRRQTVAMPSSRDHFITRQFAEENDLGLPVAAVYFNAQRETAARRR

SEQ ID NO: 23 - DNA, 357 bp, Sorghum bicolor
atgagggctttctacaccctgaaggtactgattgacccggatgctccaagtccaagccatccatcactaagggagtacttgcactggatggtgacagatattcctgaaacaactagtgtcaactttggccaagagctagtattttatgagcgaccggacccaagatctggcatccacaggctggtatttgtgctgttccgtcaacttggcagggggacagtttttgcaccagaaatgcgccacaacttcaactgcagaagctttgcacggcaatatcacctcagtgttgccactgctacatatttcaactgtcaaagggaaggtggatcgggcggaagaaggtttcgggaagagtag

SEQ ID NO: 24 - protein, 118 aa, Sorghum bicolor
MRAFYTLKVLIDPDAPSPSHPSLREYLHWMVTDIPETTSVNFGQELVFYERPDPRSGIHRLVFVLFRQLGRGTVFAPEMRHNFNCRSFARQYHLSVATATYFNCQREGGSGGRRFREE

SEQ ID NO: 25 - DNA, 1140 bp, Sorghum bicolor
atggcgaagctggggccggggcaggggctcgggtgcgaggcggcggaggggtcgctcgtgcccagccggaagcgggagtacaagccctgcggcaagcacactgaggggaagcgcccgctctatgccatcgggttcaacttcatggacgcgcgctactacgacgtcttcgccaccgtcggcggcaaccgcttgacaacttaccgctgccttgagaatggtagttttgctcttctacaagcttacattgatgaggataaggatgagtcattctacactctaagctgggctcgtgaccatgttgatggctcaccactgctggtggcagcaggaagcaatgggatcattcgggtcatcaattgtgctacggagaagttagctaagagctttgttggccatggtgactcaataaatgagataagaactcaaccgttgaagccttcgctcatcatttctgcaagcaaggatgaatctgttaggctatggaatgtccatacagggatctgtatcttgatatttgctggagctggaggtcatcgcaatgaagtgttgagtgttgactttcaccctagtgatatcgagcgttttgcaagctgtggcatggacaacactgtgaaaatctggtcaatgaaagaattttggctatatgttgacaaatcatattcatggactgaccttccatcgaagtttccaacaaaatatgtccagtttccggtcttgattgctgcagtacactctaactatgttgactgtacaagatggcttggtgacttcatcctatcaaagagtgttgacaatgaaattgtgctctgggaaccaaagacaaaagaacagagtcctggggagggaagcatcgatattcttcaaaagtaccctgtcccagaatgtgacatctggttcatcaaattttcatgtgattttcacttcaatcagttggctataggcaatcgtgaaggaaaaatatacgtgtgggaagtacagtcgagccctcctgtcctaattgctcggctgtataatcagcaatgcaaatcgccaataaggcaaactgcagtgtccttcgatggaagcacaatccttggagctggcgaagatggcaccatctggcgatgggatgaagtggatcatccgagcaccaaaaactga

SEQ ID NO: 26 - protein, 379 aa, Sorghum bicolor
MAKLGPGQGLGCEAAEGSLVPSRKREYKPCGKHTEGKRPLYAIGFNFMDARYYDVFATVGGNRLTTYRCLENGSFALLQAYIDEDKDESFYTLSWARDHVDGSPLLVAAGSNGIIRVINCATEKLAKSFVGHGDSINEIRTQPLKPSLIISASKDESVRLWNVHTGICILIFAGAGGHRNEVLSVDFHPSDIERFASCGMDNTVKIWSMKEFWLYVDKSYSWTDLPSKFPTKYVQFPVLIAAVHSNYVDCTRWLGDFILSKSVDNEIVLWEPKTKEQSPGEGSIDILQKYPVPECDIWFIKFSCDFHFNQLAIGNREGKIYVWEVQSSPPVLIARLYNQQCKSPIRQTAVSFDGSTILGAGEDGTIWRWDEVDHPSTKN

SEQ ID NO: 27 - DNA, 2700 bp, Sorghum bicolor
atggcttcgtcgtcgaaggcctccgactcctcctcccaacgatccaagcggtcggatcaggggatgatgggcagggacgccgctgccgcctctgctgtctcgatccacgcgaacctgacgcagctgatacgccaaatcaaatcggggcgcctcgcgtacatcaaggagaaattggaggcgaacaggaagacgctgcagaggcactcctgtgcgctgttcgacgtggcagcggcggcggaggtggcgtcgaggggcacctatggcggcaacgcgctgtcgcagcgcgcggcggagggacagtccaggctcgctgggtcagacctggcaaacgggataggggagagggacgtggtgtacatgcaggaggagaacctggcggccgggacgctcgcgctctccagctcgggcgctgccgcgcagcggacagtcgtgcggttcgtgaagctgccgttggttgagaggatccctccgtacaccacttggattttcctggacaaaaaccaaagaatggccgacgatcagtcagttgttggtaggagaagaatttactatgatccagttggaaatgaggctctgatctgcagtgacagtgatgaagaaatcccagaaccagaggaagagaaacactttttcacagagggagaagatcaattgatatggagagctactcaagagcatgggttaaaccgagaggttattaatgtcctctgccagtttattgatgcaactccatcagaaattgaggaaagatctgaagttctatttgagaaaaatgagaagcactctgcatcttcagacaagatagaaagccaactttctctggacaaaactatggatgctgttctggattcttttgataatctcttctgccgcagatgcttggtttttgattgccgcctccatggttgctcacagaatttggtattcccatgtgagaagcaaccctacagctttgagcctgctgaaaacaagaagccatgtggtcatcagtgctaccttcgatttccccagtggagagaaggatttcaagagatgcatgatgatggtcttggtggctgtgcaacatatactatggaatcaggaaccgcctcacacaaagttgatgttaatattatgtctgaatcagaagattcaaaccgagagaaaggcaacattagatccatgacactatttggaaccagtggatcaaaaataatttcttctgttagcgctgaggaaagcactactccgccttcagcagatacctctgaaacagagaatgtaccctctgatttgcctcccagtagtttaaggaaacacaagatttcaaaacatggacctaggtacagggagcgttctcctggcaaaaggcagaaggtttttacttctgacatttcttttgcaagcaatatactgaataaactttccattccggagattcgtgacacaagaccagagtctagagaatccgggggtgataaactacgaattcttgacgagtccactaagaagacttcaagcaaagatatctatggagaaaacccaactactactactgaaaatgtgggaagagaaagtaataaagtatcttcaacaaataatttgtcggagcacactctttcttgttggagtgccttagagcgagatctatacttgaagggcatagagatatttggaaagaacagctgtctcattgccagaaatttactatctggtctgaagacctgcatggaagtggccaactacatgtacaacaatggtgcagcgatggcgaagagacctctcttgaataaatccatctcgggcgactttgcagaaactgaacaagactacatggagcaagacatggttgccagaacaagaatctatcgtcggaggggccgcaatcggaagctgaaatatacttggaagtctgcagggcatccaactgttagaaaaagaattggtgatgggaagcaatggtacacacaatataacccatgtgtgtgccagcaaatgtgtggtaaagattgcccctgtgtggaaaatggaacttgctgcgaaaagtactgtgggtgttcgaagagctgcaaaaacaagtttagaggctgtcattgtgcaaaaagtcaatgcagaagcagacagtgcccctgttttgcagccaatcgtgaatgtgatccagatgtttgtaggaattgctgggtgagctgtggggatggttcactaggtgagccacctgcaagaggtgatggctatcagtgtggaaatatgaagctccttttgaaacaacagcaaaggattttgttaggaaggtctgatgttgcaggttggggtgcattcattaagaatcctgtaaataaaaatgattatcttggagaatatactggtgaattgatctctcacaaggaagcagacaaacgcggcaaaatttatgaccgggcaaactcatcatttctatttgatttaaatgaccagtatgtattggatgcttatcgcaagggggacaaattgaagttcgcaaatcactcatctaaccccaactgctatgcaaaggtgatgttggtggctggcgaccatcgggttggtatctatgcgaaggagcatattgaggctagcgacgaactcttttatgattatcgttatgggcctgaccaggctccagcttgggctaggagacccgaaggatcaaagaaggacgaagcatccgtctctcatcatcgagcacacaaagttgctcgatag

SEQ ID NO: 28 - protein, 899 aa, Sorghum bicolor
MASSSKASDSSSQRSKRSDQGMMGRDAAAASAVSIHANLTQLIRQIKSGRLAYIKEKLEANRKTLQRHSCALFDVAAAAEVASRGTYGGNALSQRAAEGQSRLAGSDLANGIGERDVVYMQEENLAAGTLALSSSGAAAQRTVVRFVKLPLVERIPPYTTWIFLDKNQRMADDQSVVGRRRIYYDPVGNEALICSDSDEEIPEPEEEKHFFTEGEDQLIWRATQEHGLNREVINVLCQFIDATPSEIEERSEVLFEKNEKHSASSDKIESQLSLDKTMDAVLDSFDNLFCRRCLVFDCRLHGCSQNLVFPCEKQPYSFEPAENKKPCGHQCYLRFPQWREGFQEMHDDGLGGCATYTMESGTASHKVDVNIMSESEDSNREKGNIRSMTLFGTSGSKIISSVSAEESTTPPSADTSETENVPSDLPPSSLRKHKISKHGPRYRERSPGKRQKVFTSDISFASNILNKLSIPEIRDTRPESRESGGDKLRILDESTKKTSSKDIYGENPTTTTENVGRESNKVSSTNNLSEHTLSCWSALERDLYLKGIEIFGKNSCLIARNLLSGLKTCMEVANYMYNNGAAMAKRPLLNKSISGDFAETEQDYMEQDMVARTRIYRRRGRNRKLKYTWKSAGHPTVRKRIGDGKQWYTQYNPCVCQQMCGKDCPCVENGTCCEKYCGCSKSCKNKFRGCHCAKSQCRSRQCPCFAANRECDPDVCRNCWVSCGDGSLGEPPARGDGYQCGNMKLLLKQQQRILLGRSDVAGWGAFIKNPVNKNDYLGEYTGELISHKEADKRGKIYDRANSSFLFDLNDQYVLDAYRKGDKLKFANHSSNPNCYAKVMLVAGDHRVGIYAKEHIEASDELFYDYRYGPDQAPAWARRPEGSKKDEASVSHHRAHKVAR

SEQ ID NO: 29 - DNA, 2733 bp, Sorghum bicolor
atgatgtcgcggtcgtataccaacctgctcgacctcgcggagggcaacttcgcggcgctgggcccggccggcggcagcgggcggcagaggcagggatcgttcgggatgaggcggatgtcccgggtgatgacggtgccggggacgctgtcggagctcgacggcgaggacgagtcggagccggcggcgaccaacagcgttgcctccgacgcgccctcgtcgctggcagcggaccgcgtcatagtggtctcgaaccagttgcccatcgtcgcgcgtcgaaggcccgacggccgaggatggtccttctcatgggacgacgactcgcttctgctccagctccgcgacggcattcccgacgagatggaagtgctgttcgtcggttccctccgagccgatgtccccgtagcggagcaggacgaggtgtcgcaggcgctgctcgaccgattccgctgcgcaccggtgttcctacctgaccacctcaacgaccggttctaccacggcttctgcaagcgccaactctggcctctgtttcactacatgctccccttctcatcatccgcgtctgccgccaccacctcttcctccgtcgccccttcgtcaccaggcaacggtcgcttcgaccgcagcgcttgggaggcgtatgttctcgccaacaagttcttcttcgagaaggtcgtggaggtaatcaacccggaggaggactacgtctgggttcatgactaccatctcatggcgctgcctaccttcctccgccgccgcttcaaccgcctccgcatcggattcttcctccacagcccctttccctcgtccgagatctaccgcaccctccctgttcgcgaggagatattgaaggctctgctcaattgcgacctcattgggttccacactttcgattacgccaggcacttcctctcgtgctgcagtaggatgctgggaattgaataccagtccaagcgtgggtacattggattggattactttggccgcactgttgggatcaaaatcatgccagtgggaattcatatgggtcaattagagtcaggtctgcgcttgcctgatagagaatggagactttctgagcttcaacagcagttcgaggggagaactgtcttgcttggtgtggatgatatggatatctttaaggggatcaatttgaagcttcttgcctttgagaacatgttgaggacacatcccaagtggcaagggcgagcagtgttagtgcagattgctaacccggcccgtggaaggggtaaggatctggaagccatccaggctgagattgaggagagctgccgaaggatcaatggagactttggccagtcagggtatagcccggttgttttcatcgatcgtgatgtgtcaagtgttgagaagattgcctattatacgatagcggaatgtgtggtggtgactgctgtgagggatgggatgaacttgacaccatatgagtacattgtcagtaggcagggtgcaccaggatctgagtcagtatcagaggtgagtgggccaaagaagagcatgctggttgtgtcagagtttattggctgctcaccgtcactgagtggtgctattagggttaacccatggaatatagaggcaactgcagaggcgatgaatgaggccatttcaatgccagaacaggaaaaacagttgaggcatgagaagcattaccgttatgtcagcagccatgatgttgctttttggtcaaggagcttcatcctagacttgcaaagggcttgtcaggaccactttaagaggacttgttggggcatagggttgggttttggtttcagggtggtggccttggaccctcatttcacaaagctcaacatggatttgattgttaatgcttatgagatttcagagagcagggctatattgcttgattatgatggaactctggttcctcaaacttccatcaacaaggaacctagtccagaggttttgagcatcatcaataccctttgctctgatagtagaaacaccgtttttcttgtcagtggtcgagacaaagatacgttgggaaagtggttctcctcatgtccaaaattgggtattgcagctgaacatggttacttcttgaggtggtctagagaagaagagtggcaaacatgcactcaggccttggacttcggatggatgcaaatggcaaggcctgtgatgaatttgtatacagaagcaactgatggatcctacattgagacgaaggaaagtgccttggtgtggcaccatcaggatgctgacccaggctttggatcctcacaggcaaaggagatgcttgatcacctggaaagtgtattagcaaatgaaccagtctctgtcaagagtggccagttcattgtcgaagtcaaaccacagggagtaaccaagggaatagttgccgagaggatacttgcatcagtgaaggagagaggaaagcaggctgatttcgtattgtgcatcggcgatgataggtccgatgaggacatgtttgaaaatattgctgatatcattaataggaatgtggttgatccaagaacatcgctgtttgcgtgcactgtgggacaaaaaccaagcaaagccaaattctacctggacgatacattcgaagtggtcactatgctgagcgcacttgcagatgccacaggacctgaactggagactgattcggctgatgaattggccgcatctatctcttcacttgatattggtgacgaacaatcagaatccagtgatagaccaattggagggtcttag

SEQ ID NO: 30 - protein, 910 aa, Sorghum bicolor
MMSRSYTNLLDLAEGNFAALGPAGGSGRQRQGSFGMRRMSRVMTVPGTLSELDGEDESEPAATNSVASDAPSSLAADRVIVVSNQLPIVARRRPDGRGWSFSWDDDSLLLQLRDGIPDEMEVLFVGSLRADVPVAEQDEVSQALLDRFRCAPVFLPDHLNDRFYHGFCKRQLWPLFHYMLPFSSSASAATTSSSVAPSSPGNGRFDRSAWEAYVLANKFFFEKVVEVINPEEDYVWVHDYHLMALPTFLRRRFNRLRIGFFLHSPFPSSEIYRTLPVREEILKALLNCDLIGFHTFDYARHFLSCCSRMLGIEYQSKRGYIGLDYFGRTVGIKIMPVGIHMGQLESGLRLPDREWRLSELQQQFEGRTVLLGVDDMDIFKGINLKLLAFENMLRTHPKWQGRAVLVQIANPARGRGKDLEAIQAEIEESCRRINGDFGQSGYSPVVFIDRDVSSVEKIAYYTIAECVVVTAVRDGMNLTPYEYIVSRQGAPGSESVSEVSGPKKSMLVVSEFIGCSPSLSGAIRVNPWNIEATAEAMNEAISMPEQEKQLRHEKHYRYVSSHDVAFWSRSFILDLQRACQDHFKRTCWGIGLGFGFRVVALDPHFTKLNMDLIVNAYEISESRAILLDYDGTLVPQTSINKEPSPEVLSIINTLCSDSRNTVFLVSGRDKDTLGKWFSSCPKLGIAAEHGYFLRWSREEEWQTCTQALDFGWMQMARPVMNLYTEATDGSYIETKESALVWHHQDADPGFGSSQAKEMLDHLESVLANEPVSVKSGQFIVEVKPQGVTKGIVAERILASVKERGKQADFVLCIGDDRSDEDMFENIADIINRNVVDPRTSLFACTVGQKPSKAKFYLDDTFEVVTMLSALADATGPELETDSADELAASISSLDIGDEQSESSDRPIGGS

SEQ ID NO: 31 - DNA, 678 bp, Sorghum bicolor
atggcgcgcgagaggcgggagatacggcggatagagaacgcggcagcgcggcaggtgacctactccaagcgccggcgcgggctgttcaagaaggcggaggagctcgcggtgctctgcgacgccgacgtcgcgctcgtcgtcttctccgccaccggcaagctctcgcagttcgcgagcaccagtatgaatcatatcattgacaagtacagtacacattctaagaatctggggaaatcacatcagcagtctcctattgatttgaatatagagcagagcaagtacactggtttgaacgagcaacttgcagaagcaactcatggacttagacagatgagaggtgaaaaccttgagggattgagtgtcgaggaattgcaccaaatggaaaggaaacttgaagcaggattgcatagagtgcttagtactaaggaccagttattcacgcaacaaatcagcgaactacaacaaaagggaacacagctggaagatgagaacaggcgtctaaaagaacaaatgcctcaggtgttaacagctggcacaatggtggttggtgctggtgcagaaaatatcctcactgaagatggacagtcgtctgaatctgtaatgactgcattgcattcaggaagctcgctcgacaatgatgatggttctgatatatgcttgaagttatcgttgccttga

SEQ ID NO: 32 - protein, 225 aa, Sorghum bicolor
MARERREIRRIENAAARQVTYSKRRRGLFKKAEELAVLCDADVALVVFSATGKLSQFASTSMNHIIDKYSTHSKNLGKSHQQSPIDLNIEQSKYTGLNEQLAEATHGLRQMRGENLEGLSVEELHQMERKLEAGLHRVLSTKDQLFTQQISELQQKGTQLEDENRRLKEQMPQVLTAGTMVVGAGAENILTEDGQSSESVMTALHSGSSLDNDDGSDICLKLSLP

SEQ ID NO: 33 - DNA, 681 bp, Sorghum bicolor
atggggcgcggcaagatcgagatcaagcggatcgagaacgccaccaaccggcaggtgacctactccaagcgccgcacggggatcatgaagaaggcgcgcgagctcaccgtgctctgcgacgcccaggtcgccatcatcatgttctcctccaccggcaagtaccacgagttctgcagccccgggaccgacatcaagaccatctttgaccgataccagcaggccatcgggaccagcctatggaacgagcagtatgagaatatgcagcgcacgctgagccatctcaaggacatcaatcgcaacctgcgcacagagattaggcaaaggatgggcgaggatctggacactctggagttcgacgagctgcgcggtcttgagcaaaatgttgatgcggctctcaaggaggttcgccataggaagtaccatgtgatcgccacacagactgaaacttacaagaaaaaggtgaagcactcgtacgaggcgtacaagaacctgcagcaggagctgggcatgcgcgaggacccggcgttcgggttcgtggacaacactggcgccggcggttgggacggcgccgcggcggcgctgggcggcggcgccccggacatgtacgccttccgcgtggtgcccagtcagcccaacctgcacggcatggcctatggctcccacgacctccgtcttggctag

SEQ ID NO: 34 - protein, 226 aa, Sorghum bicolor
MGRGKIEIKRIENATNRQVTYSKRRTGIMKKARELTVLCDAQVAIIMFSSTGKYHEFCSPGTDIKTIFDRYQQAIGTSLWNEQYENMQRTLSHLKDINRNLRTEIRQRMGEDLDTLEFDELRGLEQNVDAALKEVRHRKYHVIATQTETYKKKVKHSYEAYKNLQQELGMREDPAFGFVDNTGAGGWDGAAAALGGGAPDMYAFRVVPSQPNLHGMAYGSHDLRLG

SEQ ID NO: 35 - DNA, 2961 bp, Sorghum bicolor
atggcgtccaacacaggagcgtcaggatggttcaggggtaaggtgaaggctgtgacatctggggattgtctactaatcatggggagctcaaaggctgagatcccacctgagaagtccatcaccctgtcctaccttatggccccaaggctggctcgccgaggtggagttgatgagccttttgcatgggaaagcaaagagtttctgaggaagctttgtatagggaaggaggtcacgttcagagtggattatacagctcctaatattggacgagaatttggaactgtttatctaggcgacaagaatgttgcatactcagtagtttctgctggatgggcaagggtaaaggagcaaggccccaaggggggcgaacaaaacccttaccttgctgagctgttgaggttggaggaagtcgccaagcaacagggtgttggtcgttggagcaaggaacctggtgctgctgaagagtcaataagagatcttccaccatctgcaattggtgaagcaagtggttttgatgcaaagggttttgcggttgcaaataaaggcaagagtctggaggcaatagttgaacaagtccgcgatggcagtactgttcgtgtgtatttactccctagtttccagtttgtgcagatatatgttgctggagtacaggctccatcaatggggagacgcccatcggtacctactgtaattgctgaaactgatgatactgctaatggcgtgaacggtgaagattctgagggaacacctgcgcaactgactacagcacaaagacttgttgcttctgcagcttctgctgaagttccaccagataggtatggaagagaagccaagcacttcacagagactagagtcctcaacagagatgtgcgtattgtggtggaaggcacagatagctttagtaatataattggttctgtgtattaccctgatggagagactgcaaaagacttggcccttgagcttgttgaaaatgggcttgcaaagtatgttgagtggagtgctaatatgcttgatgttgaagtaaaaataaagctgaagaacgcagaacttcaggctaaaaaggatcaattgagaatctggacagggtttaagccaccggtgacaaactcgaagcccattcatgaccagaaatttactggaaaagtggtagaggttgtaagtggggattgtattattgtggctgatgatgctgctccatatggcagtccttcagctgaacgtcgggttaatctgtcaagcattagggctcctaagttgggcaatgctcgtacagatgtgaagcctgaaccttttggtcgtgaatctaaggaattcttgcgcacgaggttgattggcaagcaagtggctgttgaaatggaatactctcgaaggatcagcactgtggatggacagagtgctgctccaacagcaaacatggctgatacgagagttctagattatggttcagtatttctgggttcaccatcacagactgatggagatgacatatcttctgctccgagctctgccagccagcctggagttaatgttgctgagcttttgctctcacgaggctttgctaaaacatctaaacacagggattatgaggaaagatcacactattatgatgctttattagcagctgaatcacgggctgagaaagcaaagaaaggagtccattctctaaaagaatctcctgtgatgcatataacagatttgacaactgtatctgcaaagaaggccaaagatttccttcccttcttgcagcggaacagaaggcattcggccatcgtcgaatatgtttttagtggccatcggttcaaactaacaattcctaaggagacttgcagtattgccttctcattatctggtgttcggtgtcctggtaaaggcgaaccatactcagatgaagctattgctttgatgaggagaaggatactgcaacgtgatgtggagatagaggttgaagcagttgacaggacaggaacattcataggttctttgtgggagtccaagaccaacatgggctctgtacttctggaagctgggctcgccaaactgagttcatttggcttggataggatctcagatgcttatgtcctacaaagagctgaacagtctgcaaagcaacaaaagattaagatatgggagaactatgtcgagggtgaaaatgcttccaacggatccacacctgaatctaaacaaaaggaaattctcaaggttgtcgtcacggaagttcttggtggtgggaagttttatgttcagacagtgggtgaccagagggtggcttcaattcaacagcagcttgcatctttgaaacttaaagatgcgccagtaattggtgcttttaatcctgtgaagggagagatagtcctcgcacaatttagccttgacaactcctggaacagagctatgattgttaatggacctcgttctgtagaatctccgaacgacaagtttgaagtattctatattgactatggcaaccaagaggtggttacctacagtcgtctacgacctgtggacccatctgtttcctcgtctcctgctcttgctcagctatgcagccttgctttcataaaagtgcccagtcttgaggatgacttcggtcaggaagcagcagagtatctaagcgaatgtttgctcagtagctcaaaacaataccgggcaatgatcgaagaacgtgatgcttctgggggaaaatcaaaaggacaaggaaccggaaatgttctcattgttactcttgttgatgcggagacagaaagtagcataaatgctaccatgcttgaggaagggcttgcccggcttgaaagaagcaagagatgggacactagggagaggaagacagctctccagaacctggaacagttccaggagaaggcaaagaaggaaaggctgcggatctggcagtacggagatgttgaatcggacgaggaggagcaggccccagctgcaaggaagcctggaggtcgtcggtag

SEQ ID NO: 36 - protein, 986 aa, Sorghum bicolor
MASNTGASGWFRGKVKAVTSGDCLLIMGSSKAEIPPEKSITLSYLMAPRLARRGGVDEPFAWESKEFLRKLCIGKEVTFRVDYTAPNIGREFGTVYLGDKNVAYSVVSAGWARVKEQGPKGGEQNPYLAELLRLEEVAKQQGVGRWSKEPGAAEESIRDLPPSAIGEASGFDAKGFAVANKGKSLEAIVEQVRDGSTVRVYLLPSFQFVQIYVAGVQAPSMGRRPSVPTVIAETDDTANGVNGEDSEGTPAQLTTAQRLVASAASAEVPPDRYGREAKHFTETRVLNRDVRIVVEGTDSFSNIIGSVYYPDGETAKDLALELVENGLAKYVEWSANMLDVEVKIKLKNAELQAKKDQLRIWTGFKPPVTNSKPIHDQKFTGKVVEVVSGDCIIVADDAAPYGSPSAERRVNLSSIRAPKLGNARTDVKPEPFGRESKEFLRTRLIGKQVAVEMEYSRRISTVDGQSAAPTANMADTRVLDYGSVFLGSPSQTDGDDISSAPSSASQPGVNVAELLLSRGFAKTSKHRDYEERSHYYDALLAAESRAEKAKKGVHSLKESPVMHITDLTTVSAKKAKDFLPFLQRNRRHSAIVEYVFSGHRFKLTIPKETCSIAFSLSGVRCPGKGEPYSDEAIALMRRRILQRDVEIEVEAVDRTGTFIGSLWESKTNMGSVLLEAGLAKLSSFGLDRISDAYVLQRAEQSAKQQKIKIWENYVEGENASNGSTPESKQKEILKVVVTEVLGGGKFYVQTVGDQRVASIQQQLASLKLKDAPVIGAFNPVKGEIVLAQFSLDNSWNRAMIVNGPRSVESPNDKFEVFYIDYGNQEVVTYSRLRPVDPSVSSSPALAQLCSLAFIKVPSLEDDFGQEAAEYLSECLLSSSKQYRAMIEERDASGGKSKGQGTGNVLIVTLVDAETESSINATMLEEGLARLERSKRWDTRERKTALQNLEQFQEKAKKERLRIWQYGDVESDEEEQAPAARKPGGRR

SEQ ID NO: 37 - DNA, 1698 bp, Sorghum bicolor
atggggcggtcgagaggggtgccgaattccggtgacgatgacaccggacacaggtcgaagcggaggagggtctcggggtcgggcggggacgcgacggactccatttcagccgccatcgggggagctggagagggagggggcaagaaggcgctctaccactgcaactactgcaacaaggacatctccgggaagatacggatcaaatgctccaagtgccctgacttcgacctctgcgtggagtgcttctctgttggcgctgaagttaccccacaccgcagcaaccatccatacagagtcatggacaacctgtctttcccacttatttgcccagactggaatgcagatgaagaaattctcctccttgagggaattgaaatgtatggtctgggaaactggcttgaagtggcagaacatgttggtaccaagtctaagttacagtgtattgatcattacacaacagcatacatgaactcaccttgttatcccctcccggatatgtctcatgttaatggcaagaacaggaaggagcttctagctatggctaaagtgcagggtgagagtaaaaaagggacttcactgttatctggagaactgactcctaaggctgaatctccattttctccctccagggtcaaggtggaagatgcacttggagaaggtccagcaggtcgatcaccttcacacatagctgttggtgcaaataaaaaggcttcaaatgtgggacagattaaagatggtgctaatgtgtcaaaaatcgaagatggtcatgtcgatagaagcgttggtgtgaagaagcccagatattctgcagatgaaggcccttcgttgactgaactgagtggatacaatgcaaagagacatgagtttgacccagagtatgataatgatgccgaacaagcgcttgctgagatggaatttaaagaaactgattcggaaaccgatcgtgaactgaaactccgtgttcttcgtatttatctgtccaggcttgaagaaagaaaaaggagaaaggagttcatattggaaagaaatttattgttccctaatcccttggagaaagatcttacaaatgaagacagggaagtttaccatcgctataaggtcttcatgcgttttctttccaaggaggaacatgaagccctcattaggagtgtcattgaggagcgaaaaattcggaggagaattcaagaactccaggaatgtcgctctgctgggtgccgcacactggctgaagcaaagatacacatagaacaaaagaggaaaaaagaatacgagctgaatgcccaaaaagctaaggagagcagccttattgcaaataataaatcggtacagaagatgaatcgatctatgaaaattgagtctgatgggaatttggatccaaagaaaggtggtgctggcttggattctcctaaaactacaggacttacaagtgttaagcagtgggatgactgggatatagttggtcttcctggggcagagctattaagtgctagcgaaaagcttctatgttgtcagaacagattgctacctagtcattaccttagaatgcaggaggtgttgatgcaggagatattcaagggtagtgtcttaaagaaggaagatgcccatgtcttatttaaggttgatcctaccaaagtagatagtgtttatgatatggtaacgaaaaagctgggcaaccatgaggaggctccaactgtctag

SEQ ID NO: 38 - protein, 565 aa, Sorghum bicolor
MGRSRGVPNSGDDDTGHRSKRRRVSGSGGDATDSISAAIGGAGEGGGKKALYHCNYCNKDISGKIRIKCSKCPDFDLCVECFSVGAEVTPHRSNHPYRVMDNLSFPLICPDWNADEEILLLEGIEMYGLGNWLEVAEHVGTKSKLQCIDHYTTAYMNSPCYPLPDMSHVNGKNRKELLAMAKVQGESKKGTSLLSGELTPKAESPFSPSRVKVEDALGEGPAGRSPSHIAVGANKKASNVGQIKDGANVSKIEDGHVDRSVGVKKPRYSADEGPSLTELSGYNAKRHEFDPEYDNDAEQALAEMEFKETDSETDRELKLRVLRIYLSRLEERKRRKEFILERNLLFPNPLEKDLTNEDREVYHRYKVFMRFLSKEEHEALIRSVIEERKIRRRIQELQECRSAGCRTLAEAKIHIEQKRKKEYELNAQKAKESSLIANNKSVQKMNRSMKIESDGNLDPKKGGAGLDSPKTTGLTSVKQWDDWDIVGLPGAELLSASEKLLCCQNRLLPSHYLRMQEVLMQEIFKGSVLKKEDAHVLFKVDPTKVDSVYDMVTKKLGNHEEAPTV

SEQ ID NO: 39 - DNA, 765 bp, Sorghum bicolor
atggacggcggcggcacgcaccgcacgccggaagacgtgttccgggacttccgcgcgcggcgggctggcatgatcaaagcgctcaccaccgacgtggagaagttctaccagcagtgtgacccagagaaagagaatctgtgtttgtatggtcttcccaatgaaacatgggaagtgaacttgcctgcagaggaggttcctcctgaacttccagagccagctctgggaattaattttgctcgtgacgggatggatgagaaagattggctgtcactagtagcggtgcacagtgatgcttggttgctggctgtggccttttactttggtgcaagatttggatttgacaaagaatccaggaagcggctttttgtcatgattaataacctccctaccatatatgaagttgtcacgggaactgccaagaagcaaaccaaggagaaaactcccaaaagcagcagcaagagcaataaatctggctcaaaaccaccacgccagccagaacccaactcaaggggttccaagatgccacctccaaaggatgaggatgatagcggaggcgaggaagaggaggaagaggaagatcatgaaaacacattgtgtggtgcttgtggtgacaactacggacaggatgagttctggatatgctgtgatgcctgtgagacttggttccatggcaagtgtgtcaagatcactcctgccaaggccgagcacatcaagcactacaagtgtccgaactgcagtggtagtagcaagagagcgcgggtgtga

SEQ ID NO: 40 - protein, 254 aa, Sorghum bicolor
MDGGGTHRTPEDVFRDFRARRAGMIKALTTDVEKFYQQCDPEKENLCLYGLPNETWEVNLPAEEVPPELPEPALGINFARDGMDEKDWLSLVAVHSDAWLLAVAFYFGARFGFDKESRKRLFVMINNLPTIYEVVTGTAKKQTKEKTPKSSSKSNKSGSKPPRQPEPNSRGSKMPPPKDEDDSGGEEEEEEEDHENTLCGACGDNYGQDEFWICCDACETWFHGKCVKITPAKAEHIKHYKCPNCSGSSKRARV

SEQ ID NO: 41 - DNA, 780 bp, Sorghum bicolor
atggacggaggagccgccttcccgggcacgccgccggtgccgcgctcgccggaggacgtcttccgggactaccgcgcgcgccaggccggcctgatcagggcgctcaccaccgatgtggagaagttctacgtcatgtgcgacccagagaaggagaacctatgtttatatggacttcccaatgagacttgggaagtgaacttgcctgctgaggaggtccctcctgaactcccagagccagctctgggaattaattttgctcgtgatggaatgaatgaaaaagattggctatcacttgttgcagtgcatagtgattcttggctaatgtctgttgcattttattttggagcaaggtttggatttgacaaggaagccaggaaacgtctcttcaccatgatcaataaccttcccagcatatatgaggttgtcacaggaactgctaagaaagagcccaaagaaaaaactcataaaagcaacaataagactaacaaatctggctcaaagccctcgcgccaggcggaacccaacaactcaagggtcccaaagatgccacctccaaaggacgaggaggagagtgaaggggaggaaggggaaccacaggaagaccatgagactgcgctgtgcggcgcatgtggcctaggttatgacgacttctggatctgctgtgacttatgtgagacatggttccacggcaagtgtgtcaagatcaccccggctaaagcggagcacatcaagcagtataagtgcccttcctgcacaggaagcaagagggccaaggcttga

SEQ ID NO: 42 - protein, 259 aa, Sorghum bicolor
MDGGAAFPGTPPVPRSPEDVFRDYRARQAGLIRALTTDVEKFYVMCDPEKENLCLYGLPNETWEVNLPAEEVPPELPEPALGINFARDGMNEKDWLSLVAVHSDSWLMSVAFYFGARFGFDKEARKRLFTMINNLPSIYEVVTGTAKKEPKEKTHKSNNKTNKSGSKPSRQAEPNNSRVPKMPPPKDEEESEGEEGEPQEDHETALCGACGLGYDDFWICCDLCETWFHGKCVKITPAKAEHIKQYKCPSCTGSKRAKA

SEQ ID NO: 43 - DNA, 732 bp, Sorghum bicolor
  misc_feature (328)..(372): n is a, c, g, or t
atgagcgccgccgcctccaagaagctcttccaggccgccaggtccctcatcctctccgcttctcagcgctcctccgccgccgccgtcctcgccgccgagggccgcaccgccgcgctcgccacgctcaccaacttcggcaggaaggccctccccaccgcctactactcctaccacaggcagggatcccaccacgctgcgtcgggatggggagccatcgccgccgcagtcccggctgcagtttacatgctccaggaccaggaggctcatgctgcagagatggagcgcaccttcattgccatcaagcccgacggcgtccaaagaggcctgnnnnnnnnnnnnnnnnnnnnnnnnnnnnnnnnnnnnnnnnnnnnngttgccatcaagctgattgttccatccaaagaattcgctcagaagcactaccatgatctcaaggaaaggcctttcttcaacgggttgtgtgactttctcagctctggccctgtacttgcaatggtttgggaaggagagggtgtcatcaagtatgggagaaaactaattggtgccacagacccacagaaatctgaaccaggaaccatcaggggtgatcttgccgttgttgttggaagaaacatcattcatggaagtgatggcccggagacagcaaaggatgagatcgctttatggtttgaacccaaggagctggtctcttataccagcaatgaggagaagtggatctatggggtgaattaa

SEQ ID NO: 44 - protein, 243 aa, Sorghum bicolor
  misc_feature (110)..(124): Xaa can be any naturally occurring amino acid
MSAAASKKLFQAARSLILSASQRSSAAAVLAAEGRTAALATLTNFGRKALPTAYYSYHRQGSHHAASGWGAIAAAVPAAVYMLQDQEAHAAEMERTFIAIKPDGVQRGLXXXXXXXXXXXXXXXVAIKLIVPSKEFAQKHYHDLKERPFFNGLCDFLSSGPVLAMVWEGEGVIKYGRKLIGATDPQKSEPGTIRGDLAVVVGRNIIHGSDGPETAKDEIALWFEPKELVSYTSNEEKWIYGVN

SEQ ID NO: 45 - DNA, 747 bp, Sorghum bicolor
atggcagcgcctgcggcggagggggcggccgtgtcggccgcggcggcgctgcgagccgtgctggcgcgggcggggatggcggcggagcggtcggggcgcgccgcggaggcggtccgggtggtggcggtggggaagaccaagcccgtttcgatgctgcagcagctctacgacgcgggccaccgctgcttcggcgagaactacgtgcaggagttcgtcaccaaggctccccagcttccggaagatgtccggtggcactttatcgggcacctgcagagcaacaaagtgaaaccgctgttagctgctgttccaaatcttgatatggttgagggtgtagataatgaaaagattgctaaccacctagatcgagctgtcaacagtttgggaagagagcctttgaaagttctggttcaagtgaacactagtggagaagaatctaaatccggaattgatccctccaaatgtgtcgaccttgctaagcatgtgaaactagcatgcccacacctaatattttcaggtctgatgacaataggaatgaaagactactcttcaacaccagaaaattttaaggcattggtaaattgtaagcttgaagtttgcaaggcccttgacataccaacagaacagtttgaactctccatgggaatgtctggtgactttgagcaagcgatagagatgggcagcacgaatgtgaggattggatcaaccatctttggaccaagggagtatccaaacaaaaagcagaattag

SEQ ID NO: 46 - protein, 248 aa, Sorghum bicolor
MAAPAAEGAAVSAAAALRAVLARAGMAAERSGRAAEAVRVVAVGKTKPVSMLQQLYDAGHRCFGENYVQEFVTKAPQLPEDVRWHFIGHLQSNKVKPLLAAVPNLDMVEGVDNEKIANHLDRAVNSLGREPLKVLVQVNTSGEESKSGIDPSKCVDLAKHVKLACPHLIFSGLMTIGMKDYSSTPENFKALVNCKLEVCKALDIPTEQFELSMGMSGDFEQAIEMGSTNVRIGSTIFGPREYPNKKQN

SEQ ID NO: 47 - DNA, 3216 bp, Sorghum bicolor
atggcggcggcggggaacgagtggatcaacgggtacctggaggcgatcctggacgcgggctcgaggctgcgcgggcagcggcagggctatggcggcggcgccggcgcggcgccgccgccgctgacgacggccgcgctgccgaggctgctggcggaggccggcggccatcaggctgccgcggcgtacagccccacgcgctacttcgtggaggaggtggtgagccgcttcgacgaccgggacctccacaagacgtggaccaaggttgtggcgacgcgcaacagccaggagcggagcaaccggctggagaacctgtgctggaggatctggcacgtcgcaaggaagacgaagcaggtggagtgggagtactcgcggcagctggcgcggcggcgcctggagcaggagcaaggcagccgggaggtcgccgaggagctctcggagggcgagaccaccaaggccgacgccggccagcagcaaccgcaagcaggcctgtcggtggcgaggatcggctccgaggcccggatcgtgtcggacgacgaggacgacgacggcaaggacggcgacaggaacctctacatcgtgctcatcagcattcacgggctggtacgtggcgagaacatggagctcggccgtgactctgacaccgggggccaggtgaagtacgtggtggagctggcgcgggcgctggcggccaccgccggcgtgcaccgcgtggacctgctgacgcgccagatctcctgcccggacgtcgactggacctacggcgagcccgtcgagatgatcacccatcaccacgccgacgacggcgacctcggcagcggcgggggagcctacatcgtgcggctgccgtgcgggccccgcgacaagtacctccccaaggagtccctgtggccgcacatcccggagttcgtggaccgcgcgctggcgcacgtcaccaacgtcgcccgcgcgctcggcgaccagctgcaccccgacgccgtcgccggcgcgggctccccgccgccggtgtggccgtacgtgatccacgggcactacgcggacgcggcggaggtggcggcgcacctggcgagcgcgctgaacgtgcccatggtgatgacgggccactccctggggcggaacaagctggagcagctgctgaagctgggccgcatgccgcgcgccgagatccagggcacgtaccggatcgcgcgccgcgtcgaggccgaggagaccggcctcgacgccgccgaagtggtggtcaccagcaccaagcaggagatcgaggagcagtggggcctctacgacggcttcgacctcatggtggagcgcaagctccgggtgcgccggcgccgcggcgtcagctgcctcggacgctacatgccgcggatggtcgtcatcccgccaggcatggacttcagctacgtcgacacgcaggacctcgccgccgacggcggcggcgacgccgaccttcagatgatcatcagcagcagctccaagaagccattgcctcccatctggtcggaggtgctgaggttcttcgccaacccgcacaagcccatgatcctggcgctgtcgaggccggacccgaagaagaacgtcaccacgctgctcaaggcctacggcgagagccgccacctccgcgagcttgcaaaccttacgctgatactggggaacagggatgacatcgaggagatgtccggcggcgccgccactgttctgacggcagtgctcaagctcatcgaccgctacgacctctacggctgcgtcgcctaccctaagcaccacaagcagaccgacgtgccgcacatttaccgcctcgccgccaagaccaagggagtgttcattaatcctgcactcgtggagccattcggcctcaccctgatcgaggctgctgcgtatggtctgcccgtggtggccaccaagaacggcgggccggtggacatcatcaaggcgctgcacaacgggctgctggtggacccgcacgacgcggcggcgatcacggaggcgctgctgagcctgctggccgacaaggcgcggtggggcgagtgccggcggaacggcctccgcaacatccaccgcttctcgtggccgcaccactgccgcctctacctctcccacgtggcggccaactgcgaccacccggcgccgcaccagctgctccgcgtgcccgccagcccgcgcgccgccgcggcggcggccgagcggagcaccgacggctcgctctcggactcgctccgcggcctgtccatctccatcgatgcctcgcacgacctcaaggccgcctgggccgggaccggggccggccgggactcacgtcgcggccgccatcatggacgcgctcagtcgccgggcctgctccccacgtatacgactcggccgccgactacgagggcagcgatcgggaacgctccggggcggcggcagagcctcctcgtcctcgccgtcgactgctataacggagacggcacaccggacgccgaccggatgaagaaggccgtcgacctcgcgctgtcggcggcggcggcggcaggtgggcggctcgggtgcgtgctgtcgaccgggatgaccatcgcggaggccgcggaagcgctcggcgcgtgcggcgccgacccggccgccttcgacgcgctcatctgcagcagcggcgcggagctctgctacccgtggagggacgtcgccgccgcggacgaagagtacgcggggcacgtggcgttccggtggcccggcgaccacgtgcgcgccgccgtgccgaggctcgggaaggccgagggcgcgaaggaggccgacctcgccgtcgatgaggccgcctgctccgtgcactgccacgcctacgccgtcgcgggcgcgtccaaggtgaagaaggtggactcgatccggcagtcgctgcgcatgcgcgggttccggtgcaacctcgtgtacacgcgcgcgtgcacgcgcctcaacgtgatcccgctctcggcgtcgcggccgcgcgcgctcaggtacctgtcgatacagtggggcatcgacctggacaaggtggccgtgctggtgggcgacaagggcgacacggaccgggagcgggtgctcccgggcctgcacaggacgctggtcctgccggagctagttagccacggcagcgaggagctgcgccgcgacgaagacgggtttctggcggaggacgtcgtcgccatggactccccgaacatcctcaccctcgccgagtaccaggcggcggccgacatcctcaaggctatctga

SEQ ID NO: 48 - protein, 1071 aa, Sorghum bicolor
MAAAGNEWINGYLEAILDAGSRLRGQRQGYGGGAGAAPPPLTTAALPRLLAEAGGHQAAAAYSPTRYFVEEVVSRFDDRDLHKTWTKVVATRNSQERSNRLENLCWRIWHVARKTKQVEWEYSRQLARRRLEQEQGSREVAEELSEGETTKADAGQQQPQAGLSVARIGSEARIVSDDEDDDGKDGDRNLYIVLISIHGLVRGENMELGRDSDTGGQVKYVVELARALAATAGVHRVDLLTRQISCPDVDWTYGEPVEMITHHHADDGDLGSGGGAYIVRLPCGPRDKYLPKESLWPHIPEFVDRALAHVTNVARALGDQLHPDAVAGAGSPPPVWPYVIHGHYADAAEVAAHLASALNVPMVMTGHSLGRNKLEQLLKLGRMPRAEIQGTYRIARRVEAEETGLDAAEVVVTSTKQEIEEQWGLYDGFDLMVERKLRVRRRRGVSCLGRYMPRMVVIPPGMDFSYVDTQDLAADGGGDADLQMIISSSSKKPLPPIWSEVLRFFANPHKPMILALSRPDPKKNVTTLLKAYGESRHLRELANLTLILGNRDDIEEMSGGAATVLTAVLKLIDRYDLYGCVAYPKHHKQTDVPHIYRLAAKTKGVFINPALVEPFGLTLIEAAAYGLPVVATKNGGPVDIIKALHNGLLVDPHDAAAITEALLSLLADKARWGECRRNGLRNIHRFSWPHHCRLYLSHVAANCDHPAPHQLLRVPASPRAAAAAAERSTDGSLSDSLRGLSISIDASHDLKAAWAGTGAGRDSRRGRHHGRAQSPGLLPTYTTRPPTTRAAIGNAPGRRQSLLVLAVDCYNGDGTPDADRMKKAVDLALSAAAAAGGRLGCVLSTGMTIAEAAEALGACGADPAAFDALICSSGAELCYPWRDVAAADEEYAGHVAFRWPGDHVRAAVPRLGKAEGAKEADLAVDEAACSVHCHAYAVAGASKVKKVDSIRQSLRMRGFRCNLVYTRACTRLNVIPLSASRPRALRYLSIQWGIDLDKVAVLVGDKGDTDRERVLPGLHRTLVLPELVSHGSEELRRDEDGFLAEDVVAMDSPNILTLAEYQAAADILKAI

SEQ ID NO: 49 - DNA, 1587 bp, Sorghum bicolor
atggcgttcctcgcgcctccgcagttcaagtggctcccttccgcccgcgcggccgtgttcagggagccctccggcggcgcaggatcccgccccagtcggataaactgctctttctcctccacggcagtcgccgatgcagagctatccgtcgagccgccgccttctcctcaccgaacccttccgggatgtttcggtgaggcgcttctcaacaaggaggccatggtggcggctgcggccgcggaagccgtcgctctggctcgagcagcggccgaagtcgccggagaagtcgcccggatggcgcaaaaggaccacccggcggacttaccgcggcgtgatgacacgggggacagcttcttgtcaagagaggtcctccgcaccgaggtggggttgttggaggcgaggcgcgccgggctcgaattgctggagggcgaagagttcagcagcatcttcagcgacgaatccgaggatgatgatgatgatgacagcgggcatagcatagccgtggcggtgaagtcggcgcggcggaccgagagaaaggctcggagagtgagggcagcgatgaaggcggctaagtgtttcagcagcaggaatgctgttggagcgtcctccacgaggaagaagcggttgaagggttgccagactcctctcgggtgcttctataagatgaccggcccgaggcttctgacggcggaacaagaagtcgagttctcagaaggcattcaggacctcctgaaactggaagccatccaaaaggaggttgcacaatataatggcggtgagccaacattttcccagtgggcggcagcagctggaacagatgagaacactctgcggagacgcctgaatcatggggtttactgcaagaacaggatggtgaaatctaacgtgcgacttgtaatctcaattgcaaaagaacatgaaggccctggaatggagttttctgatcttattcaggaagggatgcaagggctgataagaggcgcagaaaagtttgatgcttcaaagggttttaggttctccacttactctcattggtggatcaaacaagcaatacgcaagtccgttttagaacaaacccagataattcgcctgccggcacatatggccgaagcaagttcccgagtgaaggaatgctgccggcgactccgtcgtgagttgaaacggctacccagcaacgaagagattgcggtggacactggcatgacgatccggcgggtggaggcagccatgagcctcccaaaatacagcgtgtccttcacgagcaaggtcgggtgcacggacgtcacataccaggagatcatgccggacacgagcgccgagacggccgaggaggtgctgcaccggtggctgatgaagaaggacgtgaacacggcgctggagagcctgagcccgcgcgagaagctggtgatgcggtaccggttcggcatcgagggcgggcggcccaggaccctgcacgacatcgggcagatcatgggggtgagccgggagcggatccggcagatcgagctgggcgcgttccggaagctgcggagcaagaagagggtgcagtcgctgcagcactacctgcagccggcggagagctggtag

SEQ ID NO: 50 - protein, 528 aa, Sorghum bicolor
MAFLAPPQFKWLPSARAAVFREPSGGAGSRPSRINCSFSSTAVADAELSVEPPPSPHRTLPGCFGEALLNKEAMVAAAAAEAVALARAAAEVAGEVARMAQKDHPADLPRRDDTGDSFLSREVLRTEVGLLEARRAGLELLEGEEFSSIFSDESEDDDDDDSGHSIAVAVKSARRTERKARRVRAAMKAAKCFSSRNAVGASSTRKKRLKGCQTPLGCFYKMTGPRLLTAEQEVEFSEGIQDLLKLEAIQKEVAQYNGGEPTFSQWAAAAGTDENTLRRRLNHGVYCKNRMVKSNVRLVISIAKEHEGPGMEFSDLIQEGMQGLIRGAEKFDASKGFRFSTYSHWWIKQAIRKSVLEQTQIIRLPAHMAEASSRVKECCRRLRRELKRLPSNEEIAVDTGMTIRRVEAAMSLPKYSVSFTSKVGCTDVTYQEIMPDTSAETAEEVLHRWLMKKDVNTALESLSPREKLVMRYRFGIEGGRPRTLHDIGQIMGVSRERIRQIELGAFRKLRSKKRVQSLQHYLQPAESW

SEQ ID NO: 51 - DNA, 822 bp, Sorghum bicolor
atgaatcctcaaagccctaaaaccagtgctccttgcaccttgccagtggagccggctgctgctgttgttcccaacgaagcagtggcgaccgataaagctccgccgccgccaacggccaacacggtgataatccgggagcaggaccggctgatgcccgtggccaacgtgtcccgcatcatgcgccaagtgctgcctccctacgccaagatctccgacgacgccaaggaggtgatccaggagtgcgtgtccgagttcatcagcttcgtcaccggcgaggccaacgagcggtgccacaccgagcgccgcaagaccgtcgcctccgaggacatcgtgtgggccttgaaccgcctcggcttcgacgactacgtcgcgcccgtcggcaccttcctccagcgcatgcgcgagagcgaggccggcggcgaagagcgcggcccagggcgtggcggcggctcgcgccgcggctcgtccgtggtcacgctcacgctgccggtcaacggcggtgcgcagctgacgatgcaccaccctgccgccgtcagccggcatccgcaccaaggtgtgtcgcctgctgcaggttacgccgtccggcccgttccccgcccggcggcggttccatctgccaatggggcggtggcggcgccgcacttcggcggccggtcgtaccagatgtacggcggcaaccaccgccctgtggttccctgctaccacggaggaggaggagcggcgttcgtcgacgccggtggaagccaacacgttggattccacgacgacgaggctagctcttcgactgaaaatccaccggcggggcgtcctggctcgcactag

SEQ ID NO: 52 - protein, 273 aa, Sorghum bicolor
MNPQSPKTSAPCTLPVEPAAAVVPNEAVATDKAPPPPTANTVIIREQDRLMPVANVSRIMRQVLPPYAKISDDAKEVIQECVSEFISFVTGEANERCHTERRKTVASEDIVWALNRLGFDDYVAPVGTFLQRMRESEAGGEERGPGRGGGSRRGSSVVTLTLPVNGGAQLTMHHPAAVSRHPHQGVSPAAGYAVRPVPRPAAVPSANGAVAAPHFGGRSYQMYGGNHRPVVPCYHGGGGAAFVDAGGSQHVGFHDDEASSSTENPPAGRPGSH

SEQ ID NO: 53 - DNA, 324 bp, Sorghum bicolor
atggcaagccgatctagcgcgctggaaggagggggggcagcaatacagcggaggaataatgccgtgaagcggcacctgcagcagcggcagcaggaggcggatttccacgacaagaaggtcatcgcgtccacctacttcagcatcggcgcgttcctggtgctcgcctgcctcaccttctcgctgctcatcctgccgctggtgctgccgccgctgccgccgccgccgtcgctgctgctgtggctgccggtctgcctgctcgtcctgctggttgtgctggccttcatgccgacagatgtgcgcagcgtggcggcctcttacttgtaa

SEQ ID NO: 54 - protein, 107 aa, Sorghum bicolor
MASRSSALEGGGAAIQRRNNAVKRHLQQRQQEADFHDKKVIASTYFSIGAFLVLACLTFSLLILPLVLPPLPPPPSLLLWLPVCLLVLLVVLAFMPTDVRSVAASYL

SEQ ID NO: 55 - DNA, 1299 bp, Sorghum bicolor
atgactgttggatcacgtgtggtggtgatagacaatgggggtggtcttctcaaggctggatttggtggagacaatgatccaattgctgttgtccccaactgtatggccaaaccccctggtggcaatgccaattccaaaaaatggctggttgctgatcagctgcaggcagaagatgtcgacgtgactggcatgacactgaagcgtcctattgatcgtggctatctcatcaataccgaggtgcagaaggaggtgtgggaacgggttttacgcaatcttctccaggttgatcctaccaactcatccctattactggtggagccattgtttaaccctccagcgctacaacatgcaactgatgagctggtgttcgaggagtttggcttcaactctctttgtgttgcagatagtccttcccttgtccacctttatgaggctagccgtcaaccaatgctcttccgtgctcagtgcagccttgttgttgactgtggcttctctttcactcatgcatcccctgtgcttcagaactttactctgaattatggcgttcgacgtatggaccttggtggcaaggcccttacaaattatctcaaggagcttgtctcatatcgttcccttaatgtcatggatgaaactctcctcattgatgatgcaaaggaaaagctatgctttgtgtcgcttgatgtccctggtgatcttcaccttgccaggttatcatttaaggacaacccttttaggtgttcttacattctccccgatggtataacatacaagaaagggtttgtcaaggacatgaatgaagcacatagatatcgctctctgcctcttgatgaagaagcaaagagaaaagaacatagcatggatataaataagtccgaggaccggaaaaagccagaattaagtcaaaatgaatttgtattgacaaatgaaaggttccttgtcccagagatgctttttcatccaatcgatcttggcataaatcaagctggacttgctgagtgtatagttcgtgctgtacaagcttgccatccatatcttcaacctgtgcttttcgagagcatcatcttgacaggtggaagcacactgttccccagattcgctgatagactggagagggaacttcggcctcttgtccctgacaactacaaggttaaaataactcatcaagaagacccaattcttggtgtctggagaggcggatctattctggcatcaactcctgatttcgaatcaatgtgcactacaaagtctgagtacgaggagatgggatcagcaaggtgccgacgaaggtttttccactga

SEQ ID NO: 56 - protein, 432 aa, Sorghum bicolor
MTVGSRVVVIDNGGGLLKAGFGGDNDPIAVVPNCMAKPPGGNANSKKWLVADQLQAEDVDVTGMTLKRPIDRGYLINTEVQKEVWERVLRNLLQVDPTNSSLLLVEPLFNPPALQHATDELVFEEFGFNSLCVADSPSLVHLYEASRQPMLFRAQCSLVVDCGFSFTHASPVLQNFTLNYGVRRMDLGGKALTNYLKELVSYRSLNVMDETLLIDDAKEKLCFVSLDVPGDLHLARLSFKDNPFRCSYILPDGITYKKGFVKDMNEAHRYRSLPLDEEAKRKEHSMDINKSEDRKKPELSQNEFVLTNERFLVPEMLFHPIDLGINQAGLAECIVRAVQACHPYLQPVLFESIILTGGSTLFPRFADRLERELRPLVPDNYKVKITHQEDPILGVWRGGSILASTPDFESMCTTKSEYEEMGSARCRRRFFH

SEQ ID NO: 57 - DNA, 2466 bp, Sorghum bicolor
atgagctcctcgtccggggcaagcatcgggcagccgccgccgccgccgcccgcgccgccgccggaggaagagaagaagtgcctcaactcggagctgtggcacgcgtgcgccggcccgctcgtctgcctccccaccgtcggcacccgcgtcgtctacttcccgcagggccacagtgagcaggtggcagcgtcgacgaacaaggaggtcgacgggcacatccccaactaccccaacctgccgccgcagctgatctgccagctccatgatgtcacaatgcatgcggatgtggagacggacgaagtgtacgcgcagatgacgctgcagccgctcaacccacaagagcagaacgacgcgtacctgcccgcggagatgggaatcatgagcaagcagccgacgaattacttctgcaagacgctgactgcgagcgacaccagcacgcatggcggcttctccgtgccccgtcgtgctgccgagcgcgtcttcccccctctggtgatttcacacagcagcctccagcacaggagcttattgcacgggatattcatgatgtcgagtggaaattcaggcatatcttccgaggcaagccagcccaaaagacacctgctgactactggctggagtgtgtttgtcagtgctaagagacttgttgctggagattctgtgctattcatatggaatgagaaaaaccagcttttgcttggaatcagacgtgccagccgtccacagactgtgatgccctcttctgttctttcaagtgacagcatgcacattgggctccttgcagcagcagctcatgctgctgcaacaaacagccgcttcacaattttctataatcctagggcaagtccatcagaatttgttatacccctttcgaaatacatcaaggctgtttttcacacgcggatatcagttgggatgcgattcaggatgttgtttgagactgaggaatctagtgtccgcaggtacatggggacaataacagaagtgagtgatgctgacccagtgcgttggcctagctcctattggagatcagtgaaggttggttgggatgaatcaacagcaggggaaaggccacctagagtttctctgtgggaaattgagccactgacaacctttcctatgtatccatccctgttcccactgcgagttaagcatccttggtattcaggagttgctgctcttcatgatgacagcaatgctttgatgtggctgagaggagttgctggtgaagggggctttcagtctttgaacttccagtcacctggtataggttcctggggacaacagaggctccatccatccttacttagcaatgatcatgatcagtatcaagcagtggttgctgcagcagctgcctcccagtccggtggttatctgaagcagcaattcctacaccttcaacagcctatgcaatccccacaggagcagtgcaatctcaatccgctgttgcagcaacaaatactacagcaagcgagccaacagcagatggttagtcctgatgctcaaaacattcagtccgtgctcagcccaaatgctattcagcagcagctccaccaactccagcagatgcagcatgctcataatgaccagaagcagaagattcaaccagatcaaccgtatcaagttcctagcagtgcggttctcccaagtccaacatcattaccaagccatttgcgtgaaaaatttggcttttctgatcctaatgtgaactcttctagcttcatcagctctagcagcaacgaaaacatgctggaatcaaacttccttcagggaagctcaaaatctgtggatttgtctagattcaaccaaccagtagttagcgagcagcagcagcagcagcagcaacaggcatggaagcagaagtttatgggctcacaatcgatgtcttttgggggcttggtttcgcttaactcacccactagcaaagatggttctgctgacaacaaaattggccgtgatgtgcagaaccagtccctttttagccctcaagttgactcttcctccctgctgtacaatatggtacctaatttgacctcaaatgttgcggataataatatatcagtgattccttctggatcaacatatctgcagagtccaatgtatggttgtctggatgactcttctggtttattgcaaaatacaggagagaatgatccggcagctagaactttcgttaaggtttacaagtcaggatcagtggggagatccttggacatcacccggttctctaattatgctgaacttcgagaggaactgggtcagatgttcggcatcaagggtcagttggacgaccctgatagatcaggctggcagcttgtatttgtcgacagggagaacgatgtgcttctccttggagacgacccatgggagtcatttgtgaatagtgtatggtacatcaagatactttcaccggaggatgtgcataagatgggaaagccaggaaatgatccacgctacctatcttaa

SEQ ID NO: 58 - protein, 821 aa, Sorghum bicolor
MSSSSGASIGQPPPPPPAPPPEEEKKCLNSELWHACAGPLVCLPTVGTRVVYFPQGHSEQVAASTNKEVDGHIPNYPNLPPQLICQLHDVTMHADVETDEVYAQMTLQPLNPQEQNDAYLPAEMGIMSKQPTNYFCKTLTASDTSTHGGFSVPRRAAERVFPPLVISHSSLQHRSLLHGIFMMSSGNSGISSEASQPKRHLLTTGWSVFVSAKRLVAGDSVLFIWNEKNQLLLGIRRASRPQTVMPSSVLSSDSMHIGLLAAAAHAAATNSRFTIFYNPRASPSEFVIPLSKYIKAVFHTRISVGMRFRMLFETEESSVRRYMGTITEVSDADPVRWPSSYWRSVKVGWDESTAGERPPRVSLWEIEPLTTFPMYPSLFPLRVKHPWYSGVAALHDDSNALMWLRGVAGEGGFQSLNFQSPGIGSWGQQRLHPSLLSNDHDQYQAVVAAAAASQSGGYLKQQFLHLQQPMQSPQEQCNLNPLLQQQILQQASQQQMVSPDAQNIQSVLSPNAIQQQLHQLQQMQHAHNDQKQKIQPDQPYQVPSSAVLPSPTSLPSHLREKFGFSDPNVNSSSFISSSSNENMLESNFLQGSSKSVDLSRFNQPVVSEQQQQQQQQAWKQKFMGSQSMSFGGLVSLNSPTSKDGSADNKIGRDVQNQSLFSPQVDSSSLLYNMVPNLTSNVADNNISVIPSGSTYLQSPMYGCLDDSSGLLQNTGENDPAARTFVKVYKSGSVGRSLDITRFSNYAELREELGQMFGIKGQLDDPDRSGWQLVFVDRENDVLLLGDDPWESFVNSVWYIKILSPEDVHKMGKPGNDPRYLS

SEQ ID NO: 59 - DNA, 504 bp, Sorghum bicolor
atggcggacgacggcgggagccacgagggcggcggcggcggcggcggcggcggaggctaccgggagcaggaccggttcctgcccatcgccaacatcagccggatcatgaagaaggccgtcccggccaacggcaagatcgctaaggacgctaaggagaccctgcaggagtgcgtctccgagttcatatcctttgtcaccagcgaggccagcgacaaatgtcagaaggaaaagagaaagacgatcaacggggacgatttgctttgggcgatggctacattaggattcgaggagtacgtcgagcctctcaagatttacctgcaaaagtacagagagatggagggtgatagtaagctgtctacaaaggctggcgagggctctataaagaaggatgcgatcagttcccatggtggcaccagtagctcaagtaaccagttggttcagcatggagtttacaaccaagggatgggctatatgcagccacagtaccacaatggggatacctaa

SEQ ID NO: 60 - protein, 167 aa, Sorghum bicolor
MADDGGSHEGGGGGGGGGGYREQDRFLPIANISRIMKKAVPANGKIAKDAKETLQECVSEFISFVTSEASDKCQKEKRKTINGDDLLWAMATLGFEEYVEPLKIYLQKYREMEGDSKLSTKAGEGSIKKDAISSHGGTSSSSNQLVQHGVYNQGMGYMQPQYHNGDT

SEQ ID NO: 61 - DNA, 516 bp, Sorghum bicolor
atggcgcggttcgtggatccgctggtggtggggcgggtgatcggcgaggtggtggacctgttcgtgccctccatctccatgaccgtcgcctatggccccaaggacatcagcaacggctgcctcctcaagccgtccgccaccgccgcgccgccgctcgtccgcatctccggccgccgcaacgacctctacacgctgatcatgacggaccctgatgcgcctagccccagcgacccgaccatgagggagtacctccactggatagtgaccaacataccaggaggaacggatgcaagcaaaggtgaggaggtggtggagtacatgggcccgcggccgccggtgggcatccaccgctacgtgctggtgctgttcgagcagaagacgcgcgtgcacgcggaggcgccccgcgagcgcgccaacttcaacacgcgcgcgttcgcggcggcgcacgagctcggcctccccaccgccgtcgtctacttcaacgcgcagaaggagcccgccaaccgccgccgctag

SEQ ID NO: 62 - protein, 171 aa, Sorghum bicolor
MARFVDPLVVGRVIGEVVDLFVPSISMTVAYGPKDISNGCLLKPSATAAPPLVRISGRRNDLYTLIMTDPDAPSPSDPTMREYLHWIVTNIPGGTDASKGEEVVEYMGPRPPVGIHRYVLVLFEQKTRVHAEAPRERANFNTRAFAAAHELGLPTAVVYFNAQKEPANRRR

SEQ ID NO: 63 - DNA, 549 bp, Sorghum bicolor
atggccaacgattccttggttacagctcgtgtcataggagatgtcctggaccccttctacagctccattgatctgatggtgctcttcaatggtatgcccattgtcagcggcatggagttgcgtgctccgacggtctctgagaggccaagggttgagatcggaggagatgactatcgtgttgcttataccctggtgatggttgatcctgatgctccaaacccaagcaacccaaccctaagggagtacctgcactggatggtcactgacattccagcgtcaactgatgacacctacgggcgggaggtgatgtgctacgaggccccaaacccgacgacggggatccaccgcatggtgctggtgctgttccggcagctggggcgggagacggtgtacgcgccgtcctggcgccacaacttcagcacgcgcggcttcgcccgccgctacaacctcggcgcgcccgtcgccgccatgtacttcaactgccagcgccagaacggctccggcggacggaggttcaccggggcctacaccggcggcagacatggttag

SEQ ID NO: 64 - protein, 182 aa, Sorghum bicolor
MANDSLVTARVIGDVLDPFYSSIDLMVLFNGMPIVSGMELRAPTVSERPRVEIGGDDYRVAYTLVMVDPDAPNPSNPTLREYLHWMVTDIPASTDDTYGREVMCYEAPNPTTGIHRMVLVLFRQLGRETVYAPSWRHNFSTRGFARRYNLGAPVAAMYFNCQRQNGSGGRRFTGAYTGGRHG

SEQ ID NO: 65 - DNA, 1587 bp, Sorghum bicolor; identical to SEQ ID NO: 49

SEQ ID NO: 66 - protein, 528 aa, Sorghum bicolor; identical to SEQ ID NO: 50

SEQ ID NO: 67 - DNA, 1455 bp, Sorghum bicolor
atggcccctgcctccagcgtcgccgtggagaacctcaacccaaaggtcttaaaatgtgagtatgcagtccgtggggagattgtcatccatgctcagcgcttgcagcaacaactacaaacgcaaccagggtctcttcctttcgatcagatcctcttctgcaacattgggaatcctcaatctcttggtcagcaacctgtgacattcttcagggaggttcttgctctttgtgatcatccatgcctcttggaaaaagaggaaaccaaatcattgttcagtgctgatgctatttctcgagcaaagcagattcttgcaactattcctggaagggcaaccggtgcatatagtcacagccagggtatcaaaggactgcgtgatgcaattgctgctggtatcacctcacgtgatggattccctgcaaatgcagatgacattttcattacagatggagcaagtcctggggtccacatgatgatgcaattactgattaggaatgagaaggatggcattctgtgcccaattcctcagtaccccttgtactcggcctccatagctcttcatggtggagctcttgtcccctattaccttgatgaaaaaactgggtggggtttggagatctctgatcttaagaagcaactcgaagatgctcggtcaaaaggcattgatgttagggccttggtggttatcaatccaggaaatccgactgggcaggttcttgctgaagacaaccaatatgacatagtgaaattctgcaaaaatgagggccttgttcttctagctgacgaggtatatcaagagaacatctatgttgacaacaagaaatttaactctttcaagaagattgcaagatccatgggatacggcgaggatgatctccctctagtatcatttcagtctgtttccaaaggatactatggagagtgtggtaaaagaggaggttacatggagatcactggcttcagtgctccggtaagagagcagatctacaaggtagcttcagtgaacctgtgctccaatatcactggtcaaatccttgcaagcctcgtcatgaatccaccaaaggttggggacgaatcatatgcttcctacaaggcagagaaagatgcaatccttcagtctttagctcgtcgtgcaaaggcattggaggatgcattcaacaagcttgagggaatttcatgtaacaaggctgaaggagcaatgtaccttttccctcagattcatctgccacagaaggcaattgaggctgctaaagctgctgagaaagcacctgatgcgttctatgctctccgtctccttgaatcaactggaattgttgtggtccctggatctggatttggtcaagttcctggaacatggcacatcagatgcactatcctgccgcaagaagacaaaatccccgcggtgatcacccgcttcaaggctttccatgaggcgttcatggctgagtaccgcgactaa

SEQ ID NO: 68 - protein, 484 aa, Sorghum bicolor
MAPASSVAVENLNPKVLKCEYAVRGEIVIHAQRLQQQLQTQPGSLPFDQILFCNIGNPQSLGQQPVTFFREVLALCDHPCLLEKEETKSLFSADAISRAKQILATIPGRATGAYSHSQGIKGLRDAIAAGITSRDGFPANADDIFITDGASPGVHMMMQLLIRNEKDGILCPIPQYPLYSASIALHGGALVPYYLDEKTGWGLEISDLKKQLEDARSKGIDVRALVVINPGNPTGQVLAEDNQYDIVKFCKNEGLVLLADEVYQENIYVDNKKFNSFKKIARSMGYGEDDLPLVSFQSVSKGYYGECGKRGGYMEITGFSAPVREQIYKVASVNLCSNITGQILASLVMNPPKVGDESYASYKAEKDAILQSLARRAKALEDAFNKLEGISCNKAEGAMYLFPQIHLPQKAIEAAKAAEKAPDAFYALRLLESTGIVVVPGSGFGQVPGTWHIRCTILPQEDKIPAVITRFKAFHEAFMAEYRD

SEQ ID NO: 69 - DNA, 1164 bp, Sorghum bicolor
atggctatggcgacggcgaagctgagctccccggctaccagcctgctcgctggcggccgcacccggcgatccgcgcccgcccgccgcgcgacggtgatccgcgccgccgcaggctcctactccgacgagctcgtctccaccgcgaaatctgttgcttcgcctgggcgtggtattctggcaattgatgagtcaaatgcaacatgcggaaagaggctatcgtcaattggtttggacaacacagaacctaaccgccaggcttacaggcagcttttgctgacaactgctggtcttggtgaatacatttctggtgctattctttttgaggagactctttatcaatcaactacagatggcaagaagtttgttgactgcttgaaggaacagaatatcatgcccggcatcaaggttgacaagggtttggttccattgcctggatccaacaatgaatcgtggtgccaaggtcttgatggtttggcttcaaggtgtgctgagtactataagcagggggcacgcttcgcaaagtggaggactgttgttagcatcccttgtggtccatctgcattagcagtgaaggaagcagcatggggacttgcccgttatgctgctattgctcaggataatggcttagtgccaattgtggagccagagatccttcttgatggagatcatgggatcgaaacaactcttgaggtggcagagaaagtgtggtctgaggtgttcttctacttggccgaaaacaatgttctgtttgagggtatcctgctgaagccgagcatggtcactcctggagctgagcacaaggagaaggcttctccagaagccattgcaaagcatacgttaacaatgctcagaaggagagtacctcccgctgttcctggaatcatgttcctttctggtggtcaatccgaggtggaggcaactctgaacctgaatgcaatgaaccagtctccgaacccatggcatgtatcattctcctatgcccgggctctgcagaactcggtgctaaagacatggcaagggcgccctgagaacgtggaggcagcgcagaaggccctgctggcgcgtgcaaaggccaactcgctggcacagctcggtcgctacactggtgagggtgagagtgatgaggcaaagaaaggcatgttccagaagggctacacctactaa

SEQ ID NO: 70 - protein, 387 aa, Sorghum bicolor
MAMATAKLSSPATSLLAGGRTRRSAPARRATVIRAAAGSYSDELVSTAKSVASPGRGILAIDESNATCGKRLSSIGLDNTEPNRQAYRQLLLTTAGLGEYISGAILFEETLYQSTTDGKKFVDCLKEQNIMPGIKVDKGLVPLPGSNNESWCQGLDGLASRCAEYYKQGARFAKWRTVVSIPCGPSALAVKEAAWGLARYAAIAQDNGLVPIVEPEILLDGDHGIETTLEVAEKVWSEVFFYLAENNVLFEGILLKPSMVTPGAEHKEKASPEAIAKHTLTMLRRRVPPAVPGIMFLSGGQSEVEATLNLNAMNQSPNPWHVSFSYARALQNSVLKTWQGRPENVEAAQKALLARAKANSLAQLGRYTGEGESDEAKKGMFQKGYTY

SEQ ID NO: 71 - DNA, 672 bp, Sorghum bicolor
atggccgggaagagggagcggatagcgatccggaggatcgacaacctggcggcgaggcaggtgaccttctccaaaaggcggcgggggctgttcaagaaggccgaggagctctccatcctctgcgacgccgaggtcggcctcgtcgtcttctccgccaccggcaaactcttccacttcgccagcaccagcatgaagcaggtaatcgatcggtacgactcccattccaagaatctccaaaagtctgaagcgccgtctcagctgcagtcacatattgatgatggcacttgtgcaaggctaaagcaggagcttgctgaaaccagccttaagctcaggcagatgagaggagaggagctccagaggctgagcgtccaacagctgcaagagcttgagaagaccctcgaatctggcctcggctctgtactcaaaaccaagagccaaaaaatccttgacgagatcagcggtctggaaagaaagagaatggaactgatcgaggagaattcaaggctgaaggagcaagtaaatccctgctctcccctgctgagttttcgattctgcccttcctttgtttcgaacgatgtctcggtgcttaagccacggcgatctgaagctgcaggtgacccggatggcaaggatggagacgcagcttggcgtcgattcagaaattgtgtatga

SEQ ID NO: 72 - protein, 232 aa, Sorghum bicolor
MAGKRERIAIRRIDNLAARQVTFSKRRRGLFKKAEELSILCDAEVGLVVFSATGKLFHFASTSMKQVIDRYDSHSKNLQKSEAPSQLQSHIDDGTCARLKQELAETSLKLRQMRGEELQRLSVQQLQELEKTLESGLGSVLKTKSQKILDEISGLERKRMELIEENSRLKEQLQVTRMARMETQLGVDSEIVYEEGQSSESVTNTSYPRPSTDTDDCSDTSLRLGLPFFSSK

SEQ ID NO: 73 - DNA, 567 bp, Sorghum bicolor
atgtatccgtcggcccctccggacgcgtatagtaacaaattcagcagctccggggctcccccaacggcgccgccgccggcagcgtaccagcagcagcagcacggggcgaacatgaacccttcacgccccggcggcgggctgaggaaatggtccaccggccttttccactgcatggacgacccgggaaactgtctcatcacatgcctgtgcccctgcatcacgttcgggcagatcgctgacatcgtggacaaaggcacctgcccatgtctcgcgagtggattcatctatgggctcatctgcgcctcgacggggatggggtgcctgtactcgtgcctctaccggtccaagctgagggccgagtacgacgtggatgaaggggagtgcccggacttcctggtgcactgctgctgcgagcacctggcgttgtgccaagagtaccgcgagctcaagaaccgtggcttcgacctgggaatcggttgggaggccaacatggaccggcagaggcgaggagttaccggcggcacggtgatgggggcgccggccataccgctcggcatgattaggtag

SEQ ID NO: 74 - protein, 188 aa, Sorghum bicolor
MYPSAPPDAYSNKFSSSGAPPTAPPPAAYQQQQHGANMNPSRPGGGLRKWSTGLFHCMDDPGNCLITCLCPCITFGQIADIVDKGTCPCLASGFIYGLICASTGMGCLYSCLYRSKLRAEYDVDEGECPDFLVHCCCEHLALCQEYRELKNRGFDLGIGWEANMDRQRRGVTGGTVMGAPAIPLGMIR

SEQ ID NO: 75 - DNA, 2892 bp, Sorghum bicolor
atgggcaacagcacgtcccgggtcgtcggctgcttcgcgccgcccgacaaggccggcggcggcgtcgacctcgacttcctcgagccgctcgacgaagggctcggccactctttctgctacgtccgcccgggcgccgtcgccgactcgcccgcgatcacgccctccaactccgagcgctacacgctcgattccagcgtcatggactcggagacccgcagcggctccttccgccacgagcccgccgccgccgacgacctggccgccgccgccgccgggctgcagcgcccctgcaggagcttcggcgagaccaccttccggaccatctcgggggcctccgtcagcgccaacgcgtcctccgcaaggacgggcaacctcaccgtctccctcctcgccggtgacgtgcaggagcccgccgccgcgttcgagagcaccgcctccttcgctgccgtgcccttgcagccggtgccgcgggggtcggggccgctcaacaccttcctgtcgggcccgctggagaggggattcgcgtccggcccgctcgacaaaggctccggcttcatgtctgggccattggacaagggagccttcatgtcaggtcccatcgacggtggcagcagaagcaacttctcggcacctctttcctatggccggaggaaggctcgtctggggctgcttgtacataggattagcagacccatgaaaaccgcattgtcaagaactttcagcaggagctcacacaatccaggctgggttcagaagtttctgatgcatcctatggctcaactgccctgggcaagggacgcaaagtccagatcagaaggctcgcagaatgggttggaacctgggatacctgaacccgagtataatgtgaccaggaaccttcagtgggctcatggaaaggcaggggaagatagggttcatgttgttctatccgaagagcaaggatggctgttcattggaatctatgatggttttagcggccctgatgcacctgactttctaatgagcaatctatacaaggccattgataaagaactggaaggactgctctgggtttacgaagacagctctgaaaggtgtgaccatgtatctaatcttgaagagggtgaatcagcttctgcttctgtggatgctcctcatgatgataatggccagttccagagtgacaatgggaaacaagaacagcttggtaattttggaaaacaaaatgtctcacctggaaagggttgtgatgaaagtgtcttgcaagttcaaccaaactgtaccagctgtgaagagaaagatttggctgcacaggattcaagtagtcagaagttgggcagggatgagatagttgaggaaatggctggagctgatctgggaaatgatctccaaagtagagaatctcacaactcgaacagcggtctttctggtacagatctaaacaccagctgtacctgtgcaacagaaaccagtgcctattgtgatcaacatgccaagttcttgaaagaaaacagaaagagcaagcgtcttttcgagcttcttgagatggaattgctacaagattataacaaaaggttatctaaggcgtcactagaggaaaggaaaataccgagcttgcatgttgcacaggcaggcactgcagaagggagctcaagaaacgcagctgagatctccaggtgttcattggcagcaactggagaatgtttcgatgattctgaagatcttggaagttcaagacatgctgatagtgtacttggcacagatcttaaagagtgtacagggtgttcaatatctacatcttcatcagagcacaagcaagttacgagaagatttgtattcggatcaaagttgaggaagatgtacaaaaagcaaaaaatgttgcagaagaagtttttcccatggaactatgattggcacagagatcagcctcatgttgatgaaagtgttataaaatcttcagaagtgactaggagatgtaagtcaggaccagtagagcatgatgctgtattgagggcaatgtcacgggcacttgaaacaacagaggaagcgtacatggaaattgtggagaaggagcttgatagacatccagagcttgcattaatgggttcgtgtgtccttgtaatgttgatgaaggaccaggatgtatatgtcatgaatcttggggatagccgagctatcttggcgcaggacaatgatcagtacaatagctcaagtttcttgaaaggagatttaagacatcgaaacaggtcaagggagtcacttgtccgtgtcgaacttgataggatatcggaagagtcgccgatgcataatcctaacagccacctgaacagcaatacaaaagctaaggaactctcaatatgtagattaaaaatgagagcggtccaactgtcaactgaccatagcacgagtattgaggaggaagtcttgaggattaaagtagaacatcctgatgatccccaagctgtctttaatgatagagtgaagggacagctgaaggttactagagcatttggtgctggttttctaaagaagccaaaatttaacgaggcactacttgagatgttccgcattgactatgttggaacatcaccatatatcagctgcaaccctgctgtacttcaccatcgactctgcgcaaatgatcggtttcttgtactgtcgtcagatggattgtatcaatatttcagcaatgatgaggtagtttcgcatgtgttatggttcatggagaatgtaccagagggagacccagcgcaataccttgtagctgaacttctttgtcgtgcagccaagaagaatggaatgaattttcacgagttactggatatcccccagggtgatcgtcggaaataccatgatgatgtttctgttatggtaatctcacttgaaggaagaatttggcgatcttctggatga

SEQ ID NO: 76 - protein, 963 aa, Sorghum bicolor
MGNSTSRVVGCFAPPDKAGGGVDLDFLEPLDEGLGHSFCYVRPGAVADSPAITPSNSERYTLDSSVMDSETRSGSFRHEPAAADDLAAAAAGLQRPCRSFGETTFRTISGASVSANASSARTGNLTVSLLAGDVQEPAAAFESTASFAAVPLQPVPRGSGPLNTFLSGPLERGFASGPLDKGSGFMSGPLDKGAFMSGPIDGGSRSNFSAPLSYGRRKARLGLLVHRISRPMKTALSRTFSRSSHNPGWVQKFLMHPMAQLPWARDAKSRSEGSQNGLEPGIPEPEYNVTRNLQWAHGKAGEDRVHVVLSEEQGWLFIGIYDGFSGPDAPDFLMSNLYKAIDKELEGLLWVYEDSSERCDHVSNLEEGESASASVDAPHDDNGQFQSDNGKQEQLGNFGKQNVSPGKGCDESVLQVQPNCTSCEEKDLAAQDSSSQKLGRDEIVEEMAGADLGNDLQSRESHNSNSGLSGTDLNTSCTCATETSAYCDQHAKFLKENRKSKRLFELLEMELLQDYNKRLSKASLEERKIPSLHVAQAGTAEGSSRNAAEISRCSLAATGECFDDSEDLGSSRHADSVLGTDLKECTGCSISTSSSEHKQVTRRFVFGSKLRKMYKKQKMLQKKFFPWNYDWHRDQPHVDESVIKSSEVTRRCKSGPVEHDAVLRAMSRALETTEEAYMEIVEKELDRHPELALMGSCVLVMLMKDQDVYVMNLGDSRAILAQDNDQYNSSSFLKGDLRHRNRSRESLVRVELDRISEESPMHNPNSHLNSNTKAKELSICRLKMRAVQLSTDHSTSIEEEVLRIKVEHPDDPQAVFNDRVKGQLKVTRAFGAGFLKKPKFNEALLEMFRIDYVGTSPYISCNPAVLHHRLCANDRFLVLSSDGLYQYFSNDEVVSHVLWFMENVPEGDPAQYLVAELLCRAAKKNGMNFHELLDIPQGDRRKYHDDVSVMVISLEGRIWRSSG

SEQ ID NO: 77 - DNA, 345 bp, Sorghum bicolor
atggcgagcaaggtggtctccatcctggtgctcgcattcctgctcctcgccgccgtcgccgtccccgtgtctgcaggtccgcggcagcgggggaagaacggcggtggcggcgccggcggcggtggtgggagcccaagtggtggcggcaacctgaagccctgggagtgctcgcccaagtgcgcgtcgcggtgctcgcagacgcagtacaagaaggcctgcctcaccttctgcaacaagtgctgcgccacgtgcctctgcgtgccgccgggcttctacggcaacaagggcgcctgcccctgctacaacaactggaagaccaaggaaggagggcccaagtgcccctag

SEQ ID NO: 78 - protein, 114 aa, Sorghum bicolor
MASKVVSILVLAFLLLAAVAVPVSAGPRQRGKNGGGGAGGGGGSPSGGGNLKPWECSPKCASRCSQTQYKKACLTFCNKCCATCLCVPPGFYGNKGACPCYNNWKTKEGGPKCP

SEQ ID NO: 79 - DNA, 549 bp, Sorghum bicolor
atggctgcccatgtggacccgctggtggtggggagggtgatcggcgatgtggtggacctgttcgtgccgacggtggccatgtcggtgcgcttcggcaccaaggacgtaaccaacggctgcgagatcaagccatccctcaccgccgctgctccggtcgtccagattgccggcagggccaacgacctcttcaccctggttatgactgacccagatgctccgagccccagcgagccaacgatgagggagttgatccactggctggtggttaacataccaggtggagccgatccttctcaaggtagtgagacggtgatgccgtacctgggcccgtgcccgccggtgggcatccaccgctacgttctggtggtgtaccagcagaaggcccgcttcagggctccgccggtgctagcaccgggggcggaggtggaggcgtcgcgcgcacggttcaggaaccgcgcctttgccgaccgccatgacctaggcctcccagtcgccgccatgtacttcaacgcgcagaaggagccagccaaccgccaccgtcactactga

SEQ ID NO: 80 - protein, 182 aa, Sorghum bicolor
MAAHVDPLVVGRVIGDVVDLFVPTVAMSVRFGTKDVTNGCEIKPSLTAAAPVVQIAGRANDLFTLVMTDPDAPSPSEPTMRELIHWLVVNIPGGADPSQGSETVMPYLGPCPPVGIHRYVLVVYQQKARFRAPPVLAPGAEVEASRARFRNRAFADRHDLGLPVAAMYFNAQKEPANRHRHY

SEQ ID NO: 81 - DNA, 996 bp, Sorghum bicolor
atggagggatccgccgccgcgccgctccgcacgcgcgtctgcatcatcgggagcggtcccgcggcgcacaccgcagccatctacgcggcccgcgcggagctcaagcccgtgctcttcgagggctggatggccaacgacatcgccgccggcgggcagctcaccaccaccaccgacgtcgagaacttcccgggcttccccaacggcatcatgggcgccgacctcatggacaactgccgcgcgcagtccctgcggttcggcaccaacatcctctccgagaccgtcaccgccgtcgacttttcggctcgccccttccgcgtcactgccgactccacaaccgtcctcgccgatgcggtcatcgttgccacgggagccgtcgcgcggcgcctccacttccccgggtccgatgcgtactggaaccgcggtatctccgcctgcgccgtctgcgacggtgccgcccccatcttccgtaacaagcccatcgctgtcgtaggcggcggcgactccgctatggaggaggccaacttcctcaccaagtacggctcccacgtctacatcatccaccgccggaataccttccgtgcttccaagatcatgcaggccagggctctcgagaaccccaaaatcaaggtcgtctgggactcggaggttgtcgaggcctatggcggtgcagacggcggcccactggctggcgtcaaggtcaagaacctgctgaacggggaggtctcggatcttcaggtggccggcctcttcttcgccatcggacacgagccggcgaccaaattcctgggcgggcagctcgaactcgattcagatggatatgttgcaaccaagccaggttccactcacaccagtgtcaagggggtctttgctgctggcgacgtgcaggacaagaagtaccgccaggccattactgccgctggatcagggtgcatggccgcattggacgctgagcactacctgcaggagattggtgcacaggagggaaagtctgattga

SEQ ID NO: 82 - protein, 331 aa, Sorghum bicolor
MEGSAAAPLRTRVCIIGSGPAAHTAAIYAARAELKPVLFEGWMANDIAAGGQLTTTTDVENFPGFPNGIMGADLMDNCRAQSLRFGTNILSETVTAVDFSARPFRVTADSTTVLADAVIVATGAVARRLHFPGSDAYWNRGISACAVCDGAAPIFRNKPIAVVGGGDSAMEEANFLTKYGSHVYIIHRRNTFRASKIMQARALENPKIKVVWDSEVVEAYGGADGGPLAGVKVKNLLNGEVSDLQVAGLFFAIGHEPATKFLGGQLELDSDGYVATKPGSTHTSVKGVFAAGDVQDKKYRQAITAAGSGCMAALDAEHYLQEIGAQEGKSD

SEQ ID NO: 83 - DNA, 1503 bp, Sorghum bicolor
atgaggatcgaggaggtgcagtcgacctcgaagaagcagcgcatcgccacccacacccacatcaagggcctcggcctcgacgtagctgcccccgctcctccgttcctccttcctcccccctctggtttttctagggttttagctcttccgtgtgttcgcgttgtagttcctcactgttttttttttccccgttggtttcttttgggagaggagcaggccaatgggatggcgattgggttggcggcggggtacgtgggccaggcggcggcgcgcgaggctgacgggctgtcggtcgacatgatccgccagaagaagatggccggacgcgcgctgctccttgcgggcccgcccgccacgggcaagacggcgctagcgctcggcatagcccaggagctcggcagcaaggtccctttctgtcctatggtaggatcagaagtttactcctcagaggtcaagaaaactgaggtgctgatggagaatttccgtagagctataggtttgcgtattaaggaaaacaaagaggtttacgaaggagaggttactgaactttccccagaagaggctgagagtacaactggtggatatgcaaaaagcattagccatgtaatcattggcctaaagactgttaaagggactaagcaactgaagttagatccttcaatttatgatgctttgatcaaggaaaaggtggcagtgggtgatgttatatacattgaagcaaatagtggagcagtgaaaagagttggtagatgtgattcttttgctacagaatacgatcttgaagctgaagagtatgttcctatccccaaaggtgaagtccataagaaaaaggaaatagtgcaggacgtaacacttcatgaccttgatgcagcaaatgctcagccacaaggtgggcaagatattttgtcccttatgggccagatgatgaagccacgaaaaactgaaatcaccgaaaagctgcgccaagagattaataaggtggtaaacagatatattgacgaaggaattgcagagcttgtacctggtgttttgttcattgatgaggtccacatgttggatattgaatgtttttcttatcttaaccgtgcattggagagcccattatcaccaattgtgatacttgctacgaacaggggaatatgtaatgtaagaggaactgatatgacaagtccacatggtataccagtggatcttctagataggttggtgattattcggacagaaacatatggccctactgagatgatacagatattggctatccgagcacaagtggaagagattgatattgatgaagaaagtcttgcttatttaggcgagatcggacagcagacatccttgagacatgctattcagttgctatcacctgccagcgtggtcgcaaagactaatggaagagagaagatctgcaaggctgatcttgaggaagttagcgggctctatttggatgccaaatcctccgctcgcctgctccaggagcaacaagaaagatacatcacctag

SEQ ID NO: 84 - protein, 500 aa, Sorghum bicolor
MRIEEVQSTSKKQRIATHTHIKGLGLDVAAPAPPFLLPPPSGFSRVLALPCVRVVVPHCFFFPRWFLLGEEQANGMAIGLAAGYVGQAAAREADGLSVDMIRQKKMAGRALLLAGPPATGKTALALGIAQELGSKVPFCPMVGSEVYSSEVKKTEVLMENFRRAIGLRIKENKEVYEGEVTELSPEEAESTTGGYAKSISHVIIGLKTVKGTKQLKLDPSIYDALIKEKVAVGDVIYIEANSGAVKRVGRCDSFATEYDLEAEEYVPIPKGEVHKKKEIVQDVTLHDLDAANAQPQGGQDILSLMGQMMKPRKTEITEKLRQEINKVVNRYIDEGIAELVPGVLFIDEVHMLDIECFSYLNRALESPLSPIVILATNRGICNVRGTDMTSPHGIPVDLLDRLVIIRTETYGPTEMIQILAIRAQVEEIDIDEESLAYLGEIGQQTSLRHAIQLLSPASVVAKTNGREKICKADLEEVSGLYLDAKSSARLLQEQQERYIT

SEQ ID NO: 85 - DNA, 843 bp, Sorghum bicolor
atgttgacaccgcgcgtcctcaagccttcgctgctccgccgcctgcgcgctgccgccgagctgcctccgccgtggcgaccccggatcctacctgtgcagacttaccattccagaggctattctaatgggggaagctccaagtatgataggccaatgagacagttttctgaacagaatgagtcaacttctaggccattgatatattatgttgctcctgctctacttgcttttgctgggatagcaacttttgttcattacaatgatgagaggcgtgcagttcccttcgctaaagtaccaggacagaccagtgttcccaaaagatgtaataccaatagacctgctataggagggccatttaagctatatgatacagaaaaaaatgaggtgactgaatcgaagcttcggggaaattggactctgatgtactttggctatacatcatgcccagatgtgggtccagccgaagttcagaagatggctgatgttgttaaactgttagagtcaaagtatgctatcaagattataccactctttatcacaattgatcctcaacgtgattcaccttctcagcttaaggcataccttagtgagtttgacccaagaatagtaggactaacaggccccatcagtgcagtaagacagattgctcaggagtaccgtgttttctttaaaagagtagaggaagttggtcaggactatcttgtagagagctctcacaatatgtacttgctagatccatgcttggagacagttaggtgctttggaactgagtatgaagcatcagaccttgctgaggcgataacaacagaggttcagaaagcatctgcttcatcaacaaattag

SEQ ID NO: 86 - protein, 280 aa, Sorghum bicolor
MLTPRVLKPSLLRRLRAAAELPPPWRPRILPVQTYHSRGYSNGGSSKYDRPMRQFSEQNESTSRPLIYYVAPALLAFAGIATFVHYNDERRAVPFAKVPGQTSVPKRCNTNRPAIGGPFKLYDTEKNEVTESKLRGNWTLMYFGYTSCPDVGPAEVQKMADVVKLLESKYAIKIIPLFITIDPQRDSPSQLKAYLSEFDPRIVGLTGPISAVRQIAQEYRVFFKRVEEVGQDYLVESSHNMYLLDPCLETVRCFGTEYEASDLAEAITTEVQKASASSTN

SEQ ID NO: 87 - DNA, 516 bp, Sorghum bicolor; identical to SEQ ID NO: 61

SEQ ID NO: 88 - protein, 171 aa, Sorghum bicolor; identical to SEQ ID NO: 62

SEQ ID NO: 89 - DNA, 1167 bp, Sorghum bicolor
atggcgaccggcggcagcgggagcgacgatgtccacgggctcacgtttggcaagaagatctacttcgagcaggacgcggccgtcgccgccgcaggcggaagcgggagcgggagcgcgactgcggcggcgggcggcaggaaggggaagggcgtggccaccggtggcggcaggccggcgtccgccagcgccgcctctgccacccagccgccgaggtgccaggtggatgggtgcggcgtggatctgagcgccgtcaagcagtactactgccgccacaaggtgtgctacatgcactccaaggagccgcgcgtcgtcgtcgccggcatcgagcagcgcttctgccaacagtgcagcaggttccaccagttacctgaatttgaccaagggaaacgtagctgccgccgacgcctcattggtcacaatgagcgccggaggaagccaccacctggacctctcacttcacgatatggccggcttgctgcatcatttcaagagcctggtaggttcagaagcttcctgcttgacttctcgtacccaagggttccaagcagcgtgagagatgcgtggcaaggagttcagcccggcggcgacaggatgctgggtaccatccagtggcatgggaaccaagaacctcacccacaccgcagtgcagctgcgggctatggcaaccatgcatacaactgccatggtggcttggtggcaggggcttccatgctcccctctgcctttgagctcccgcccggcggatgtgttgcaggagttaccaccgactccagctgtgctctctctcttctgtcaactcagccatgggatacaaccccccaaagtggcagccacaaccggtccccagcaatgtccgccgcggccagcgccttcgaaggcaccccggtggcgccgtccgtcatggcgagcagctacacggcgtcaagcacctggacggcctcacgggaccctgccgacggtgccaggaacgcgcagcagcatcacgatgatgctctgcacctggtccatccaggcccggtccaccacggccacttctccggcgagctcgagctcgccctgcagggaagcgggccaccgccgccgccaaacatgccgcacgtcgaccatggcagctccagcggcaccttcagccattccaccaccaacgcaatgaactggtccctgtag

SEQ ID NO: 90 - protein, 388 aa, Sorghum bicolor
MATGGSGSDDVHGLTFGKKIYFEQDAAVAAAGGSGSGSATAAAGGRKGKGVATGGGRPASASAASATQPPRCQVDGCGVDLSAVKQYYCRHKVCYMHSKEPRVVVAGIEQRFCQQCSRFHQLPEFDQGKRSCRRRLIGHNERRRKPPPGPLTSRYGRLAASFQEPGRFRSFLLDFSYPRVPSSVRDAWQGVQPGGDRMLGTIQWHGNQEPHPHRSAAAGYGNHAYNCHGGLVAGASMLPSAFELPPGGCVAGVTTDSSCALSLLSTQPWDTTPQSGSHNRSPAMSAAASAFEGTPVAPSVMASSYTASSTWTASRDPADGARNAQQHHDDALHLVHPGPVHHGHFSGELELALQGSGPPPPPNMPHVDHGSSSGTFSHSTTNAMNWSL

SEQ ID NO: 91 - DNA, 1203 bp, Sorghum bicolor
atggcagagcaccaccagccccaacaacaagagatgaacgtggtccctactagcgggcttgacctgcctccagggttccgcttccaccctagtgacattgagattatcagcgactacttaatgaacaaggtgcgcaacacaaacttcacctgcatcgccattggagaggtcgatgtaaacaagaccgagccatgggacctcccagatcaagcaaaatggggcgagaaagagtggtacttcttcaaccaaaaggaccgcaagtatccaacggggctgagggcaaaccgggccacaaaggccggttattggaaagcaacaggaaaagacaaggaggtttacaaaaccacagaaggggtgttgatgttggtcggcatgaagaagacgctcgtcttctacaagggcagggctcctaggggtgataaaaccaactgggtgatgcatgagtataggctcgaaggcagcggtaggctcctcggtcccgcatccgcatctagctcaatagccactgctgccactgccacaaaagcttcaacttctgctcccatggatgagtgggtggtctgtcgtgtgtttgaaaagaccactgggattaagaagacgactgcaccatcttacgaggttgccatggctagcactgagattgatcagaatcagaataacatccaagcgatccccatccctatgtcgctacagctgccattgtctgtgcctatgcccatgcaatttcccatcattccagactttgctatggacccagtggccccctactaccctaatgctagcactgggattcctacgatgatgccgtctatgacaggtatcagtggcactagcgggctccagattaacaacgcccagttcagcaatccgataatcgcgtcgccacaaatgaacttctaccaccagatgggcatgggggctgtagctggccggatagacatgggggctgcagttggccaaatgggtatgggggcaggagctggccagatgggcatgggggcagcagttgcccagatggacatgggagcagctggagcgggtggctttgatgttgttgcgccagagagtaggccatcctcaatggtgtcacagaaggatgaccaggctaatgccgctgagatctcatcgatgatgtctgtgaccgacccagggtctgcaaccaccaccatagagatggatggcatatggaagtataagtattga

SEQ ID NO: 92 - protein, 400 aa, Sorghum bicolor
MAEHHQPQQQEMNVVPTSGLDLPPGFRFHPSDIEIISDYLMNKVRNTNFTCIAIGEVDVNKTEPWDLPDQAKWGEKEWYFFNQKDRKYPTGLRANRATKAGYWKATGKDKEVYKTTEGVLMLVGMKKTLVFYKGRAPRGDKTNWVMHEYRLEGSGRLLGPASASSSIATAATATKASTSAPMDEWVVCRVFEKTTGIKKTTAPSYEVAMASTEIDQNQNNIQAIPIPMSLQLPLSVPMPMQFPIIPDFAMDPVAPYYPNASTGIPTMMPSMTGISGTSGLQINNAQFSNPIIASPQMNFYHQMGMGAVAGRIDMGAAVGQMGMGAGAGQMGMGAAVAQMDMGAAGAGGFDVVAPESRPSSMVSQKDDQANAAEISSMMSVTDPGSATTTIEMDGIWKYKY

SEQ ID NO: 93 - DNA, 525 bp, Sorghum bicolor
atgtcaagggacccacttgtagtaggcaacgtagttggagatatcttggatccatttatcaaatcagcatcactcagagtcctatacaacaatagggaactgactaatggatctgagctcaagccatcgcaagtagccaatgaaccaaggattgagattgctggacatgacatgaggaccctttacactttggtgatggtggatcccgactcaccaagtccaagcaatccaacgaaaagagagtaccttcactggttggtgacagatattccagaatcaacaaatgtgagctatggaaatgaggtagtaagctatgaaagtccaaagccaagtgctggaatacatcgcttcgtctttgtgctcttccgccaatctgtccggcaaactatttatgcgccaggatggaggcaaaatttcaacacaagagacttctcagcattctacaatctaggaccacctgtggcctcagtgttcttcaactgccaaagggagaatgggtgtggtggcagacgatatattagatga

SEQ ID NO: 94 - protein, 174 aa, Sorghum bicolor
MSRDPLVVGNVVGDILDPFIKSASLRVLYNNRELTNGSELKPSQVANEPRIEIAGHDMRTLYTLVMVDPDSPSPSNPTKREYLHWLVTDIPESTNVSYGNEVVSYESPKPSAGIHRFVFVLFRQSVRQTIYAPGWRQNFNTRDFSAFYNLGPPVASVFFNCQRENGCGGRRYIR

SEQ ID NO: 95 - DNA, 1905 bp, Sorghum bicolor
atggggaactccctcgcctgcttctgctgcgcgggcggcgccgccggccgccgccgccacgtggcgcccgccgcgctcccctccgaccccgcctacgacgagggcctcggccactccttctgctacgtccggccggacaaggtgctcgtgccgttctccgcggacgacgacctcgtcgccgacgccaaggcggctgccgcggccgaggaggccaccacgttccgggccatctccggggccgcgctcagcgccaacgtctccacgccgctctccacctccgttctcctcctgctgccggacgactccacggcctcgtcggccgccgcagcatcctccgggtttgagagctccgagtcgttcgccgccgtgccgctgcagcccgtcccgaggttcccgtcggggcccatctgcgcgcccgccgggggcgggttcctctccgggcccatagagagggggttcctctcgggacccctcgacgccgcgctcatgtccggcccgctccctggcgccgccacatccggccgcatgggaggcgccgtgcccgcgctccgccggagtctctcgcacggcggccgccgcctgcggaattttacccgcgcgcttctcgcgcgggcggaaaagcttcatgattccctggatctcggctcgcccgacgccgcggccgccgtggccgcctgtggtggcggctccgccgggctgcagtgggcgcaggggaaggccggcgaggaccgcgtccacatcgtggtgtccgaggagcggggctgggtgttcgtcggcatctacgacggcttcaatggtcctgacgccacggacttcctcgtcacccatctctacgccgctgtgcatcgcgagctccgcggcctgctctgggatcagtgcgagcgggaggagcagcacgacacacatcccgaccagccgaccagcaccacggcctcagatcatccggaccagccccccaaccgccgccgcgcccgccgatcaagacccccgcgcggcgccgatgatgaccaacggcggtggaagtgcgagtgggagcgcgactgctccagcctgaagccgccaactcagcgccctgctaggagcagcagcgagaacgaccacctcgccgtgcttaaggcgcttgcacgcgcgcttcgcaagaccgaggaagcctaccttgacgtcgccgataagatggtcggagagttcccagagcttgcgcttatgggctcttgtgttctagccatgcttatgaaaggggaggacatgtacctcatgaatgtaggtgacagccgggctgtcctgggaacaatggacagtgttgatctcgagcagatcagtgagggttcattcgatggattggttggggatggcactccgctcttgtcagctgtgcagcttacatcagaacatagcacgtcagtgcgagaggaagtttgcagaatacggaacgagcatcctgatgacccgtccgcaatctccaaggaccgtgtgaagggctcgcttaaggtgacgagagcgtttggagctggttacttgaaacagcccaagtggaatgatgcgctgctggagatgttcagaatagattacgtcgggtcatccccgtacatcacgtgcaatccttcactctttcaccatagactcagcacaagggacagattcttgatactatcttcagatgggctttaccaatatttcaccaacgaggaggcggttgctcaggttgaaatgttcatcgcaacaacccctgaaggcgaccctgcccagcatctggtggaggaagttcttttcagagctgcaaacaaagcaggaatggactttcatgaattgatcgagataccacatggcgaccgtcggcgataccatgacgacgtatctgtcattgtaatatctttggagggcaggatctggagatcatgtgtgtaa

SEQ ID NO: 96 - protein, 634 aa, Sorghum bicolor
MGNSLACFCCAGGAAGRRRHVAPAALPSDPAYDEGLGHSFCYVRPDKVLVPFSADDDLVADAKAAAAAEEATTFRAISGAALSANVSTPLSTSVLLLLPDDSTASSAAAASSGFESSESFAAVPLQPVPRFPSGPICAPAGGGFLSGPIERGFLSGPLDAALMSGPLPGAATSGRMGGAVPALRRSLSHGGRRLRNFTRALLARAEKLHDSLDLGSPDAAAAVAACGGGSAGLQWAQGKAGEDRVHIVVSEERGWVFVGIYDGFNGPDATDFLVTHLYAAVHRELRGLLWDQCEREEQHDTHPDQPTSTTASDHPDQPPNRRRARRSRPPRGADDDQRRWKCEWERDCSSLKPPTQRPARSSSENDHLAVLKALARALRKTEEAYLDVADKMVGEFPELALMGSCVLAMLMKGEDMYLMNVGDSRAVLGTMDSVDLEQISEGSFDGLVGDGTPLLSAVQLTSEHSTSVREEVCRIRNEHPDDPSAISKDRVKGSLKVTRAFGAGYLKQPKWNDALLEMFRIDYVGSSPYITCNPSLFHHRLSTRDRFLILSSDGLYQYFTNEEAVAQVEMFIATTPEGDPAQHLVEEVLFRAANKAGMDFHELIEIPHGDRRRYHDDVSVIVISLEGRIWRSCV

SEQ ID NO: 97 - DNA, 948 bp, Sorghum bicolor
atgagggcgccccccggccgacgcggcctggtcgccgccggcgcctgcgcgctgctgctggcggcgttcctcctcctcggcagcctgctggtgacgacgccgctggcgccgtacctgctgccgccgctggcgctgtcgctgccgtgcctgcccaaggtcaccgcgccgtcggggtccgggtacggcgcggcgcccggcgtcgcggagctggcggaggccgccgtgacgtacgccacctcggagaccgtgccgcagcagtcgcccgaggagatctcgctgtcgctggccgtgctccggcgacgcgcgccgctgcggctgctggtgttcggcctgggccacgactccaggctgtggcacgcgctcaaccccgtcggcgtcaccgtgttcctggaggaggaccccgcgtggtaccgcgaggtgcgggcgcagtcgccgttcctccgcgcgcacctcgtggcctaccgcacccggctcgaccaggcggaccgcctcatggccacgtacaggaggcacccggcctgcctcccgtccacggccaccggctccggtggcggcggcggcgacggcagcaacgccaccggcctgctgcgggtgcgcggcaactgggcgtgcccgctggcgctgcacaacctgccgcccgaggtgtacgagacggagtgggacatgttcatgatcgacgcgcccaagggctacttcgcggcggcgcccgggaggatggccgcgatatggaccgcggcggccatggcgcgcgcgcgccgcggcgagggggacaccgacgtcttcctgcacgacgtcgaccggagggtggagaggatgttcgccgaggagttcctctgcgaaaagtttcgggtcggcggcaccggccggctctggcatttcagcatcccgccggtttcacggcgcgggaatgccacggcgaccgccggtgaccggagaccgttctgttaa

SEQ ID NO: 98 - protein, 315 aa, Sorghum bicolor
MRAPPGRRGLVAAGACALLLAAFLLLGSLLVTTPLAPYLLPPLALSLPCLPKVTAPSGSGYGAAPGVAELAEAAVTYATSETVPQQSPEEISLSLAVLRRRAPLRLLVFGLGHDSRLWHALNPVGVTVFLEEDPAWYREVRAQSPFLRAHLVAYRTRLDQADRLMATYRRHPACLPSTATGSGGGGGDGSNATGLLRVRGNWACPLALHNLPPEVYETEWDMFMIDAPKGYFAAAPGRMAAIWTAAAMARARRGEGDTDVFLHDVDRRVERMFAEEFLCEKFRVGGTGRLWHFSIPPVSRRGNATATAGDRRPFC

SEQ ID NO: 99 - DNA, 492 bp, Arabidopsis thaliana
atgaaatattgcaaagtggaattacgcttcatcaaccaaaggaaactctctccatcacaaccaaactcagttctcgttttcatcgaaaccaaatctgaagagatctttgtaaacccaacaaccggtcaccaaaccagccggtccactccggcttcaccatcttttttcgatactatcaatctctgtagttctagtcaccaccacatccgatcacttctccgtagtcggttcgttagctaccattttttgtgtgatatcttagccccagagatcgcgacggaggcaatcaacttaggttttggacgaaacggctttaccttcaccgtggtcgtcacagttactaaccggaccgtctccgttacttcaaacgacacagaaatcattgagaatggttctactagagaggataaaagcagaggaattaaagagttcgaacatggaaacagagtcgtgttccatctgtttccacgatctctccagtccgaaacctag

SEQ ID NO: 100 - protein, 163 aa, Arabidopsis thaliana
MKYCKVELRFINQRKLSPSQPNSVLVFIETKSEEIFVNPTTGHQTSRSTPASPSFFDTINLCSSSHHHIRSLLRSRFVSYHFLCDILAPEIATEAINLGFGRNGFTFTVVVTVTNRTVSVTSNDTEIIENGSTREDKSRGIKEFEHGNRVVFHLFPRSLQSET

SEQ ID NO: 101 - DNA, 255 bp, Sorghum bicolor
gacgggaagagaaccagggagaagagcaggagcatcatcaccacagggacgaagagaaggaacagcggtggtggcggaagtggtggcagcaccaatggcaggcacaggaggatcactgtcgccaccagcaacatcatcagttctcccttgcttatcgtcgacgccaccgcccgcgctgtgatggaacttctgcctcccccaatggctgcccggctccagttttttttttttctaagctttcatgttctgttgtga

SEQ ID NO: 102 - protein, 84 aa, Sorghum bicolor
DGKRTREKSRSIITTGTKRRNSGGGGSGGSTNGRHRRITVATSNIISSPLLIVDATARAVMELLPPPMAARLQFFFFLSFHVLL

SEQ ID NO: 103 - DNA, 357 bp, Zea mays
atgatgctgcactgcacatttgctatatctgaggctcctgcgcgcgccttggcccttggccaggtgtctgtcatgcgggcgatgccgcaggaagaagaagccgcggtggcgacgacgaccatggccgggggcaaggtggcggcgctgctggccacggcggccgcgctgctgctgctgctcccgctggcgctgccgccgctgccgccgccgcccacgcagctgttgttcgtccccgtggtcttgctgctcctcgtggcgtccctcgcgttctgccccgccgcgacctcctcgccgtcgccgatgcatgccgccgaccacgggtcgttcgggaccactggatcaccgcacctatgttga

SEQ ID NO: 104 - protein, 118 aa, Zea mays
MMLHCTFAISEAPARALALGQVSVMRAMPQEEEAAVATTTMAGGKVAALLATAAALLLLLPLALPPLPPPPTQLLFVPVVLLLLVASLAFCPAATSSPSPMHAADHGSFGTTGSPHLC

SEQ ID NO: 105 - DNA, 1083 bp, Sorghum bicolor
atggacgcggtggtcgtcgacgcgggctccaaactgctcaaggccggcatcgcggcgcccgaccaggcgcccccgctggtgatgccgtcgaagatgaaggtggatgtggaggaccaggagctggccgacggcgccgtggttgaggaggtggtgcagccggtggtgcgcggcttcgtcaaggactgggacgccatggaggacctactcaactacgtcctctacaggaacattgggtgggagattggggatgagggccagattctcttcaccgaaccgctcttcacacccaagactcttcgggagcaattggtgcagcttatgtttgaaaagttcaatgtttcaggcttttatgcctctgaacaggctgtattgtcactctatgctgttggacgcatttcaggatgtacagttgacattgggcacgggaaaatagatattgctccagtttgtgaaggagctgttcaacacatagcttctaagagattagagattgggggggttgacttgacaaacctgtttgcacaagaactgaaaaaatccaatccatcagtaaaccttgatgtttctgatgttgagaggctgaaagagcagtatgcatgttgcgcagaagatcagttggcttttgaagctataggaagctcttgccaaccagaaaagcacactcttcctgatgggcaggttataacaattgaaaaagagggatacattgttggtgaagctttatttcaaccatgtatattgggcttggaagattatggtatcgttcaccagctagttactagtgtctcaaatgtttcatcagagtaccatcgtcagctgcttgaaaataccatgttatgtggtggcaccgcatcaatgactggctttgaggacaggttccagagagaagcaaatctgtctgcttcagcaatctgtccatcacttgtgaagccccctgaatacatgcctgagaacctagcaaggtactcggcctggttgggtggtgcgatcttggccaaggtcgttttccctcaaaaccagcatgtcaccaagggcgagtatgatgagacggggccgtccattgtgcacaagaagtgcttttag

SEQ ID NO: 106 - protein, 360 aa, Sorghum bicolor
MDAVVVDAGSKLLKAGIAAPDQAPPLVMPSKMKVDVEDQELADGAVVEEVVQPVVRGFVKDWDAMEDLLNYVLYRNIGWEIGDEGQILFTEPLFTPKTLREQLVQLMFEKFNVSGFYASEQAVLSLYAVGRISGCTVDIGHGKIDIAPVCEGAVQHIASKRLEIGGVDLTNLFAQELKKSNPSVNLDVSDVERLKEQYACCAEDQLAFEAIGSSCQPEKHTLPDGQVITIEKEGYIVGEALFQPCILGLEDYGIVHQLVTSVSNVSSEYHRQLLENTMLCGGTASMTGFEDRFQREANLSASAICPSLVKPPEYMPENLARYSAWLGGAILAKVVFPQNQHVTKGEYDETGPSIVHKKCF

SEQ ID NO: 107 - DNA, 324 bp, Sorghum bicolor; identical to SEQ ID NO: 53

SEQ ID NO: 108 - protein, 107 aa, Sorghum bicolor; identical to SEQ ID NO: 54

SEQ ID NO: 109 - DNA, 1065 bp, Sorghum bicolor
atggcgcacgagcggggcgccgccgcatccacccacgccgcggctccaacctccgaggaagacgcgctgtttattgatttactacatgaagcacccctgtcgggtcaccgggagcctagaagcatagttggtgggaccttgtactgtatcttattggtaggttttgctgctgttgccatttcagctccatggatatttctcttcgcgccagatatgatctctccattgctatgcagctccaatgctatccttcttgttcttacaggcatttttcaacaatattgggttcaccaggtcaggaaagtgagattgcagggctattatgattttagccagaaactgaagcgtattgctcgacttccatttgctactattgcttgtgggactgctttgatgctcttaatcatggtctggcaacctcttttaaaaatactatcagtttcactgcttctaaggattgccatcgtagttgaagtcacgtgtgctggatgttttatgggcttatacatatggcacatccacaaatacaactctttggatgggcagcctgatattttgcggtcattatattctgcactccagccatcttgtactttggaagatcgaagatatcatgatgcccgtctttctgatcagcaaatggcgttacttcagtaccaaagggagaatattcattatctgagtgaggaggtcctccgcttgcaagaatgcttaagcaaataccagagaactgctggaaccactcctcaggttgatcttgcccatcttttagcaactcgtgatcaagaacttcgagcactcactgctgagatggatcaagtgcactccgaacttcaacttgcccgtggtttgatagatgaaaaggactcggagatccagcgtatccgtctgagcaacaaccagtatgttgaagaaaatgataggctcagagctattctcggtgaatggagtgctcgagcagcaaagcttgaacgtgcgttggaggcagagcgggcgtcaaacatcgaattgcggaaaaacattgcaaagtttagaggtcatttgtacaaagagcaggaggcctga

SEQ ID NO: 110 - protein, 354 aa, Sorghum bicolor
MAHERGAAASTHAAAPTSEEDALFIDLLHEAPLSGHREPRSIVGGTLYCILLVGFAAVAISAPWIFLFAPDMISPLLCSSNAILLVLTGIFQQYWVHQVRKVRLQGYYDFSQKLKRIARLPFATIACGTALMLLIMVWQPLLKILSVSLLLRIAIVVEVTCAGCFMGLYIWHIHKYNSLDGQPDILRSLYSALQPSCTLEDRRYHDARLSDQQMALLQYQRENIHYLSEEVLRLQECLSKYQRTAGTTPQVDLAHLLATRDQELRALTAEMDQVHSELQLARGLIDEKDSEIQRIRLSNNQYVEENDRLRAILGEWSARAAKLERALEAERASNIELRKNIAKFRGHLYKEQEA

SEQ ID NO: 111 - DNA, 1179 bp, Sorghum bicolor
atgtcgtcggacgatgaggtcagggaggagaaggagctcgacctctcctccaacgacgtcgtcactaagtacaaggctgccgccgaaatcctcaacaatgctctgaagctggttgtgtctgagtgcaaaccaaaagccaagattgttgacctttgtgagaagggtgactctttcataagagagcaaactgggaatgtctacaagaatgcaaagaggaagattgaaaggggcattgctttcccaacctgtgtatctgtgaacaacacagtctgccacttctcaccgcttgccacagatgatgcagttctggaagaaaatgatatggttaaaattgatatgggctgtcatattgatggctttatcgctgtggtggcacacacacatgtaattacaagtgggcctgtcacaggaagagcagctgatgttcttgctgctgccaacacagcagcagaagttgctgtgaggcttgtgagacctgggaagaagaataaggatgttactgaagcaatccagaaggttgctgctgcttatgattgcaaaattgtggaaggtgttcttagccatcaactgaaacaatttgtgattgatggtaacaaagtggtgctcagtgtctccaatgctgatacaaaggttgatgatgctgaatttgaagaaaatgaagtctacgcaatcgatattgtcaccagtactggggaggggaagcccaagttattggatgagaagcagaccactatctacaaaagggctgtagacaagaattatcacttgaagatgaaagcatcaaggttcattttcagtgagatcagccagaaattcccaatcatgcctttcactgctagggcattagaagagaagcgtgcacgcttaggcttggtggaatgcatgaaccatgagctattgcagccgtaccctgtacttcatgagaagccaggtgatcttgttgcacacataaagttcactgtgcttctgatgcccaatggatcagataagattacatcacatccgctacaggagttaaagcccacaaaatccattgaagacaatgctgagataaaggcatggcttgctttggggacaaaatcaaagaagaagggtggtggaaagaagaagaaaggcaagaaaggagatgcagcagaagcagatcccatggaggcgacaaacggtgcaagccaagaataa

SEQ ID NO: 112 - protein, 392 aa, Sorghum bicolor
MSSDDEVREEKELDLSSNDVVTKYKAAAEILNNALKLVVSECKPKAKIVDLCEKGDSFIREQTGNVYKNAKRKIERGIAFPTCVSVNNTVCHFSPLATDDAVLEENDMVKIDMGCHIDGFIAVVAHTHVITSGPVTGRAADVLAAANTAAEVAVRLVRPGKKNKDVTEAIQKVAAAYDCKIVEGVLSHQLKQFVIDGNKVVLSVSNADTKVDDAEFEENEVYAIDIVTSTGEGKPKLLDEKQTTIYKRAVDKNYHLKMKASRFIFSEISQKFPIMPFTARALEEKRARLGLVECMNHELLQPYPVLHEKPGDLVAHIKFTVLLMPNGSDKITSHPLQELKPTKSIEDNAEIKAWLALGTKSKKKGGGKKKKGKKGDAAEADPMEATNGASQE

SEQ ID NO: 113 - DNA, 1425 bp, Sorghum bicolor
atggtgctgccagcgtccattgccctgctgctgtccctgctccccgtggccgccgacgcagcggcagcggcagcggcggcggcggcggcggcggcaatggatccaacagagagggagacgctgttccgtgtcatggaggccgtgtcctccgaccgggactggcgcgtcgagagccccgacccctgcggcgcgccgtggccggggctcgagtgcaagccggccgccgacgcggcggcgcgcatgcacgtcacgcgcctggacttcggcgtggagcccaacccgacgtgcaaggacacggcgtccttccctcccgaggtgttctccctgccgcacctccagtccctcttcttcgtcgactgcttcaccaacccggccgccgccaccacactcaccctgccggcgcccggcgccaacctctcggcggcctccggcctgcagcagcttagcatcagggcgaacccggcgctgtccggcacgatgccgccggcgctggccagcctccgtgccctccaggtgctcaccatctcccagaacggcctcgtccgcggcgagatcccgcagggcatcggggacctcacctcgctggtgcgcctcgacctcagctacaactcgctctcgggacccgtgccgagccagattggccagctcaagagcttggtcggtttggacctcagctataactcgctgtctggcgccatcccgagccggatcggcgagctgcggcagctgcagaagctcgacctcagctccaacaacctcaccggcggcatcccggacgccgtcgccaacctgacctcgctcaccttcttggcgctcagcaacaatggcctgactggccatttccctccaggcatctccgggctccgaaacctgcagtacctgatcatggacaacaacccaatgggagtcccgctgccttccgagctcggcagcctcgcccgtctgcaagaactccggctggccggctccggctactcgggcccgataccggaggcgttcggccagttggcgagcctgacgacgctttcgctgcaggacaataacctgacggggccgatcccggcggcgctgagccggttgggcaggatgtaccacctgaacctgagcaacaacgcgcttggcggggccgtgccgttcgacggcgcgttcctgcgccggctgggcgggaacctcgacctgagcggcaactccgggctgtgcctggacgaccggagcgtcctgcgggacggaggggtcggcgtcggcgcctgccgaggcggcggcgacggtgacaccccgtcgtcatcgccgcgtactagctcggggagcagagctccgggaagaggtgtgcttacgacgactggttccctgttatgcctgcccagccctgcgtgcgtggccgtgtgctgcctttttgccttgatgaacgagcacgctctttattga

SEQ ID NO: 114 - protein, 474 aa, Sorghum bicolor
MVLPASIALLLSLLPVAADAAAAAAAAAAAAAMDPTERETLFRVMEAVSSDRDWRVESPDPCGAPWPGLECKPAADAAARMHVTRLDFGVEPNPTCKDTASFPPEVFSLPHLQSLFFVDCFTNPAAATTLTLPAPGANLSAASGLQQLSIRANPALSGTMPPALASLRALQVLTISQNGLVRGEIPQGIGDLTSLVRLDLSYNSLSGPVPSQIGQLKSLVGLDLSYNSLSGAIPSRIGELRQLQKLDLSSNNLTGGIPDAVANLTSLTFLALSNNGLTGHFPPGISGLRNLQYLIMDNNPMGVPLPSELGSLARLQELRLAGSGYSGPIPEAFGQLASLTTLSLQDNNLTGPIPAALSRLGRMYHLNLSNNALGGAVPFDGAFLRRLGGNLDLSGNSGLCLDDRSVLRDGGVGVGACRGGGDGDTPSSSPRTSSGSRAPGRGVLTTTGSLLCLPSPACVAVCCLFALMNEHALY

SEQ ID NO: 115 - DNA, 522 bp, Sorghum bicolor
atggctaatgactctctgacgaggggacacataatcggggatgtcttagacccgtttactagctcagtgcctctaactgtcatgtatgatggcagaccggtgtttgatgggatggagtttcgggcgtcggcggtgtcggtgaaacctagagttgagattggaggtgatgattttcgagtggcctataccctagttatggtggatcctgatgcgcctaatcccagcaaccctaccctacgggaatacttgcattggatggtgaccgacatcccagcatcaactgatgatagctttggccgagagctcataccatatgagaacccaagccccaccatgggcatccaccgtattgtcttggtgctctaccagcaactggggcggggcacggtgtttgcaccgcaagtgcgtcaaaacttcaacttgcgcaattttgcacgccgtttcaacctcggcaagcctgtggctgcgatgtacttcaactgccagcggcaaacaggcacaggtgggagaaggttcacttga

SEQ ID NO: 116 - protein, 173 aa, Sorghum bicolor
MANDSLTRGHIIGDVLDPFTSSVPLTVMYDGRPVFDGMEFRASAVSVKPRVEIGGDDFRVAYTLVMVDPDAPNPSNPTLREYLHWMVTDIPASTDDSFGRELIPYENPSPTMGIHRIVLVLYQQLGRGTVFAPQVRQNFNLRNFARRFNLGKPVAAMYFNCQRQTGTGGRRFT

SEQ ID NO: 117 - DNA, 783 bp, Sorghum bicolor
atggcctcctctgctgctggcacttcaaagaagccgaggaagacgaagaaagcgaccaaggccaaggacgtgccggtggtggtgttggaggatgaggaagacgcagctctgactctatccgtggaggagaaggacaccctggagtgcgacatctgctgcttacccttcgagtctcaagttttcatgtgcaagaacgggcattctgggtgtgccaactgttgcctccgcacgagcggcaagtgctggagctgccccgagccgatgggcatccgctgccgtccgctcgagaagctcctggcggcggcgaccactgcctgcaagttcaggaagaacggctgcaacaaggccgtccgctacacggagaagctgaggcacgaggagaccctgcccgcgcgcgccgaccacggcggccccgacggcttcgccgccatcgtcggcggcctccggggcacggcggtgaccgtgcacagggacgcgccgttccgcgtgctgctgccgcgcgacagggacgaccgcgtgttcctgctgctcaacggccgcgacctgctgcaggggcgctctctgtccctgctctgcctcggcccgcgcccagagagcggcgtggagctggagtacgagatggaggtgggcggcgccgccgcgccgggggagctcgcgctgtcggcgtcgggcaccgtgccgtgcgcccggcggctcgaggggttccaggccaaggggtttctcttcgtgcctgatgcgtattggggctcctccggcaccgtctccgtcagagttcgtgtgtga

SEQ ID NO: 118 - protein, 260 aa, Sorghum bicolor
MASSAAGTSKKPRKTKKATKAKDVPVVVLEDEEDAALTLSVEEKDTLECDICCLPFESQVFMCKNGHSGCANCCLRTSGKCWSCPEPMGIRCRPLEKLLAAATTACKFRKNGCNKAVRYTEKLRHEETLPARADHGGPDGFAAIVGGLRGTAVTVHRDAPFRVLLPRDRDDRVFLLLNGRDLLQGRSLSLLCLGPRPESGVELEYEMEVGGAAAPGELALSASGTVPCARRLEGFQAKGFLFVPDAYWGSSGTVSVRVRV

SEQ ID NO: 119 - DNA, 2310 bp, Sorghum bicolor
atggcagtgctgctgcgcccggcggcgatcgccggaggtcggcaggtgtggccggtggcagaggacgatgagggggcgcgcgaggcggaggcggcgtcgcagcggctggtggaggcggtggcgcgcggcgacgcgagggaggccggcgagctgctcgcagcggggcgcgcggacgtgaactacgccggggtggtgtggctcagggcgcggcgcatcgcggaagcggaaccccaggagggcgccgccgccgaggcgcgggccgtgcacgaggagatccgcgccgacgtctcgccgctcttcctcgcctccggcaacggcgacgtcgcgctcgtccgcgccttgctcgcaaagggagcggacgtgaacggcaaggtgttccggggctacccgacgacggctgcggcacgggaggggtgcgcagaggtggccgagctgcttgtgcgtgcgggtgcgtcgcagccggcctgcgaggaggccgtcgtggaggctgcgctgcagggccaggccgcgctcgcggccatcttcatgcgctcggacctcgtccgcccccgcgttgccgtccacgcgctcgtgtccgccgcggcgcgcggcttcgtcgacgtcgtcgacacgctcatcaagtgtggagctgatccaaacgcgaccgctcgggtgctcctgcgctcgctgaagccatccctgcatgccaacgtcgactgcacggcgctctttgccgcaatcgtgagccgtcaagtcgctgtggtccgccatctacttcaggccggcgtgaagagggacacgaaggtgaggctgggagcatggtcctgggacgcgtccaccggcgaggagctgcgcgtcggcgccggactcgccgagccttacgacgcggtatggtgcgccgtggagtactacgagtccacgggctccatcctgcgcatgctcctccgtagcgggtacacgtcggccactgcacacctcggccgcacgctcctccaccacgccatcctctgtggcagtgccggtgccgtccagaccttgctggcgtccggtgcagactccgaagctcccgtgaagacgtccaggagcaacaggtccaggccggttcacctggccgtgcgcctgggccagccggagatcctgcggatgctggtcgacaggggctgcgacgtgaacgcgagggcggacgccggcgacaccgccgccatcctctgttcgcgccacaaacgcgaggactgcctcggagttctcgtgtccgccggcgcagacgtcgcgctgttaaactcggctggcgactccccgtcctccgtggcctcctctgggggatggaagaccggcttcgaaagggctgtcattggcgcaattcggtccgggaccatcccacgctcgagcgatcggaacgtgttctcgccgctgatgttcggcgcgctgtgcggcgacgcgaccgcgatggaagtgctgctcgctcagtcagacgtggacgtggacgagcaggatctggacgggtgctcgcccataatggctgctgccaagatgggcaacgtcgaggccttccgtgccctcgtattcgccggcgccaacgtgaagctgagcaacaagcgcggcgagacggccattgggctggcgcagcagagcaagaagagggacctcttcgagcaggtcatgctcgagttcgcgctggagaagggcatgcctggaggcttctacgcgcttcactgcgcctcccgtcgcggcgacaccgcggcggtgcggcacctcgccagcacgggcggcgacgtgaatatccccgacggcgacggctacaccccgctgatgctcgcggccagggaaggccacgcgggcgtgtgtgagcttctcatctcctacggcgctcgctgcgacctccgcacgccgcgcggcgagacggcgctctccctggcgcgggcagcgctggccacggcggggttcaacaaggccgaggacgtgatcatggacgagctgggccggcaggcggtcctccagggcgcgcacgtcaggaagcacaccaagggcgggcgcgggaggcctcatggcaagtccctgcgcatggtcgctgcggcgggcgtgctcaggtggggcgggtcgaaccggcgcaacgtgatctgccgggaggccgaggtcggtggcagctcggcgttccagaggcacaggcagaggaagggagacgcgtatgagcacgggctgttccgtgtggtgactgcgacagggagggaggtgcacttcgtgtgccagggcggcgaggaggccgcggagctgtgggtgaggggcatcagggccgtgacaagggcggcgtttggcaagagaggcaaggagtga

SEQ ID NO: 120 - protein, 769 aa, Sorghum bicolor
MAVLLRPAAIAGGRQVWPVAEDDEGAREAEAASQRLVEAVARGDAREAGELLAAGRADVNYAGVVWLRARRIAEAEPQEGAAAEARAVHEEIRADVSPLFLASGNGDVALVRALLAKGADVNGKVFRGYPTTAAAREGCAEVAELLVRAGASQPACEEAVVEAALQGQAALAAIFMRSDLVRPRVAVHALVSAAARGFVDVVDTLIKCGADPNATARVLLRSLKPSLHANVDCTALFAAIVSRQVAVVRHLLQAGVKRDTKVRLGAWSWDASTGEELRVGAGLAEPYDAVWCAVEYYESTGSILRMLLRSGYTSATAHLGRTLLHHAILCGSAGAVQTLLASGADSEAPVKTSRSNRSRPVHLAVRLGQPEILRMLVDRGCDVNARADAGDTAAILCSRHKREDCLGVLVSAGADVALLNSAGDSPSSVASSGGWKTGFERAVIGAIRSGTIPRSSDRNVFSPLMFGALCGDATAMEVLLAQSDVDVDEQDLDGCSPIMAAAKMGNVEAFRALVFAGANVKLSNKRGETAIGLAQQSKKRDLFEQVMLEFALEKGMPGGFYALHCASRRGDTAAVRHLASTGGDVNIPDGDGYTPLMLAAREGHAGVCELLISYGARCDLRTPRGETALSLARAALATAGFNKAEDVIMDELGRQAVLQGAHVRKHTKGGRGRPHGKSLRMVAAAGVLRWGGSNRRNVICREAEVGGSSAFQRHRQRKGDAYEHGLFRVVTATGREVHFVCQGGEEAAELWVRGIRAVTRAAFGKRGKE

SEQ ID NO: 121 - DNA, 1506 bp, Sorghum bicolor
atggcggtggtgtcgcggctggcagtcgcgcgggtgtcgtcggacggcgcggcgcgccccgcggcggcaggggggaggaggacgaggactgcgctcgcgggggttcggttcccgccggccgccaggacggggaggacgaggcgcggcggggccgtcgcggctagcccccccacggaggaggcggtgcagatgacggagccgctcaccaaggacgacctcgtcgcctacctcgtctccgggtgcaagcccaaggagaattggagaattggcacggagcatgaaaagtttggtttcgaagtcgacacgttacgccctataaaatacgatcagattcgtgacatactgaatgggctcgctgagcgatttgattgggacaagataatggaaggagacaatgttatcggcctcaagcagggaaagcaaagcatctcactagaacctggaggccaatttgaacttagtggcgctcctctcgaaacattacatcaaacttgtgctgaggtcaattcacatctttatcaggtcaaagcagttggagaggaaatgggaataggatttcttgggcttggctttcagccgaaatgggcactgagtgatataccaataatgccaaagggaagatacgaaataatgaagaattacatgcctaaagttggtacccttggtcttgacatgatgttccggacatgtactgtgcaggttaatcttgacttcagttcagaacaggatatgataaggaaatttcgcgctggccttgcattgcagcctattgcaactgcaatatttgccaattctcccttcaaagaaggaaaaccaaatggatttctcagcttaaggagccatatctggacagatactgataacaaccgtgcagggatgctcccttttgtcttcgataactcatttgggtttgagcaatatgtggattatgcattggatgttccaatgtattttgtgtatcgaaataaaaagtatattgactgcaccggaatgtcgtttcgggattttatgcaaggaaagctcccacaggctcctggggagttgcctactcttaatgattgggagaaccatctaacaacaatttttcctgaggttagattaaaaagataccttgagatgagaggtgctgatggtggcccatggaggagattgtgtgcactgcctgcattttgggttgggctgctgtacgatgaggaatcgttacaaagtattatagacatgacttttgattggacaaaggaggaaagagagatgctaagacggaaggtacctgtgactggtctgaagacaccatttcgtgatggatatgtaagagatttagctgaggaagttctaaaactggccaagagtggactggaaagaagaggatacaaggaggttggtttccttagagaggttgacgaagtggtgagaacaggagtgacacctgctgagaggcttctgaatctgtacgagacgaagtggcaacgcaacgtagaccatgttttcgagcatttgttatactga

SEQ ID NO: 122 - protein, 501 aa, Sorghum bicolor
MAVVSRLAVARVSSDGAARPAAAGGRRTRTALAGVRFPPAARTGRTRRGGAVAASPPTEEAVQMTEPLTKDDLVAYLVSGCKPKENWRIGTEHEKFGFEVDTLRPIKYDQIRDILNGLAERFDWDKIMEGDNVIGLKQGKQSISLEPGGQFELSGAPLETLHQTCAEVNSHLYQVKAVGEEMGIGFLGLGFQPKWALSDIPIMPKGRYEIMKNYMPKVGTLGLDMMFRTCTVQVNLDFSSEQDMIRKFRAGLALQPIATAIFANSPFKEGKPNGFLSLRSHIWTDTDNNRAGMLPFVFDNSFGFEQYVDYALDVPMYFVYRNKKYIDCTGMSFRDFMQGKLPQAPGELPTLNDWENHLTTIFPEVRLKRYLEMRGADGGPWRRLCALPAFWVGLLYDEESLQSIIDMTFDWTKEEREMLRRKVPVTGLKTPFRDGYVRDLAEEVLKLAKSGLERRGYKEVGFLREVDEVVRTGVTPAERLLNLYETKWQRNVDHVFEHLLY

SEQ ID NO: 123 - DNA, 1164 bp, Sorghum bicolor; identical to SEQ ID NO: 69

SEQ ID NO: 124 - protein, 387 aa, Sorghum bicolor; identical to SEQ ID NO: 70

SEQ ID NO: 125 - DNA, 792 bp, Sorghum bicolor
atgaagatccagtgcgacgcgtgcgagggcgcggcggccacggtggtgtgctgcgccgacgaggccgcgctgtgcgcgcgctgcgacgtcgagatccacgccgccaacaagctcgccagcaagcaccagcgcctcccgctcgaggcgctctccgccaggctcccccgctgcgacgtctgccaggagaaagcggcgttcatcttctgcgtggaggaccgggcactcttctgccgggactgcgacgagcccatccacgtcccgggcacgctctccgggaaccaccagcgctacctggccaccggcatccgcgtggggttcgcctccgcctccgcctgcagcagcgacggcgcctgcgacgcgcacgactccgaccaccacgccccgcccaaggccaccgtcgagacgccgcaggcccaagccgccgtctccgccgccgcggcagcgcagcaggtgccctcgccgccgcagttcctgccgcagggctgggccgtcgacgacctcctgcagttctccgactacgagtccagcgacaagctgcacaaggagtccccgctcgggttcaaggagctggagtggttcgccgacatcgacctcttccacgagcagcaggcgcccaaggccggcaggacgttggcggaggttccggagctcttcggatcccaggcggccaacgacgcggcgtactacaggccggccaaagccgctgcaggcgccggggtgcgccagagcaagaaggcccggatcgaggtcaccgacgacgaggactacctcatcgtccctgatctcggttaa

SEQ ID NO: 126 - protein, 263 aa, Sorghum bicolor
MKIQCDACEGAAATVVCCADEAALCARCDVEIHAANKLASKHQRLPLEALSARLPRCDVCQEKAAFIFCVEDRALFCRDCDEPIHVPGTLSGNHQRYLATGIRVGFASASACSSDGACDAHDSDHHAPPKATVETPQAQAAVSAAAAAQQVPSPPQFLPQGWAVDDLLQFSDYESSDKLHKESPLGFKELEWFADIDLFHEQQAPKAGRTLAEVPELFGSQAANDAAYYRPAKAAAGAGVRQSKKARIEVTDDEDYLIVPDLG

SEQ ID NO: 127 - DNA, 522 bp, Sorghum bicolor
atgtctaggtctgtggagcctctcatagttgggcgggtgattggagaagttctcgactcctttaacccatgtgtgaagatgatagtgacctacaactcaaacaaacttgtattcaatggccatgagatctacccatcagctgttgtatctaaacctagggtagaggttcaagggggtgacttgcggtctttcttcacattggttatgacggacccagatgtcccaggaccaagtgatccatatctaagggagcaccttcattggatcgtgactgatatacctgggacaacagatgcctcctttgggcgagaggtcataagctacgagagcccaagaccaaacattggtatccacaggttcatttttgtgctcttcaagcagaagggtaggcaaactgtaactgtgccatcctccagagatcatttcaacactcggcagttcgctgaggaaaatgaccttggcctccctgtagctgctgtctacttcaatgcacagagagaaactgcagctaggagacgctga

SEQ ID NO: 128 - protein, 173 aa, Sorghum bicolor
MSRSVEPLIVGRVIGEVLDSFNPCVKMIVTYNSNKLVFNGHEIYPSAVVSKPRVEVQGGDLRSFFTLVMTDPDVPGPSDPYLREHLHWIVTDIPGTTDASFGREVISYESPRPNIGIHRFIFVLFKQKGRQTVTVPSSRDHFNTRQFAEENDLGLPVAAVYFNAQRETAARRR

SEQ ID NO: 129 - DNA, 522 bp, Sorghum bicolor
atgtcaagggtgttggagcctctcattgtggggaaagtgattggtgaggtgctggaccatttcaaccccacggtgaagatggtggtcacctacaactccaacaagcaggtcttcaacggacatgagttcttcccttccgcagtcaccgccaagccgcgtgttgaggtccaagggggtgacctcaggtccttcttcacattggtgatgactgaccctgatgttccaggacctagtgatccctacctgagggagcaccttcactggattgttactgatattcctgggactactgatgcttcttttgggagagaggtggtgagctacgagaccccaaagccaaacattggcatccacaggttcatctttgtgctgttccggcagaagcgccggcaggcggtgaacccgccgtcgtccaaggaccgcttcagcacccgccagttcgctgaggacaacgacctcggcctccccgtcgccgccgtctacttcaacgcacagcgcgagaccgccgcccgccggcgctaa

SEQ ID NO: 130 - protein, 173 aa, Sorghum bicolor
MSRVLEPLIVGKVIGEVLDHFNPTVKMVVTYNSNKQVFNGHEFFPSAVTAKPRVEVQGGDLRSFFTLVMTDPDVPGPSDPYLREHLHWIVTDIPGTTDASFGREVVSYETPKPNIGIHRFIFVLFRQKRRQAVNPPSSKDRFSTRQFAEDNDLGLPVAAVYFNAQRETAARRR

SEQ ID NO: 131 - DNA, 522 bp, Sorghum bicolor; identical to SEQ ID NO: 127

SEQ ID NO: 132 - protein, 173 aa, Sorghum bicolor; identical to SEQ ID NO: 128

SEQ ID NO: 133 - DNA, 1350 bp, Sorghum bicolor
atgaggccgacgatgaaggcgcagcacggcaacgggcgcgggagcaggagccccttcctgacgtcctacgcgctcacgctcgccttcatcaccttcgtctccgtgctctacttcaaggacttctcctccacgctgcaccgccccttcctcaaccgcccgccgccgcacccgcacccgtacccgcaccgccgcccgtcgctccgcccccgccaccccgcctcctcggactcagacgcagtaagccaggccgggcgccgcgcggcggcagagcagctgccgttcgcggtgggcgcggcgccggcgggttgcgacgtcgcgcaaggggagtgggtgtacgacgaggcggcgcggccgtggtaccaggaggaggagtgcccctacatccagccgcagctcacgtgccaggcccacggccgccccgaccgggcgtaccagcactggcggtggcagccgcgcgggtgctcgctgcccagcttcaatgcaactctaatgctagagatgttgcggggtaaacgaatgctgtttgttggagattctctgaaccgcgggcaatatgtatcattggtttgcctcctgcatcggatcatccctgagagctccaagtcaatggagacatttgattcccttacagttttcaaagcaaaggactataatgccaccattgagttttactgggctccctttctggctgagtcaaattctgatgatgctgttgtgcaccgtattgcggatcgaattgtaaggggaacatccattgagaaacatgccaaattttggaaggggtctgacatcttagtattcaatacctacctttggtggatgaccggacaaaagatgaaaattttgcaaaactcttttgaagataaaaacaaggacatcatagaaatggaaacagaggaagcctatggaatggtactgaatgctgtgctgaaatgggttgagagcaacatgaatcccaaaacttcaagagtattttttgtcactatgtcacccactcatacaaggagcaaagattggggtgatgatactgatgggaactgctacaaccagacaactcctatcaaggatttttcttactggggaccaggcaccagcaagggcctgatgcgagtcattggggaagtgttcggcgtgtccaagaccaagatccccgtgggggttgtgaacatcacccagctctctgaatacaggaaggacgcgcatactcagatttacaagaagcagtggaacccgctaaccccggagcagatcgcgaaccctaagagctatgcggactgcacgcattggtgcctcccagggctccaggacacatggaacgagctgctctactcaaagctctttttcccctga

SEQ ID NO: 134 - protein, 449 aa, Sorghum bicolor
MRPTMKAQHGNGRGSRSPFLTSYALTLAFITFVSVLYFKDFSSTLHRPFLNRPPPHPHPYPHRRPSLRPRHPASSDSDAVSQAGRRAAAEQLPFAVGAAPAGCDVAQGEWVYDEAARPWYQEEECPYIQPQLTCQAHGRPDRAYQHWRWQPRGCSLPSFNATLMLEMLRGKRMLFVGDSLNRGQYVSLVCLLHRIIPESSKSMETFDSLTVFKAKDYNATIEFYWAPFLAESNSDDAVVHRIADRIVRGTSIEKHAKFWKGSDILVFNTYLWWMTGQKMKILQNSFEDKNKDIIEMETEEAYGMVLNAVLKWVESNMNPKTSRVFFVTMSPTHTRSKDWGDDTDGNCYNQTTPIKDFSYWGPGTSKGLMRVIGEVFGVSKTKIPVGVVNITQLSEYRKDAHTQIYKKQWNPLTPEQIANPKSYADCTHWCLPGLQDTWNELLYSKLFFP

SEQ ID NO: 135 - DNA, 807 bp, Sorghum bicolor
atgctctttgttatatgtggtggggtctgggcggtatatcctattgttttctcaatcagcaacttttgtggtatctttcactgcatggtaacagctgtgttggctgtatttaccatcacaagctattgcttggcctcttttaaatctgcaggcgcaccaataagcatacggtggggcagctatcccatggttgggaaaagtgatcttgacaactataccttttgtgcatactgtaataaaccaaagccccccagagcacatcactgccgatcttgtaaaatgtgtgtggtggacatggatcatcattgcccatttattggcaactgtgtgggagcatcaaaccatcaagtgtttgtcatttttcttatatctgtggttattagttgttcttatgctgctgggatgaccatatatgcgagttataagatatggccctctgttgattttccaaacctagcatcaaaccgtcactcaatgagtttttggaaaatattgttggagattattactacagttgcaggctctgccttcttcttgtcagcaaggggtctaattctggtatatctagcattcgctagtttatcagtcaatgctggtataggtgtattactgtgccagcagcttagttatatctatgaaggaaacacatatctcaaccatataagttcaccaaatcccttgcatggagagaggggttttcagaacattgttagattttttgggtgcccttatccaattgccagagttctgttgcgatactcaaacactggcaagttgcaggataattcagggtcaaaacttctttag

SEQ ID NO: 136 - protein, 268 aa, Sorghum bicolor
MLFVICGGVWAVYPIVFSISNFCGIFHCMVTAVLAVFTITSYCLASFKSAGAPISIRWGSYPMVGKSDLDNYTFCAYCNKPKPPRAHHCRSCKMCVVDMDHHCPFIGNCVGASNHQVFVIFLISVVISCSYAAGMTIYASYKIWPSVDFPNLASNRHSMSFWKILLEIITTVAGSAFFLSARGLILVYLAFASLSVNAGIGVLLCQQLSYIYEGNTYLNHISSPNPLHGERGFQNIVRFFGCPYPIARVLLRYSNTGKLQDNSGSKLL

SEQ ID NO: 137 - DNA, 1014 bp, Sorghum bicolor
atgtcgtggttcgggcaccaccaccacaaccagccggctcccccggcgtcggggccgaaccaggtgttcaagatcttctgccgcgccaacgagaactactgcctggccgtccgcgacggcgccgtggtgctggccccgaccaaccccaaggacgagcaccagcactggtacaaggacatgcgcttcagcacccgggtcaaggacgaggaagggatgccggcgttcgcgctcgtcaacaaggccacggggctcgccatcaagcactccctcggccagtcccacccggtgaagctcgcgcctttcaaccctgaccaggaggacgcgtcggtgctgtggacggagagcaaggacgtgggcaagggcttccgctgcatccgcatggtcaacaacacccgcctcaacttcgacgccttccacggcgacaaggaccacggtggcgtgcacgacggcaccggcgtcgtgctctgggagtggtgcaagggcgagaaccagagctggaagatcctgccgtggggacccgaggcgaacgccgcggcgggggccaacggcggcgtgcacaccgtgcgcgtcttctgcaaggccggcggcgaggactactgcctgacggtgcgcaacgggacggcgtgccttgcgcccaccaacccgcgggacgagtaccagcactggatcaaggacatgcggcacagcacccgggtgcgggacgaggaagggtacccggccttcgcgctggtgaacaaggtcaccggggaggcgctcaagcactccacggggcagggccaccccgtgaagctggtgccctacaacccggagtaccaggacgagtcggtgctctggaccgagagccgcgacgtcggcaacggattccgctgcgtccgcatggtcaacaacatctacctcaacttcgacgccttccatggcgacaaggcacacggcggcgtccacgacggcaccgagatcgtgctctggaagtggtgcgagggcgacaaccagcgctggaagatcctcccatggtag

SEQ ID NO: 138 - protein, 337 aa, Sorghum bicolor
MSWFGHHHHNQPAPPASGPNQVFKIFCRANENYCLAVRDGAVVLAPTNPKDEHQHWYKDMRFSTRVKDEEGMPAFALVNKATGLAIKHSLGQSHPVKLAPFNPDQEDASVLWTESKDVGKGFRCIRMVNNTRLNFDAFHGDKDHGGVHDGTGVVLWEWCKGENQSWKILPWGPEANAAAGANGGVHTVRVFCKAGGEDYCLTVRNGTACLAPTNPRDEYQHWIKDMRHSTRVRDEEGYPAFALVNKVTGEALKHSTGQGHPVKLVPYNPEYQDESVLWTESRDVGNGFRCVRMVNNIYLNFDAFHGDKAHGGVHDGTEIVLWKWCEGDNQRWKILPW

SEQ ID NO: 139 - DNA, 723 bp, Sorghum bicolor
atggcgtccgcgccttccgcccccgcctccgccgccgtcaaggccgcggtcgtccccatcccaccggtccacccgccatcctccgtggcagtactggcgcggcgcgcgccgacgccggtgccggccgccctgcgcgccctgggcctgggcggcaacgcgcggcatggcgcggcgctggtggcgtccgccgcgctggatgacctgcgcccggccatcgacgagtaccccgagggcatcctgtccggggagtggcccggcaacttctccctcctcagctacgccgacctccgcgcctacctcgagtcccggatcgtcacctccgaccagatgagcccggcggcaaagctcggggacgtgatgtcgcgccccgtgcaggtggccacgccggggcagcgcctcgcggaggtcgatgccatcttcgccgcggagcagttctcgggcctgcctgtggtcgacgaggacggcaggtgcgttggggtgatctccaagaaggacaaggccaaggcgcccaatgggatgcagatggagtcaactgtagttgaagtcatgtcatctcctgcgataaccctgacgcccgagaagacagtcttggaggctgcagcactaatgcttaaggagaaggttcacaggataccggttgtgaatgaacagcaacaagtgatcggaattgtgactcgctcggacgtattccaggcacttgaggccaacaacaacaaagcatga

SEQ ID NO: 140 - protein, 238 aa, Sorghum bicolor
MASAPSAPASAAVKAAVVPIPPVHPPSSVAVLARRAPTPVPAALRALGLGGNARHGAALVASAALDDLRPAIDEYPEGILSGEWPGNFSLLSYADLRAYLESRIVTSDQMSPAAKLGDVMSRPVQVATPGQRLAEVDAIFAAEQFSGLPVVDEDGRCVGVISKKDKAKAPNGMESTVVEVMSSPAITLTPEKTVLEAAALMLKEKVHRIPVVNEQQQVIGIVTRSDVFQALEANNNKA

SEQ ID NO: 141 - DNA, 1140 bp, Sorghum bicolor
atggcctggggtcaaggtgctaagaggtccatactagggcttctctttcgtgctcagcagcaaactgctcggccatactcttcttcagcattccagactcatcaattgagcactcatgttccccaagatggcgtgtttcttaggagattcagctctgaggtgtcttcttcagagcaaatgaaccttataaagcaactcagacaaaggacgagtgctccaatcaaagatgtcaaggcctccctagttgcctgcaactgggatattgatgctgcgcagaaggacctaaggaagagaggtgttgctcttgctgcaaaaaagtcttcacgcactgctgctgaaggtttgctagctatcgcacaagatgacaaaagggctgctgtagttgagcttaactgtgaaactgatttcgtggcaagaaatgatgttttccagtacctggcttcatcattggcaaagatggctttatctgctcagggtcccggtgaattgttcatgccttttggtcctgaacttttagagaacatgtctatcaatcttgatcatccgaacctcagcggggaaacaactgtccaaaatgctgttacagaagttgctgccatggttggggagaatgtgaaactcagaagaggcttcatgctgtccacaactgcacatggtgttgtttcatcttatatgcatacctgtccccagccaggtatgggtcggattgctggattggtcacactagaagcagaagatagcattactctccttgatgctgtcaaaagtgttgggtcatctattgcgatgcagattgttgcaacaaagccattattcttatcaaaagaactggtttctgcttccgctctagaaaatgagcgtgaaatacttcgaacacaggccgaaagttcagggaaatcccaaatggctatggataaaatggtggaaggccgattgaggaagtactttgaagaagttgtgctcatggagcaaaaatatgttttaaatgacaacacaaacgtgaagaccgtgctgaatgacttgtcgaaagaggttggttctaaagtaacaatcggtaacttcatcagaatggaggttggagaagggattgagagaactgaagccgctgatggttcagaggttgctgctggggctatgtag

SEQ ID NO: 142 - protein, 379 aa, Sorghum bicolor
MAWGQGAKRSILGLLFRAQQQTARPYSSSAFQTHQLSTHVPQDGVFLRRFSSEVSSSEQMNLIKQLRQRTSAPIKDVKASLVACNWDIDAAQKDLRKRGVALAAKKSSRTAAEGLLAIAQDDKRAAVVELNCETDFVARNDVFQYLASSLAKMALSAQGPGELFMPFGPELLENMSINLDHPNLSGETTVQNAVTEVAAMVGENVKLRRGFMLSTTAHGVVSSYMHTCPQPGMGRIAGLVTLEAEDSITLLDAVKSVGSSIAMQIVATKPLFLSKELVSASALENEREILRTQAESSGKSQMAMDKMVEGRLRKYFEEVVLMEQKYVLNDNTNVKTVLNDLSKEVGSKVTIGNFIRMEVGEGIERTEAADGSEVAAGAM

SEQ ID NO: 143 - DNA, 2358 bp, Sorghum bicolor
atgggcgggggccgcgcccaggtgaacaaggcccacaagagccgcttcgcgtccaaggcctcccgccacgcgcacaagatagacaaggtcaggagcggcaagtcagagaccagccatcgcgccgccgtcaagggtgcccgtgccgcgcgcatccagcagagcaaggcgatacgtgataaaaaacgtgctgctttgctgaaggagaaacgttcatcaaatggaccttcaagcgcaccacgtgtcattgttcttgttggcctttcttcatcagcaaatgttggatcactagccaaagatcttcttgcactagcggaaggcagtgatgggaaactgaaatcatctaccgttgcttctcctacttataagtttcgaaccacggtactgcaagcaccatatggtgatcttaccacatgcatggaactggcaaaggttgctgatttgttagcattcgtactaccagccaattcattctactgtggtgattcgaacggtccaattgacgagtttggttctcaatgtctgtctgtatttagagccatgggcttacctagtacagctgttttcatccgtgatcttccagcggataataaaagtaggcaggaattgaagaaagcagcaacttctttcctttctgcagagctgcctgaggactgcaagttttacttagcaggcacaaaggatgatttgcataagttcatgtggcatttcaaggagcagcacctttcatcgccacattggagaagccagaggccttatgttatgtctgagcaggtcttcataaatcctgatgaaaatacgggattgtgcacattgctcgtgtctggatatctgcgggcccacaatctttcggtgaatcagcttgtacatgtttcaggtgctggtgattttcagttaggccaaattgatgtcctcaaggatccatgtcctcttagtgagcggaaaagctctgatgtaatggaaactgaagataatggaattcagattgttaacacctttgttccagacccttcgagtcaggaacccttacttgttgaaaatgtgccagatcctcttgccggggagcagacttggccaacggaagaagatatggaggaggctgacataaacaacaaacagagaaaattggtaaagaggaagcttccccgaggcacttcagagtaccaggctgcttggattgttgatgacacagatgatgaagataacgactctgataatgacaaccaggctggttctggaatggtcattgatgagcaaggtcactcagaccaaggaagtgatggttcggatatagatgcagtgtctcactttacagagaagttcgatggagaaactgttggggatactgagatggcagatgaagaaaatttgactaaagaccagatagaggcagagattaagaaaatcaaagaagctaatgctgatgatgaagaatttcccgatgaggtggagacaccattagatgtcccagcaaagaagcggtttgcaaaatacagaggactaaagtcatttaggacatcatcctgggatcctaaggaatcattgccaccggactatgcaagaatatttgcatttgataattttacacgaacacaaaagcatgtctttgctaaaattgccgagttagatggaggcatgaaggattgtgctcaagtgggatcatatgtaaggctttatgtgaaaaatgttcccactgatatagcatccaaactttgtcaaccatcaagaagaatacctgtggttgtttctggtcttcttcaacatgagtccaaaatgtcagttcttcacttcagcataaagaaacatgactcatacgaagctcctatcaaatctaaggagcctttgattttcaatgttggattccggcaatttacagcaaggccattgttttcatccgacaacatcaactgcaataaacataaaatggaaagatttctacaccatgggcggttttctgttgcctctgtatatgctccaatttctttccctccacttcctctaatagttctgaagaacagagatggcgagcaacctgccattgctgctataggttcactaaaaagtgtggatccagatcggatcattctgaagaaaattgttttgactgggtatccacagagagtctcaaaactgaaagcaatcgtgcgttacatgttccacaatcctgacgatgtaaaatggttcaagcctgttgagttgtggacaaaacatggacgtcggggccgcatcaaggagactgttggtactcatggtgccatgaaatgcatattcaatagcagcattcagcagcatgatacagtgtgcatgagcttgtacaaacgcgcttacccgaaatggcctgaacagctctaccacgtataa

SEQ ID NO: 144 - protein, 785 aa, Sorghum bicolor
MGGGRAQVNKAHKSRFASKASRHAHKIDKVRSGKSETSHRAAVKGARAARIQQSKAIRDKKRAALLKEKRSSNGPSSAPRVIVLVGLSSSANVGSLAKDLLALAEGSDGKLKSSTVASPTYKFRTTVLQAPYGDLTTCMELAKVADLLAFVLPANSFYCGDSNGPIDEFGSQCLSVFRAMGLPSTAVFIRDLPADNKSRQELKKAATSFLSAELPEDCKFYLAGTKDDLHKFMWHFKEQHLSSPHWRSQRPYVMSEQVFINPDENTGLCTLLVSGYLRAHNLSVNQLVHVSGAGDFQLGQIDVLKDPCPLSERKSSDVMETEDNGIQIVNTFVPDPSSQEPLLVENVPDPLAGEQTWPTEEDMEEADINNKQRKLVKRKLPRGTSEYQAAWIVDDTDDEDNDSDNDNQAGSGMVIDEQGHSDQGSDGSDIDAVSHFTEKFDGETVGDTEMADEENLTKDQIEAEIKKIKEANADDEEFPDEVETPLDVPAKKRFAKYRGLKSFRTSSWDPKESLPPDYARIFAFDNFTRTQKHVFAKIAELDGGMKDCAQVGSYVRLYVKNVPTDIASKLCQPSRRIPVVVSGLLQHESKMSVLHFSIKKHDSYEAPIKSKEPLIFNVGFRQFTARPLFSSDNINCNKHKMERFLHHGRFSVASVYAPISFPPLPLIVLKNRDGEQPAIAAIGSLKSVDPDRIILKKIVLTGYPQRVSKLKAIVRYMFHNPDDVKWFKPVELWTKHGRRGRIKETVGTHGAMKCIFNSSIQQHDTVCMSLYKRAYPKWPEQLYHV

SEQ ID NO: 145 - DNA, 306 bp, Sorghum bicolor
atgtgggggaagggaaagaagcgtttcggcggcggcggcgagccggcggccaagcggcaggccgccggggacgaaggcccctccgaacccgccgaagacggtacggtcgtagccgagatatcgaagaacaagaaggtgtctgttaggaactggaaaggcagggtcttcgttgacctccgcgagttctacgtcaaggacggcaagtctctccccacccgcaaaggtatatcactccagttagatcagtggaagatattgagggacaatatcaaagccatagatgaggccatcaaggagaacacatga

SEQ ID NO: 146 - protein, 101 aa, Sorghum bicolor
MWGKGKKRFGGGGEPAAKRQAAGDEGPSEPAEDGTVVAEISKNKKVSVRNWKGRVFVDLREFYVKDGKSLPTRKGISLQLDQWKILRDNIKAIDEAIKENT

SEQ ID NO: 147 - DNA, 1884 bp, Sorghum bicolor
atgaagcgcgagtaccaagacgccggcgggagcggcggcgacatgggctcctccaaggacaagatgatggtggcggcggcgggggcaggggagcaggaggaggagctggacgagatgctggcctcgctcggctacaaggtgcgttcgtcggatatggcggacgtcgcacagaagctggagcagctcgagatggccatggggatgggcggcgttggcggcgccggcgctaccgctgatgacggcttcatctcgcacctcgccacggacaccgtgcactacaatccctccgacctgtcgtcctggctcgagagcatgctgtccgagctcaacgcgcccccaccgccgctcccgcccgcgacgacgccgccggccccgaggctcgcgtccacctcgtccaccgtcacaagtggcgccgccgccggtgctggctacttcgatctcccgcccgccgtcgactcgtccagcagcacctacgccctgaagccgatcccctcgccggtggcggtggcgtcggccgacccgtcctccacggactccacgcgggagcccaagcggatgcggactggcggcggcagcacgtcgtcttcgtcttcctcgtcgtcatccatggatggcggccgcactaggagctccgtggtcgaggctgccccgcccgcgacgcaggcgcccgcggcggccaacgggcccgccgtgccggtggtggtgatggacacgcaggaggctgggatccggctcgtgcacgcgctgctggcgtgcgcggaggccgtgcagcaggagaacttctctgcggcggacgcgctggtcaagcagatccccatgctggcctcgtcgcagggcggtgccatgcgcaaggtcgccgcctacttcggcgaggcgcttgcccgccgcgtgtatcgcttccgcccgacgccggacacctccctcctcgacgccgccgtcgccgacttcctgcacgcgcacttctacgagtcctgcccctacctcaagttcgcccacttcaccgcgaaccaggcaatcctcgaggctttcgccggctgccgccgcgtccacgtcgtcgacttcggcatcaagcaggggctgcagtggccggctcttctccaggccctcgccctccgtcctggcggccccccatcgttccgactcaccggcgtcggcccaccgcagcacgacgagaccgacgccttgcaacaggtgggctggaaacttgctcagttcgcgcacaccatccgcgtcgacttccagtatcgtggcctcgtcgccgccacgctcgctgacctggagccgttcatgctgcaaccggagggggacgacaaggatgaggagcccgaggtgatcgccgtcaactcagtgttcgagctgcatcggctgctcgctcagcccggcgccctggagaaggtcctgggcacggtgcgcgcggtgcggccgaggatcgtgaccgtggtcgagcaggaggccaaccacaactccggcacattccttgaccgcttcacggagtccctgcactactactccaccatgttcgattctctcgagggcgccggctccggccaatccaccgatgcctctccggccgcggccggcggcacggaccaggtcatgtccgaggtgtacctgggccggcagatctgcaacgttgtggcatgtgagggcgcggagcgcacggagcgccacgagacgctgagtcagtggcgcggccgcctcgtcggctccgggttcgagcccgtgcacctgggctccaatgcctacaagcaggcgagcacgctgctggcactcttcaacggcggcgacgggtacagggtggaggagaaggacgggtgcctgaccctggggtggcatacgcgcccgctcatcgccacctcggcatggcgcctcgccgctccgtga

SEQ ID NO: 148 - protein, 627 aa, Sorghum bicolor
MKREYQDAGGSGGDMGSSKDKMMVAAAGAGEQEEELDEMLASLGYKVRSSDMADVAQKLEQLEMAMGMGGVGGAGATADDGFISHLATDTVHYNPSDLSSWLESMLSELNAPPPPLPPATTPPAPRLASTSSTVTSGAAAGAGYFDLPPAVDSSSSTYALKPIPSPVAVASADPSSTDSTREPKRMRTGGGSTSSSSSSSSSMDGGRTRSSVVEAAPPATQAPAAANGPAVPVVVMDTQEAGIRLVHALLACAEAVQQENFSAADALVKQIPMLASSQGGAMRKVAAYFGEALARRVYRFRPTPDTSLLDAAVADFLHAHFYESCPYLKFAHFTANQAILEAFAGCRRVHVVDFGIKQGLQWPALLQALALRPGGPPSFRLTGVGPPQHDETDALQQVGWKLAQFAHTIRVDFQYRGLVAATLADLEPFMLQPEGDDKDEEPEVIAVNSVFELHRLLAQPGALEKVLGTVRAVRPRIVTVVEQEANHNSGTFLDRFTESLHYYSTMFDSLEGAGSGQSTDASPAAAGGTDQVMSEVYLGRQICNVVACEGAERTERHETLSQWRGRLVGSGFEPVHLGSNAYKQASTLLALFNGGDGYRVEEKDGCLTLGWHTRPLIATSAWRLAAP

SEQ ID NO: 149 - DNA, 363 bp, Sorghum bicolor
atggcggaggagaggaagcaggcgggctcccgctggcccgccggaggcagcggcggcgggcgaatgcgcgacgccgagggtggcagtggcaagatgcggggccggcaggcaacaaaggcaaggcccgtagtactggcgccgccgggccaggggtacttcacggcggggctggcggcgctgttcctctgcctcaccgcgctgctggtgttcctgccgctcgtgctgcccccgctgccgccgccgccgtatcttctgctgctcgtgccggtgggcctcatggccgtactgctggctctggtggcgctcgtgccgtccgacggccgggccgccaccgccgccgtcgcgtcgtcgtgcgtgtgctga

SEQ ID NO: 150 - protein, 120 aa, Sorghum bicolor
MAEERKQAGSRWPAGGSGGGRMRDAEGGSGKMRGRQATKARPVVLAPPGQGYFTAGLAALFLCLTALLVFLPLVLPPLPPPPYLLLLVPVGLMAVLLALVALVPSDGRAATAAVASSCVC

SEQ ID NO: 151 - DNA, 1089 bp, Sorghum bicolor
atgtcgtgctttgcatgctgcggtgatgaagatacccaagtaccagacaccaggactcaatacccaggacaccatccagcaaggacagatgcataccgccctgctgatcaacctcccaagggtcctcagcctgtgaaaatgcagccaattgcagtccctgctattcctgtagatgagattcgggaggtgactaagggttttggtgatgaagccttgattggtgagggctcctttggcagagtatacttcggtgttttgagaaatggtaggagcgccgcggtcaaaaagttggattctaataagcagccagaccaagaattcttggcgcaggtgtctatggtatcaaggctgaagcatgaaaatgttgttgagttgcttggttactgtgctgatgggacactccgcgtccttgcttatgagtttgctactatgggttctcttcatgatatgcttcatggaaggaaaggtgttaaaggggctcaacccggtccagtcttatcatggtcacaacgtgtgaagatagctgtgggggcagcaaaaggcctcgagtatcttcatgagaaagcacaaccccatatcatacacagagatattaagtctagcaatgttcttctttttgatgatgatgtagctaagatagctgactttgatttgtcaaaccaagctcctgacatggcagctcggcttcactcaactagggttcttggaactttcggatatcatgctcctgagtatgcaatgactgggcaactcagctctaagagcgatgtatatagtttcggagttgttcttcttgagctattgactggaaggaaacctgtcgaccatacattaccaaggggacagcagagtcttgtgacttgggctacaccaagacttagcgaagacaaggttagacaatgtgttgactcaagacttggaggggactatcctccgaaagctgttgcaaagtttgcagctgttgccgccttgtgtgttcaatacgaagcagacttccggccaaacatgagcattgttgtcaaggcgctacaacccctgctgaatgcgcatgcgcgggcgactaacccaggagaaaatgctgggtcataa

SEQ ID NO: 152 - protein, 362 aa, Sorghum bicolor
MSCFACCGDEDTQVPDTRTQYPGHHPARTDAYRPADQPPKGPQPVKMQPIAVPAIPVDEIREVTKGFGDEALIGEGSFGRVYFGVLRNGRSAAVKKLDSNKQPDQEFLAQVSMVSRLKHENVVELLGYCADGTLRVLAYEFATMGSLHDMLHGRKGVKGAQPGPVLSWSQRVKIAVGAAKGLEYLHEKAQPHIIHRDIKSSNVLLFDDDVAKIADFDLSNQAPDMAARLHSTRVLGTFGYHAPEYAMTGQLSSKSDVYSFGVVLLELLTGRKPVDHTLPRGQQSLVTWATPRLSEDKVRQCVDSRLGGDYPPKAVAKFAAVAALCVQYEADFRPNMSIVVKALQPLLNAHARATNPGENAGS

SEQ ID NO: 153 - DNA, 1869 bp, Sorghum bicolor
atggcggcgtcgctgaggtggtggtggtcggcggtggtattgttggtggtggtcggcgtgagcccggttgtcgccaacacggagggtgatgctctttacagcctacggcaaagcctgaaagataacaacaatgtgctgcagagttgggatccaactctggttaatccatgtacatggttccatgttacttgtaaccctgataacagtgtcatcagacttgatcttggaaatgcacaactatcaggtccgttggtgccacagcttgggcaattgaaaaatatgcaatatctagaactttacagtaacaacataagtgggccaataccacctgaactggggaacttaactaacctggtcagtttggatttgtacctcaacaacttcactggaggcattcctgacaccttgggccaactatcaaagttgcggtttctccgtcttaataacaacagtctttctggccaaattccgaaaacgctgaccaatatcaacactctccaagttctggatctctcaaacaacaatctctcaggaggggtgccatcaagtggttcattttctctgtttacacctataagttttgctaacaacccaaatctttgtggccctggtactacaaagccttgtcctggggctcctccattttctccaccccctccatacaatcccccatcaccagcttcatcaaaaggcgtgtccagcactggagcaattgctggaggcgttgcggctggcactgcatttctgattgctgtgcctgctattggatacgcattgtggcggaggcgaaaacctgaagagcaattctttgatgtccctggtgaggaggatcctgaagttcacctaggacaactcaagaggttttcactgagagagcttcaagttgccacagataattttaacaataggaatgtcctaggaagaggtggttttggaaaggtgtacaaagggagactgtcggatggttcactggtagcggtgaagagattaaaggaggaacgcacccctggcggagagctccagttccaaacagaagttgaattgattagcatggcagtgcacaggaatctgcttcggctccgtggattctgcatgactccaacagagcggttgcttgtatatccatacatggctaatgggagtgtcgcgtcgcgccttcgagaacgcacggaaaatgatccccctcttgaatgggaaacaagggccaggatcgcgctgggatcagccagaggtctctcctacttgcacgaccactgtgatcccaagatcattcaccgcgacgtgaaagccgccaacatcctgttggacgaagactttgaagccgtggtgggtgactttggcctcgccaagctcatggattacaaggacacccacgtgacgaccgctgtccgtgggacgatcggccacatcgcccccgagtatctctccaccggaaagtcctctgagaagacggacgtcttcggctatgggatcatgctcctggaactcatcactgggcagagggcgttcgacctcgctcgtctcgcgaatgatgacgacgtcatgctccttgactgggtgaaggcgctgctgaaggagaagaagctggagcagctggtggacccggacctgcagggccggtacgcggaccaggaggtggagtcgctgatccaggtggcgctgctgtgcacacaggggtccccaatggagcggcccaagatgtcagaggtggtgcggatgctggagggcgacgggctggcggagcgttgggagcagtggcagaaggtggaggtgatgcggcaggaggcggagctcgccccgcgccacaacgactggatcgtcgactccacctacaacctcagggccgtcgaactgtccggcccgaggtag

SEQ ID NO: 154 - protein, 622 aa, Sorghum bicolor
MAASLRWWWSAVVLLVVVGVSPVVANTEGDALYSLRQSLKDNNNVLQSWDPTLVNPCTWFHVTCNPDNSVIRLDLGNAQLSGPLVPQLGQLKNMQYLELYSNNISGPIPPELGNLTNLVSLDLYLNNFTGGIPDTLGQLSKLRFLRLNNNSLSGQIPKTLTNINTLQVLDLSNNNLSGGVPSSGSFSLFTPISFANNPNLCGPGTTKPCPGAPPFSPPPPYNPPSPASSKGVSSTGAIAGGVAAGTAFLIAVPAIGYALWRRRKPEEQFFDVPGEEDPEVHLGQLKRFSLRELQVATDNFNNRNVLGRGGFGKVYKGRLSDGSLVAVKRLKEERTPGGELQFQTEVELISMAVHRNLLRLRGFCMTPTERLLVYPYMANGSVASRLRERTENDPPLEWETRARIALGSARGLSYLHDHCDPKIIHRDVKAANILLDEDFEAVVGDFGLAKLMDYKDTHVTTAVRGTIGHIAPEYLSTGKSSEKTDVFGYGIMLLELITGQRAFDLARLANDDDVMLLDWVKALLKEKKLEQLVDPDLQGRYADQEVESLIQVALLCTQGSPMERPKMSEVVRMLEGDGLAERWEQWQKVEVMRQEAELAPRHNDWIVDSTYNLRAVELSGPR

SEQ ID NO: 155 - DNA, 2193 bp, Sorghum bicolor
atggcctcctcgccgccgcgcgccccgcggcggtttcttttcgacctcaacgtcgcgcaggaggaggtcgaggaggaggagcccatggagacggaggtgcttgaggaggagggagcccctgccccggtggcgcagcccgaggaggctgtcggcgaggaggtcgctgagcaggtggtcgagcacgcggtgcctaccgtggaggaggaggagcctgtggaggaggtgatcatggaggaggagccttcggaggaggtgatcatggaggaggatgaatctgctacggcgccggcgggggaggtgattggggaggggaaggggaggaaaaagaggatagactacgaggtcttcgtgtccgggcttccgcgggacgccgctgaggaggacgtggcgaaggcgctggcggaggccggagatgtcgaggaggtgcgcctcgtgcgggatccagcggaccagcggctgaacaagggcttcgcttttgtccgtttcgccgccgcctggcaggcgcgatgggcggccaacgacctccgcgaggctacgattaatggacgtgaaatcagctttgatttcgcgctatctgcgcggacccagggcaaggataagtggtgggctgcttggcctgcctcctcgttggccagaagctctgctctgtttttcacttttgccagctcgagcctggcttcctatcaggccggattgagccaagtaacatttatttactggtacttaaatttccagattaagggaaaagcttgtggaatatgcaagaacagtgaaaatgagactcttcatgtccgaaatatatgctttgattggtcaaaggatgatttagctgagaaactggaacctttcaagttggaaaacttggatagaattaatctaattgagcacccagaaaaaaagggtaaaaacagaggctatgcatttcttgacttcaggactcatgtagatgctgtggcagcttttgtgaaactacagaaaagagatctgtatcttggaactgattttagagcgcacatatcattttcaaacactctgtcacaagacgatgagatcatggaaaaggtgaaatctgttttcttggatgggttaccacctcactgggatgaagacaaagtgagagaaatgttcgggaaatttggtgaaattgatagcatacaactggctagaaatatgtacacagcaaaacgaaaagattttggttttattggctttacaacaagacagtcagctttagactgcattaagatggtcaataaagatggtgttggcgaaggtagtggaaaggttctcataaaagctagtttgcaaaggccaaggcatgctttcaaaaagaattcctggcaaggctctagttccttgttaggcgtcagaagaggatttgtagataaaagttatagtggtagaggacaccactcagacagatataggcattatagtcctgaaaggcgttcatatttagataatcattctcgccgccaccgctctattgatgttgaagaaaggcatacttctatgcgaggatacagagcttactatagaagggattctccagttcatgcctcaaactataaatatggacggtcacatccagagacaagaatcagggaagaatatgatgagagacgatacactagtaaatatccaaaacacaggcaggcaatgcatgaaaccatggagcgggatgcatactgcaggaacaaatatggacattcataccaggagagggcacatagaacttgcccttgcccagaatgtaacttgagtggtcaaaattgcagttaccccaatggcgaggaattttctgcaatcagcggttgtgagcaggcatactacaagacagaccgtgatctgacgccttcaacttctcaagtagcatctcattgtgaggattcttgctgcaagggccagcagttgatgcctaaaagttcttctgtgatgtgtgattgtgacgaatgctatgctaatcaagagtcaacaccaagtccaagtgagcatgccagaaaaagatccaatcttccagtgcctcttcatcatcggcttgccaaacattctaatgagcatgggaggcatgtggatgatgcacattctgcttttgaggtggagtacaccgtcagggaaagccgaagtcggtatctctcttccaaagatgctccaagtactcactccaggaagcaccataggtcagcaagataa

SEQ ID NO: 156 - protein, 730 aa, Sorghum bicolor
MASSPPRAPRRFLFDLNVAQEEVEEEEPMETEVLEEEGAPAPVAQPEEAVGEEVAEQVVEHAVPTVEEEEPVEEVIMEEEPSEEVIMEEDESATAPAGEVIGEGKGRKKRIDYEVFVSGLPRDAAEEDVAKALAEAGDVEEVRLVRDPADQRLNKGFAFVRFAAAWQARWAANDLREATINGREISFDFALSARTQGKDKWWAAWPASSLARSSALFFTFASSSLASYQAGLSQVTFIYWYLNFQIKGKACGICKNSENETLHVRNICFDWSKDDLAEKLEPFKLENLDRINLIEHPEKKGKNRGYAFLDFRTHVDAVAAFVKLQKRDLYLGTDFRAHISFSNTLSQDDEIMEKVKSVFLDGLPPHWDEDKVREMFGKFGEIDSIQLARNMYTAKRKDFGFIGFTTRQSALDCIKMVNKDGVGEGSGKVLIKASLQRPRHAFKKNSWQGSSSLLGVRRGFVDKSYSGRGHHSDRYRHYSPERRSYLDNHSRRHRSIDVEERHTSMRGYRAYYRRDSPVHASNYKYGRSHPETRIREEYDERRYTSKYPKHRQAMHETMERDAYCRNKYGHSYQERAHRTCPCPECNLSGQNCSYPNGEEFSAISGCEQAYYKTDRDLTPSTSQVASHCEDSCCKGQQLMPKSSSVMCDCDECYANQESTPSPSEHARKRSNLPVPLHHRLAKHSNEHGRHVDDAHSAFEVEYTVRESRSRYLSSKDAPSTHSRKHHRSAR

SEQ ID NO: 157 - DNA, 585 bp, Sorghum bicolor
atggtcatgacgcttacgagacacgaagcggaggagagcaaggagatggagggcctccgggcgcacgccgaggcgctgctcacgctgtcggcgcccgcgtcgtcgtcgtcgttgggcaccggcggcacgccgccggcgccgtcctcggccgcggcccgcagggccatggcggccgagggcgtgttcgagtgcaagacgtgcagcaagcgcttcccgtcgttccaggcgctcggcgggcaccgcaccagccacacgcggctgcaggcgaggatgctcagcgacccagcggcggccgcggccgcggccgagagggacagggcgcgggtgcacgagtgcgccgtctgcggcctcgagttctccatgggccaggcgctcggcgggcacatgcgccgccacaggggcgaggcgccgccagccgcgcacgacgacgaccccgcgcaggcgcagccggaccgggacatgccggacctcaacttgccgccgctggacgacggcagcggcggcggtagcggcgatggccaaggtccacaacagtcggattatgatcgcggctcggagcctcagctgcttaatctgcttgtatag

SEQ ID NO: 158 - protein, 194 aa, Sorghum bicolor
MVMTLTRHEAEESKEMEGLRAHAEALLTLSAPASSSSLGTGGTPPAPSSAAARRAMAAEGVFECKTCSKRFPSFQALGGHRTSHTRLQARMLSDPAAAAAAAERDRARVHECAVCGLEFSMGQALGGHMRRHRGEAPPAAHDDDPAQAQPDRDMPDLNLPPLDDGSGGGSGDGQGPQQSDYDRGSEPQLLNLLV

SEQ ID NO: 159 - DNA, 1146 bp, Sorghum bicolor
atggagctggatctgaacgtggccgaggtggcgccggagaagccggcggcggcgatggaggcgagcgactcggggtcgtcggagtcgtcggtgctgaacgcggaggcggcgtccgcgagcgccggggccgccgcgccggcggaggaaggctccagctcgacgccggccgtgctcgagttcagcatcctcaggagcgacagcgacgcggccggcgcggacgacgacgacgacgccacgccgtcgccgcctcctcaccatcaccagcatcaccaccaccagcaccaccaccagcagcagctcgtcacccgagagctcttcccggccggcaccggcccgccgctcccgtcgccgcagcattgggccgagctcggcttcttccgcgccgacccgccgcgcccgcatcagcagcagccggacatcaggatcctgccgcacccgcaccagcacccgcacgccaccccgcccgtggctcccccgccgccggtgcagccacagccggccaagaagagccgccgcgggccgcgctcccgcagctcgcagtaccgcggcgtcaccttctaccgccgcaccggccgctgggagtcccacatctgggattgcggaaagcaggtgtacttaggtggattcgacactgctcatgctgctgcaagtgactacgaggacgacatgaagcagatgaagagcctatccaaggaggagttcgtgcacgtcctgcggcggcagagcaccggcttctccagaggcagctccaagtacagaggagtcaccctgcacaagtgcggccgctgggaggcgcgcatggggcagttcctcggcaagaaggcttacgataaggccgcaatcaaatgcaatggtagagaggccgtgacgaatttcgagccaagcacatatgatggggagctgctgactgaagttagcactgaagttgctgaagttgatctgaacttgagcatatctcaaccggcatctcagagccccaaaagagataagagctgcctaggcctgcagctccaccatggatcatttgagggctccgaatcgaaaaaaacaaaggcaagcgctaacgctaccttgacaagtatcaaaatcagtgaaattttcttctcgacttttattggctacctgatgcactattgcacaaaataa

SEQ ID NO: 160 - protein, 381 aa, Sorghum bicolor
MELDLNVAEVAPEKPAAAMEASDSGSSESSVLNAEAASASAGAAAPAEEGSSSTPAVLEFSILRSDSDAAGADDDDDATPSPPPHHHQHHHHQHHHQQQLVTRELFPAGTGPPLPSPQHWAELGFFRADPPRPHQQQPDIRILPHPHQHPHATPPVAPPPPVQPQPAKKSRRGPRSRSSQYRGVTFYRRTGRWESHIWDCGKQVYLGGFDTAHAAASDYEDDMKQMKSLSKEEFVHVLRRQSTGFSRGSSKYRGVTLHKCGRWEARMGQFLGKKAYDKAAIKCNGREAVTNFEPSTYDGELLTEVSTEVAEVDLNLSISQPASQSPKRDKSCLGLQLHHGSFEGSESKKTKASANATLTSIKISEIFFSTFIGYLMHYCTK

SEQ ID NO: 161 - DNA, 381 bp, Sorghum bicolor
atgaaggcgagggcgaagtccagcggcggcgactccaggctttcggtgaagaagggcaaggctcagaaggacccaaacaagcccaagaggcctccgagcgcgttcttcgtcttcatggaggagttcaggaaggactacaaggagaagcaccccaatgtgaagcaagtctctgtgattggcaaggcttgtggtgacaagtggaagtccctgtctgatgctgagaaggctccctacgtctctaaggccgagaagctcaaggttgagtacaccaagaagatggacgcctacaacaacaagcagtctggaggccccacagcgtctggtgattctgacaagtccaagtctgaggtgaatgacgaggacgaggagggtgacgagtga

SEQ ID NO: 162 - protein, 149 aa, Sorghum bicolor
MKARAKSSGGDSRLSVKKGKAQKDPNKPKRPPSAFFVFMEEFRKDYKEKHPNVKQVSVIGKACGDKWKSLSDAEKAPYVSKAEKLKVEYTKKMDAYNNKQVHHVPLHSHCSAVPRNSSVYDALYESCVICRCSLEAPQRLVILTSPSLR

SEQ ID NO: 163 - DNA, 2034 bp, Sorghum bicolor
atgccagccgagctctcgccgcgcctggccgcggcctcgtcgtcgtcgccgtcgccgtcgccgtccccgtccccgtcccctcacggcgcgccgcggatcatcagagccggcgagcaagacgacagcaggctgcctccgcagacggcggccacgacgcgggggaagcgccggcgcggggcgtggcacccgcgcgcgagtagtagctgggggacggagtgggaccgcgcgtacctgctcgcctgcgcggcggggctcctggtcgacccgctcttcctgtacgccgtgtccgtcagcgcgccgctcatgtgcgtcttcctcgacggctggttcgcggccgcggtcaccgcgctccggtgcgccgtggacgccatgcacgccgccaacctgctgctgcagctccgggaagcgtgctcatcgccgaggcgggaagacacggacgaggagggggcgcagccggggcgcgacgacgcacgcggcgccggcggcgtgccgcaacgggggaggtccaagaagggggttttcttggacgtgctggtcatcctaccggtgatgcaggtggtcgtctgggtggcgtcgccggcgatgatacgcgccgggtcgacgaccgccgtcatgaccgtgctgctggtggcgttcctgctcgagtacctgcccaagatctaccactccgtccgcgtcctgcgccggatgcaggacttctccggctacctcttcggcaccatctggtgggggatcgccctcaacctcatggcctacttcgtcgccgctcacgcggtgggcgcgtgctggtacctgctcggcgcgcagcgggccaccaagtgcctgagggagcagtgcgcccaggccggcgggagcgggtgcgcgccgtgggcgctggcgtgcgcggagccgctctactacgggcgcggcgtgaccgtcggggcggacaggctcgcctgggccggcaacgccacggccaggggcacgtgcctcgacagcgccgacaactaccagtacggggcctaccagtggacggtcatgctggtggccaaccccagcagggtcgagaggattctgctccccatcttctggggactaatgactctcagcacctttgggaatctggagagcacgacggagtggctggagatcgtgttcaacatcatcaccatcaccggcggactcattctcgtgacaatgctcatagggaacatcaaggtgttcctgaacgcgacgacgtccaagaagcaggcgatgcacacgcggctgcggggcgtggagctgtggatgaagcgcaagaacctgcccaggagctaccggcaccgggtgcggcagtacgagcggcagcggtgggcggccacgcgcggcgtcgacgagtgccgcatcgtccgtgacctgccggaggggctccgccgggacatcaagtaccacctctgcctcggcctcgtgcgccaggtgccactgttccaacacatggacgacctggtgctcgagaacatctgcgacagggtcaagtccctcatattccccaaaggagaagttattgtcagagaaggggacccagtgaagaggatgctgttcatcgtgcgcggccacctgcagagcagccaggtgctccgcaacggcgccgagagctgctgcatgctggggccgggcaacttcagcggcgacgagctgctgtcgtggtgcctgcgccggccgttcctggagcggctgccggcgtcgtcgtccacgctgacgacgctggagagcacggaggccttcgggctggacgccgcggacgtcaagtacgtcacgcagcacttccggtacaccttcaccaacgacaaggtgcggcgcagcgcgcgctactactcgcccgggtggcgcacgtgggcggccgtggcggtgcagctcgcgtggcgccggtacaagcaccgcaagacgctcgcgtcgctgtccttcatccgaccgcgccggccgctgtcgcggtgctcgtcgctcggcgaggagaagctccgcctctataccgcgctgctcacgtcgccaaagcccaaccaggacgacctgctgtga

SEQ ID NO: 164 - protein, 677 aa, Sorghum bicolor
MPAELSPRLAAASSSSPSPSPSPSPSPHGAPRIIRAGEQDDSRLPPQTAATTRGKRRRGAWHPRASSSWGTEWDRAYLLACAAGLLVDPLFLYAVSVSAPLMCVFLDGWFAAAVTALRCAVDAMHAANLLLQLREACSSPRREDTDEEGAQPGRDDARGAGGVPQRGRSKKGVFLDVLVILPVMQVVVWVASPAMIRAGSTTAVMTVLLVAFLLEYLPKIYHSVRVLRRMQDFSGYLFGTIWWGIALNLMAYFVAAHAVGACWYLLGAQRATKCLREQCAQAGGSGCAPWALACAEPLYYGRGVTVGADRLAWAGNATARGTCLDSADNYQYGAYQWTVMLVANPSRVERILLPIFWGLMTLSTFGNLESTTEWLEIVFNIITITGGLILVTMLIGNIKVFLNATTSKKQAMHTRLRGVELWMKRKNLPRSYRHRVRQYERQRWAATRGVDECRIVRDLPEGLRRDIKYHLCLGLVRQVPLFQHMDDLVLENICDRVKSLIFPKGEVIVREGDPVKRMLFIVRGHLQSSQVLRNGAESCCMLGPGNFSGDELLSWCLRRPFLERLPASSSTLTTLESTEAFGLDAADVKYVTQHFRYTFTNDKVRRSARYYSPGWRTWAAVAVQLAWRRYKHRKTLASLSFIRPRRPLSRCSSLGEEKLRLYTALLTSPKPNQDDLL

SEQ ID NO: 165 - DNA, 999 bp, Sorghum bicolor
atggaggcgcggagatctctcctggcgagcttcgtgctcgccgcgttggccgcgcaggccttggtggccgtggtcgagtccagggccagccccatggagaaggcaagccaaggtgaggacgtgaagaagccggactgcgtgccggggatggacccgcgctcgttcccggggaccggcggcggccacggcatcacgcccgtgacgccgtcgcacggaggctcaggctcccccgggacgacgccgtcccacggcggcggcgggtacgggccaacgccgtcgcacggcgggacgctgccttccccgtcccacggcggctccggctcctctccgacgtcgccctccaccggcggcggtggctccccgtctcacggcggcggcgcgtacggtggttccccgtccacccctggcggcggcgcgtatggtgggtctccgtccacccccggcggcggcgcgtatggtgggtctccgtccacacccggcggcggcggcgcctacggaggcgggtccccatcgcctgcccatggtggcgcctacgggagctcgccgacgcccgcgtacggcggcaactccccctcgcacggcggcatcgggacctcgtcgccgacgtcgttcgtccccatggacccccacagcttcggcacctgcgactactggaggtcgcacccaatggagatctggtcagcgatcggcggccggttcccgagcacgtcgtcatcgatggggacgatgagccacttcttcggcgcggcggcgggcagcgtgggcggcgcgaacatgatgagcatccaggacgcgctgggcaacacccgggcggacggcacgggcgcgctgctgcgcgagggcgccgccgcgctgctcaactccatgacccgcgccgggttcccctacaccacggagcaggtccgcgacgcgttcgcggcggccgccgcgggcgggtccgacggcgcggccgcggcgcaggcggcggcgttcaggaaggccaacgagggcaaggcgtag

SEQ ID NO: 166 - protein, 332 aa, Sorghum bicolor
MEARRSLLASFVLAALAAQALVAVVESRASPMEKASQGEDVKKPDCVPGMDPRSFPGTGGGHGITPVTPSHGGSGSPGTTPSHGGGGYGPTPSHGGTLPSPSHGGSGSSPTSPSTGGGGSPSHGGGAYGGSPSTPGGGAYGGSPSTPGGGAYGGSPSTPGGGGAYGGGSPSPAHGGAYGSSPTPAYGGNSPSHGGIGTSSPTSFVPMDPHSFGTCDYWRSHPMEIWSAIGGRFPSTSSSMGTMSHFFGAAAGSVGGANMMSIQDALGNTRADGTGALLREGAAALLNSMTRAGFPYTTEQVRDAFAAAAAGGSDGAAAAQAAAFRKANEGKA

SEQ ID NO: 167 - DNA, 462 bp, Sorghum bicolor
atggtcgggatccgcgtcggcggcaagcccgtgccggtcccggcgtcggccctcgcgttcgacccgaccagcggccgcggcaccatcgtcgacgccgggacgatgttcacgcggctgtccgcgccggtgtacgccgccgtgcgcgacgcgttccggcgcagggtgcgggcgcccgtggctggcccgctcggcggcttcgacacgtgctacaacgtgaccgtctccgtgccgaccgtcacgttcgtgttcgacgggccggtgtcggtgacgctgcccgaggagaacgtcgtgatccgcagctcgtcgggcggcatcgcgtgcctggcgatggcggcggggccgccggacggcgtcgacgcggcgctcaacgtgctggccagcatgcagcagcagaaccaccgtgtgctgttcgacgtcgccaatggccgcgtcggtttctcgcgcgagctctgcacggcctga

SEQ ID NO: 168 - protein, 153 aa, Sorghum bicolor
MVGIRVGGKPVPVPASALAFDPTSGRGTIVDAGTMFTRLSAPVYAAVRDAFRRRVRAPVAGPLGGFDTCYNVTVSVPTVTFVFDGPVSVTLPEENVVIRSSSGGIACLAMAAGPPDGVDAALNVLASMQQQNHRVLFDVANGRVGFSRELCTA

SEQ ID NO: 169 - DNA, 654 bp, Sorghum bicolor
atggacgataaggagaaagagaaagagaaggagaaggagaaggagaagcacgccgacgggaccgacgttgaggaggaagaagaggatgaagaaggtaacaagcgcattgtcgtgcttggcccccaggtccccctcaaggaacagctcgagctcgacaaggatgatgagagcctgaggaggtggaaggagcaactccttggccaagtcgacacagagcagctgggagaaactgcggaaccagaagttaaggtgctgaacctgacaatcctgtcacctggcagaccagatctcgtccttccgatcccattccatgcggacgagaaaggctatgcatttgctctcaaggatggcagcccctacagcttccgtttctccttcatcgtctccaacaacattgtatcaggcctgaagtacaccaacactgtctggaagactggagtaaaagtggagacccagaagatgatgctggggacgttcagcccccagttagagccctacgtctacgagggtgaagaagagaccacccctgctggcatttttgcaagaggttcttattctgctaaactaaagtttgttgatgatgatggcaagtgctacttggagatgagttactactttgagattagaaaggagtggccagcaggaacccaatga

SEQ ID NO: 170 - protein, 217 aa, Sorghum bicolor
MDDKEKEKEKEKEKEKHADGTDVEEEEEDEEGNKRIVVLGPQVPLKEQLELDKDDESLRRWKEQLLGQVDTEQLGETAEPEVKVLNLTILSPGRPDLVLPIPFHADEKGYAFALKDGSPYSFRFSFIVSNNIVSGLKYTNTVWKTGVKVETQKMMLGTFSPQLEPYVYEGEEETTPAGIFARGSYSAKLKFVDDDGKCYLEMSYYFEIRKEWPAGTQ

SEQ ID NO: 171 - DNA, 2847 bp, Sorghum bicolor
atggcggcgtcggtttccggggccaccatctgccttcagaagcctggctccaaaagcaggagggccagggatgcgacctcctccttcgcgcgccgatcggtcgcggcgccgaggtccccgcacgccgccaaggcgagcgtcatccgctccgacgccggcgcgggacggggccagcattgcgcgccgctcagggccgtcgttgacgccgcgccgattgccacgaaaaagagggtgttctacttcggcaagggcaagagcgagggcgacaagagcatgaaggaactgctgggtggcaagggcgcgaacctggcggagatgtcgagcatcgggctgtcggtgccgccggggttcacggtgtcgacggaggcgtgcaagcagtaccaggacgccgggtgcatcctcccggcggggctgtgggccgagatcctggacggcctgcagttcgtggaggagtacatgggcgccaccctcggcgacccgcagcggccgctcctgctctccgtccgctccggcgccgccgtgtccatgccaggcatgatggacaccgtgctcaacctcgggctcaacgacgaggtcgccgccggcctcgccgccaagagcggcgagcgcttcgcctacgactccttccgccgcttcctcgacatgttcggcaacgtcgtcatggacattccccgctcactgttcgaagagaagcttgagcacatgaaggaatccaagggggtgaagaatgacactgacctcactgccgctgacctcaaggagcttgtgggtcagtacaaggaagtctaccttacagctaagggagagccattcccctcagaccccaagaagcagcttgagttggcagtgcgggctgtgttcaactcgtgggagagccccagggcaaagaagtacaggagcatcaaccagatcaccggcctggtcggcactgccgtgaacgtgcagtccatggtgtttggcaacatgggcaacacttctggtactggcgtgctcttcactaggaaccctaacactggagagaagaagctgtatggcgagttcctgatcaatgctcagggtgaggatgtggttgctggaattagaaccccagaggatcttgatgccatgaaggacgtcatgccacaggcttatgaagagctagttgagaactgcaacatactggagagccactacaaagagatgcaggatatcgaattcactgttcaggagaacaggctgtggatgttgcagtgcagaacaggaaaacgtacaggcgcaggtgccgtaaagattgctgtggacatggttagcgagggccttgttgagcgccgtcaagcgattaagatggtagaaccaggccacctggaccagcttcttcatcctcagtttgagaacccagcgttatacaaggataaagttattgccacgggactgccagcctcacctggggctgctgtgggccagattgtgtttactgctgaggatgctgaagcatggcatgcccaggggaaagctgctattttggtgagggcggagaccagccctgaggatgttggtggcatgcacgcagctgctgggattcttacagaaaggggtggcatgacttcccatgctgctgtggtcgcccgtgggtggggaaaatgctgtgtctcgggatgctcagccattcgtgtcaatgatgctgagaagactgtagcgattggagaccatgtgctgagcgaaggtgagtggctatcgctgaatggatcaactggtgaagtgatccttggaaagcagccgctttccccaccagccctcagtggtgatttgggaactttcatgtcctgggtggatgatgttagaaagctcaaggttctggctaatgcggatacccctgaggatgcattggctgcacggaacaatggggcacaaggaattggactatgccggacagagcacatgttctttgcttcagatgagaggattaaggctgtaaggcagatgattatggctcccacagttgaactgaggcagcaggcactagatcgtcttttgccttaccagaggtctgactttgagggcattttccgtgctatggatggactttcggtgactattagacttctggaccctcctctccacgagttccttccagaagggaatgttgaggaaattgtgcgtgaattatgtgctgaaacgggagccaatgaggaagaagcccttgaacgagttgaaaagcttgcagaagtaaatcccatgcttggtttccgtgggtgcaggcttggtatctcgtaccctgaattaacagaaatgcaagcccgtgccatctttgaagctgctatagcaatgtccaaccagggtgttgaagttttcccagagatcatggttcctcttgttggaacaccacaggaattgggacatcaagtgaatgttatcaaacaaactgctgagaaagttttcgccaatgcgggtaaaactattggctacaaaattggaactatgattgaaattcccagggcagctctagtggctgatcagatagcagagcaggctgagttcttctcttttggaacgaacgacctcacacagatgacttttggctacagcagggatgatgtgggaaagtttattcccatttacctggctcagggtatcctccaacatgacccctttgaggttctcgaccagagaggagtgggcgaactggttaagtttgctacagagaggggccgccaaactaggcctaacttgaaggtgggcatttgtggagaacatggtggagagccttcgtcagttgctttcttcgccaaggttgggctggattacgtttcttgctcccctttcagggttcccattgctaggctagctgcagctcaggtgcttgtctga

SEQ ID NO: 172 - protein, 948 aa, Sorghum bicolor
MAASVSGATICLQKPGSKSRRARDATSSFARRSVAAPRSPHAAKASVIRSDAGAGRGQHCAPLRAVVDAAPIATKKRVFYFGKGKSEGDKSMKELLGGKGANLAEMSSIGLSVPPGFTVSTEACKQYQDAGCILPAGLWAEILDGLQFVEEYMGATLGDPQRPLLLSVRSGAAVSMPGMMDTVLNLGLNDEVAAGLAAKSGERFAYDSFRRFLDMFGNVVMDIPRSLFEEKLEHMKESKGVKNDTDLTAADLKELVGQYKEVYLTAKGEPFPSDPKKQLELAVRAVFNSWESPRAKKYRSINQITGLVGTAVNVQSMVFGNMGNTSGTGVLFTRNPNTGEKKLYGEFLINAQGEDVVAGIRTPEDLDAMKDVMPQAYEELVENCNILESHYKEMQDIEFTVQENRLWMLQCRTGKRTGAGAVKIAVDMVSEGLVERRQAIKMVEPGHLDQLLHPQFENPALYKDKVIATGLPASPGAAVGQIVFTAEDAEAWHAQGKAAILVRAETSPEDVGGMHAAAGILTERGGMTSHAAVVARGWGKCCVSGCSAIRVNDAEKTVAIGDHVLSEGEWLSLNGSTGEVILGKQPLSPPALSGDLGTFMSWVDDVRKLKVLANADTPEDALAARNNGAQGIGLCRTEHMFFASDERIKAVRQMIMAPTVELRQQALDRLLPYQRSDFEGIFRAMDGLSVTIRLLDPPLHEFLPEGNVEEIVRELCAETGANEEEALERVEKLAEVNPMLGFRGCRLGISYPELTEMQARAIFEAAIAMSNQGVEVFPEIMVPLVGTPQELGHQVNVIKQTAEKVFANAGKTIGYKIGTMIEIPRAALVADQIAEQAEFFSFGTNDLTQMTFGYSRDDVGKFIPIYLAQGILQHDPFEVLDQRGVGELVKFATERGRQTRPNLKVGICGEHGGEPSSVAFFAKVGLDYVSCSPFRVPIARLAAAQVLV

SEQ ID NO: 173 - DNA, 255 bp, Sorghum bicolor
ccaaacaaactccttgggtttgccttgctgcaggtggtgcccaggtcgctggcgccgttcctcccggcgaccacggtgccggcgacggtgacgcggcacggccggtcctgggagatgcggttcacgggggggcggcagatccagcgcctggaggccgggtggcggggcttcgcgctggacaacggcctcatgctcggcgacgggtgcgtcttcgagctgctcgacggcaagccggagggcgtggtgttcagggtg

SEQ ID NO: 174 - protein, 85 aa, Sorghum bicolor
PNKLLGFALLQVVPRSLAPFLPATTVPATVTRHGRSWEMRFTGGRQIQRLEAGWRGFALDNGLMLGDGCVFELLDGKPEGVVFRV

SEQ ID NO: 175 - DNA, 693 bp, Sorghum bicolor
atggcggaggatgctacgagcagccacccgtcacgctacgtcaagctcaccaaggaccaggacgcccccaccgaggacatccgccccggcgagctcaaccagccagtccacgtcccgcagctcgaaggccggaggtgcagcgagtgcggccaggtcctgcccgagagctacgagccgcccgccgacgagccctggaccaccgggatcttcggatgcaccgatgaccctgagacctgccgaactgggttgttttgcccttgcgtgctgtttgggcgcaacgtcgaggctcttagggaggacatcccttggacaactccttgcgtgtgccatgctgtgtttgttgaaggagggatcacactggcgattctgacagcaatatttcatggtgttgatccaaggagttcattcctgattggagaaggtctggtgttcagttggtggttatgtgctacctatactggcatcttccgccaggaacttcagaggaaatatcatctcaaggagcatcgcgagaggaggggacggctggcagagaacaatgccgtgcccatgactgttgtgaacccacctccaattcaagagatgagcatgtcagagaaccgtggtcctgctgccctggagaacggagcaggcaacgctgagcgtgaagcagagaagagtgagcacgatgatgtcgaggtcattcctctatag

SEQ ID NO: 176 - protein, 230 aa, Sorghum bicolor
MAEDATSSHPSRYVKLTKDQDAPTEDIRPGELNQPVHVPQLEGRRCSECGQVLPESYEPPADEPWTTGIFGCTDDPETCRTGLFCPCVLFGRNVEALREDIPWTTPCVCHAVFVEGGITLAILTAIFHGVDPRSSFLIGEGLVFSWWLCATYTGIFRQELQRKYHLKEHRERRGRLAENNAVPMTVVNPPPIQEMSMSENRGPAALENGAGNAEREAEKSEHDDVEVIPL

SEQ ID NO: 177 - DNA, 696 bp, Sorghum bicolor
atggaggaatacgacgggctctttccttccgcctacgtggactcctcctcatccctcctggtgcccaacggcacggcgcagggggagaggccgagagcgcggcgcaggaggcgtcgagcaccgaggtgcggcggcggcggcgacctggacgggggaggggaccccaagaagcggcggctgagcgacgagcaggtagagatgctggaactgagcttccgggaggagcggaagctggagaccggccggaaggtgcacctggccgccgagctcggcctcgaccccaagcaggtcgccgtctggttccagaaccgccgcgcccgccacaagagcaagctgctcgaggaggagttcgccaagctcaagcaggcacacgacgccgccatcctccacaaatgccaccttgagaacgaggtgatgaggctgaaggagaggctggtgctcgccgaggaggagctgacgcgtttcagatccgcggggagccacgccgtctccggtgacggcggagacatcatgggccgtgccgtctgcagcgggagcccgagctcatcgttctcgacaggcacctgccaccagccgggcgtcgacgtcggcggcggcgatcacctgggggacgacgaccagctgctctacgttcctgactatgcctacgctgacaacagcgtggtcgagtggtttagcctgtatggactgatgtaa

SEQ ID NO: 178 - protein, 231 aa, Sorghum bicolor
MEEYDGLFPSAYVDSSSSLLVPNGTAQGERPRARRRRRRAPRCGGGGDLDGGGDPKKRRLSDEQVEMLELSFREERKLETGRKVHLAAELGLDPKQVAVWFQNRRARHKSKLLEEEFAKLKQAHDAAILHKCHLENEVMRLKERLVLAEEELTRFRSAGSHAVSGDGGDIMGRAVCSGSPSSSFSTGTCHQPGVDVGGGDHLGDDDQLLYVPDYAYADNSVVEWFSLYGLM

SEQ ID NO: 179 - DNA, 912 bp, Sorghum bicolor
atggccaatgccctgggcctgcagaagctcaggtgtatgactgtcatctcctgcccgggacttacggatcttgctcttgcatctgtcgccaagttcagcccaagtttgaagcttgttaacctcaagaagtgcagcaaggtctcagatggatgtctcaaggattttgcagaatcatctaaggtcctggagaatttgcagatcgaggaatgcagcaaggttactcttatgggcattcttgctttcctccccaactgcagcccaaagtttaaggctctctctttgtccaagtgcatcgggatcaaggacatctgctccgcacctgcacagcttccagtatgcaaatcgcttcggtccctcaccatcaaggattgcccaggcttcacagatgccagcttggctgtggtgggcatgatctgccctcagttggagaatgtcaatttgagtggtcttggtgcagttaccgacaatggcttccttccattgttgaagagttcagagagtgggcttgtcaatgttgatctgaatggctgtgaaaatcttacggatgcagctgtttctgccttggtgaaggcccatggtgcttctcttgcacaccttagccttgagggatgcagcaagattactgatgcaagcctgtttgccatctctgagagctgcagccagcttgccgagcttgatctttcaaattgcatggtcagtgactatggtgttgcagtcttggcagcggcaaagcagctcaagctgcgtatcctctcactgtctggctgtatgaaggtcacccagaagagtgttcctttcttgggcagcatgtcttcatccttggagggactcaatctccagttcaacttcatcggcaaccgcaacatcgcttccttggagaagcagctctggcggtgcgacatccttgcttaa

SEQ ID NO: 180 - protein, 303 aa, Sorghum bicolor
MANALGLQKLRCMTVISCPGLTDLALASVAKFSPSLKLVNLKKCSKVSDGCLKDFAESSKVLENLQIEECSKVTLMGILAFLPNCSPKFKALSLSKCIGIKDICSAPAQLPVCKSLRSLTIKDCPGFTDASLAVVGMICPQLENVNLSGLGAVTDNGFLPLLKSSESGLVNVDLNGCENLTDAAVSALVKAHGASLAHLSLEGCSKITDASLFAISESCSQLAELDLSNCMVSDYGVAVLAAAKQLKLRILSLSGCMKVTQKSVPFLGSMSSSLEGLNLQFNFIGNRNIASLEKQLWRCDILA

SEQ ID NO: 181 - DNA, 510 bp, Sorghum bicolor
atggcggccaccaccagccaggcgagcctcctcctgcagaagcagctcagagatctcgcgaagcacccggtggatgggttctcggctgggctggtcgacgacagcaacgtcttcgagtggcaggtcaccatcatcggaccgccggacacactatatgatggagggtatttcaatgctatcatgagcttcccccaaaattacccaaatagcccgccatcagtcagattcacctctgaaatgtggcatccaaatgtttatccggatgggcgcgtgtgtatctctattcttcatccaccgggtgaagatccaaacggttacgagcttgcaagtgagcgttggacgcctgtgcacacagttgaaagcatagttctgagcattatatccatgctctctagtccaaatgacgagtctccagcaaacattgaggcagctaaggaatggagggagaagagggaggacttcaagaaaaaggtgcggcgcattgtgcggaaatcacaggaaatgttctga

SEQ ID NO: 182 - protein, 169 aa, Sorghum bicolor
MAATTSQASLLLQKQLRDLAKHPVDGFSAGLVDDSNVFEWQVTIIGPPDTLYDGGYFNAIMSFPQNYPNSPPSVRFTSEMWHPNVYPDGRVCISILHPPGEDPNGYELASERWTPVHTVESIVLSIISMLSSPNDESPANIEAAKEWREKREDFKKKVRRIVRKSQEMF

SEQ ID NO: 183 - DNA, 546 bp, Sorghum bicolor
atgtacccgaaggcagacgagggtgcgcagccgctggccacgggcatccccatcagcggcgggcggggcggctactaccaggcgggcggcgcgacggcggcgttcgcggtgcaggcgcaggcggcgcccgtcgccgcctggtccacggggctctgcgactgcttcgacgactgcagcaactgctgcgtgacgtgcctgtgcccgtgcatcacgttcgggcagatcgcggagatcatcgaccggggctccacgtcgtgcggcaccagcggcgcgctgtacacgctcgtcatgctgctcaccggctgccagtgcgtctactcctgcttctaccgcgccaagatgcgcgcgcagtacggcctccgggagagcccctgcgccgactgctgcgtccactgctgctgcgagtgctgcgcgctctgccaggagttccgcgagctcaagaagcgggggttcgacatgaacatagggtggcatgcgaacatggagaggcaggggcgcaccgccgccaccatgccgccgctgatgcaccctgggatgacccgctga

SEQ ID NO: 184 - protein, 181 aa, Sorghum bicolor
MYPKADEGAQPLATGIPISGGRGGYYQAGGATAAFAVQAQAAPVAAWSTGLCDCFDDCSNCCVTCLCPCITFGQIAEIIDRGSTSCGTSGALYTLVMLLTGCQCVYSCFYRAKMRAQYGLRESPCADCCVHCCCECCALCQEFRELKKRGFDMNIGWHANMERQGRTAATMPPLMHPGMTR

SEQ ID NO: 185 - DNA, 999 bp, Sorghum bicolor
atggccgcgccgatgcctctttccgcggaggacgtgctgcgcgtcaacggcagccgccgcttcgccgccgcgatggcggccgcctcccccttcgcgtcccttgccgacgccctcctcgccgctcgacgcatctggctcgacgaggtggatgtcagcggatggctcgaggccttcgcggcgcacccggcgatcggaaccacctcctcatctgtctccaagtggagcaaggaggagcaatcggcagcgctctcaacagccacggattcgacagcccaggagctggcagagtggaatgccaggtacagggagaagtttggcttcgtgttcatgatttgcgcatccaggaggactgcgcctgaggtcttggctgagcttaagaggcgttacacgaataggccaattgttgaacttgaggctgcagcacaggaagaacttaagataactgaactacgtcttgcaaagcttttctcatcagagcctactgttccctccactacaactgaaggccctgccacccaatcagataaagcggcagatcgcatacggattattggagcacatcttggagctctccctcagccttgtgccaataaagctcctgaaattacaggtagctccaaccgaagtcggcctcccattacaacccatgtgctggacactgcccgtggatcacctgcatctggaattgaagttcacttggagatgtggaaggattcttcagctcctccatcattcagcaacaaagatttcagcggatgggcaactctaggctattcagttacaaacaatgatggacgcagtggccagctgatggacatcgtggacaacattgctccaggcttctaccgcataagcttcaacactagcaagtattcgcctgcagggttcttcccttatgtcagcatcatatttgagatcaaggagaaccagacggcagagcattttcatgttcctctcttgcattcccctttctcattcaccacttaccgtggaagctaa

SEQ ID NO: 186 - protein, 332 aa, Sorghum bicolor
MAAPMPLSAEDVLRVNGSRRFAAAMAAASPFASLADALLAARRIWLDEVDVSGWLEAFAAHPAIGTTSSSVSKWSKEEQSAALSTATDSTAQELAEWNARYREKFGFVFMICASRRTAPEVLAELKRRYTNRPIVELEAAAQEELKITELRLAKLFSSEPTVPSTTTEGPATQSDKAADRIRIIGAHLGALPQPCANKAPEITGSSNRSRPPITTHVLDTARGSPASGIEVHLEMWKDSSAPPSFSNKDFSGWATLGYSVTNNDGRSGQLMDIVDNIAPGFYRISFNTSKYSPAGFFPYVSIIFEIKENQTAEHFHVPLLHSPFSFTTYRGS

SEQ ID NO: 187 - DNA, 2847 bp, Sorghum bicolor; identical to SEQ ID NO: 171

SEQ ID NO: 188 - protein, 948 aa, Sorghum bicolor; identical to SEQ ID NO: 172

SEQ ID NO: 189 - DNA, 831 bp, Sorghum bicolor
atggactccagcttcctccctgccggcgcggagagtggctcggtggtgtcgggcggcgccaacaatggcgctgcggctcagcagcaggcgccgccgctgatccgcgagcaggaccggctgatgccgatcgcgaacgtgatccgcatcatgcgtcgcgtgctgccggcgcacgccaagatctcggacgacgcccaggagacgatccaggagtgcgtgtccgagtacatcagcttcatcacgggggaagccaacgagcggtgccagcgtgagcagcgcaagaccatcaccgccgaggacgtgctgtgggccatgagccgcctcggcttcgacgactacgtcgagccgctcagcgtctacctccaccgctaccgcgatttccagggcgaggcgcggggcgtccggctcgccccgggggcggccccttcgcgcggcggagaccaccaccaccaccaccccctcaagtcccgcggtcccggcggcggctccggagccgccatgttaccgcaccaccaccaccaccacgacatgcagatgcacgccgccatgtacgggggcaccgtgcccccggcgccggggcctccgcaccacggccacggccacgggttcctgatgccacacccacagggcggcagccactacctgccttacccctacgagcccacgtacggcggcgagcacgccatggccgcgtactacggaggagccgccgcgtacgcgcccggcaacggcggcgggagcggcgacggcagtggcagcagcggcgggagcgcgtcgcacacaccgcagggcagcggcggattcgagcacccgcacccgttcgcgtacaagtag

SEQ ID NO: 190 - protein, 276 aa, Sorghum bicolor
MDSSFLPAGAESGSVVSGGANNGAAAQQQAPPLIREQDRLMPIANVIRIMRRVLPAHAKISDDAQETIQECVSEYISFITGEANERCQREQRKTITAEDVLWAMSRLGFDDYVEPLSVYLHRYRDFQGEARGVRLAPGAAPSRGGDHHHHHPLKSRGPGGGSGAAMLPHHHHHHDMQMHAAMYGGTVPPAPGPPHHGHGHGFLMPHPQGGSHYLPYPYEPTYGGEHAMAAYYGGAAAYAPGNGGGSGDGSGSSGGSASHTPQGSGGFEHPHPFAYK

SEQ ID NO: 191 - DNA, 1287 bp, Sorghum bicolor
atgggaaaccggaaaggggggcggcccaagtccgggggggagaaacggttcacccccccccaggggctctacgagcacaaggacatcgaccagaagaagctgcgcaagctgatcctcgaggccaagctcgcgccctgctacccgggcgccgacgacgccgccgccgccggaggggacctcgaggagtgccccatctgcttcctgtactatccaagcctcaaccgttcgaagtgttgctcaaaggggatatgtacagagtgttttcttcaaatgaaaccgacccatactgcccggcctacacagtgcccattctgcaaaacgcctaattatgctgtggagtatcgtggtgtgaaaacaaaggaggaaaggagcatagaacagtttgaagaacagaaagtcatagaagcacagttgaggatgcgccaaaaagaactccaagatgaagaagctaaaatgaaaagaaaacagagcaggtgttcttctagcagaacagtaaccccaacaacggaagttgagtatcgagatatttgcagcacatccttttcagtgccatcatatcaatgtactgagcaaggaaatgaatgctgttcatctgaaccttcatgctctagccaggctaacatgcggcctttccattctaggcacaaccgtgatgataatgttgacgtgaatctggaggatatgatggttatggaagcaatttggcgttccattcaggaacaaggacatctagtaaatcctgtttgtggcagctactttcctgtaatcgagccaccatcacgtgaaaggcaggcgtttcttccagctgcgcctctagaaatgcctcatccaggtggatactcttgtgcagttgcggctttggctgagcaccagccagcaagcatggatttctcttacatggctggcagtagcacatacccagtgtttgacatgatccggcggccatgcaacatgtccagcggaagcctgtgcggtgtcgagaacagttcactagacacctggagcgggatagcaccaagttgcagcagagaagtggtaagagaggagggagagtgctcaaccgaccactggtcggagggtgcggaggcaggaacaagctatgccggatcggacatcatggcggatacagggaccatgcaaccgctgcccttcgctgagaatttcaccatggctccaagccacttccgcccggagagcatcgaggagcagatgatgttctccatggccgtgtcactagcagaagctcatcatggtaggacgcaagcgcaagggctggcatggttgtaa

SEQ ID NO: 192 - protein, 428 aa, Sorghum bicolor
MGNRKGGRPKSGGEKRFTPPQGLYEHKDIDQKKLRKLILEAKLAPCYPGADDAAAAGGDLEECPICFLYYPSLNRSKCCSKGICTECFLQMKPTHTARPTQCPFCKTPNYAVEYRGVKTKEERSIEQFEEQKVIEAQLRMRQKELQDEEAKMKRKQSRCSSSRTVTPTTEVEYRDICSTSFSVPSYQCTEQGNECCSSEPSCSSQANMRPFHSRHNRDDNVDVNLEDMMVMEAIWRSIQEQGHLVNPVCGSYFPVIEPPSRERQAFLPAAPLEMPHPGGYSCAVAALAEHQPASMDFSYMAGSSTYPVFDMIRRPCNMSSGSLCGVENSSLDTWSGIAPSCSREVVREEGECSTDHWSEGAEAGTSYAGSDIMADTGTMQPLPFAENFTMAPSHFRPESIEEQMMFSMAVSLAEAHHGRTQAQGLAWL

SEQ ID NO: 193 - DNA, 1287 bp, Sorghum bicolor; identical to SEQ ID NO: 191

SEQ ID NO: 194 - protein, 428 aa, Sorghum bicolor; identical to SEQ ID NO: 192

SEQ ID NO: 195 - DNA, 597 bp, Sorghum bicolor
atggcggcggcgccgaggcccaagtcgccgcctgcctcgccggacccctgcggccgccaccgcctccagctcgccgtcgacgcgctccaccgggagatcagcttcctcgagggcgaaataagttccattgagggggtccacgctgcctccagatgctgcaaagaggttgatgagtttgttggaagtaatccggatccattcctaacgattcagccagagaaaggaagccatgatcaatctcagcagtttctgaagaagttccgagcaaagagctgcctgagctactacctctcgtggatctgctgctgcggcggtggcggtggcggtggcagtggcgggtggtgcccgccgtcgctgcagctcaagaggccagcggcgccgagctgctcctgcgcgccgcggctgaggaagctctgctgctgctgttgctgctgccggtgccgcgtggtgtacgccggcggcgccggcggctgcgggtgctgcgcgccgtgcccgcgctgctcgtgcgactgcacctgcgcctgcccgcgctgctgctcctgccccaggtgcagcgccgcgtgctgctgcgccccgcgctgctgcctgtgcctatga

SEQ ID NO: 196 - protein, 198 aa, Sorghum bicolor
MAAAPRPKSPPASPDPCGRHRLQLAVDALHREISFLEGEISSIEGVHAASRCCKEVDEFVGSNPDPFLTIQPEKGSHDQSQQFLKKFRAKSCLSYYLSWICCCGGGGGGGSGGWCPPSLQLKRPAAPSCSCAPRLRKLCCCCCCCRCRVVYAGGAGGCGCCAPCPRCSCDCTCACPRCCSCPRCSAACCCAPRCCLCL

SEQ ID NO: 197 - DNA, 279 bp, Sorghum bicolor
ccccgccgccgtagcagcagcagcagcagcagcagaagcccccgcgcgcggccgccgccgtccccaattcggcgctccgatcgccggatctcctcgccggcgccgggggccccgatcggcccctcctcatgcccgtgcgcttccgggggttatctcgcgcgggcgccggccatgtcggacctcgcttccacctgcaaggataaacttgcgtattttagaataaaggagctcaaggatatcttaaatcagctggggttaccgaagcaaggaaagaagcag

SEQ ID NO: 198 - protein, 93 aa, Sorghum bicolor
PRRRSSSSSSSRSPRARPPPSPIRRSDRRISSPAPGAPIGPSSCPCASGGYLARAPAMSDLASTCKDKLAYFRIKELKDILNQLGLPKQGKKQ

SEQ ID NO: 199 - DNA, 732 bp, Sorghum bicolor
atgggtcgcggcaaggtggagctgaagcggatcgagaacaagatcagccggcaggtgacgttcgccaagcgccggaacgggctgctcaagaaggcgtacgagctgtcgctgctgtgcgacgccgaggtcgcgctcatcatcttctccggccgcggccgcctcttcgagttctccagctcgtcatgcatgtacaaaacactcgagagataccgcagctccaactacagctcacaggaagtaaaagttccactggacagtgaaattaactaccaggattatctgaagttgaggacaagagttgaatttcttcaaactacacaaagaaatattcttggtgaggatctgggtccacttagcatgaaggaacttgagcagctggagaaccaaatagagacatccctgaagcagatcaggtcaagagagaatcaaatgttacttgatcagctctttgatctcaaaagcaaggaacaagaattgcaggatctcaataaagacctaaggaaaaagctgcaagaaacaagtccagagaatgtgctccatgtttccagctgggaggaaggtgggcacagtggcgcaagtggtaatgttcttgatccttatcagggactccttcagcacccagagagtgatccttccctgcagattgggtaccatcaacaagcctacatggaccagctgaacaacgaggacatggcgggcccaaatgagcacggtcgatctggatggatatga

SEQ ID NO: 200 - protein, 243 aa, Sorghum bicolor
MGRGKVELKRIENKISRQVTFAKRRNGLLKKAYELSLLCDAEVALIIFSGRGRLFEFSSSSCMYKTLERYRSSNYSSQEVKVPLDSEINYQDYLKLRTRVEFLQTTQRNILGEDLGPLSMKELEQLENQIETSLKQIRSRENQMLLDQLFDLKSKEQELQDLNKDLRKKLQETSPENVLHVSSWEEGGHSGASGNVLDPYQGLLQHPESDPSLQIGYHQQAYMDQLNNEDMAGPNEHGRSGWI

SEQ ID NO: 201 - DNA, 1341 bp, Sorghum bicolor
atggagctagcatggttcatcagatcctcaataatctcccttgctggattcttgtcagtggtttccgcatcgacatcgcagcagcaatgcggcggcattggaggacctgctggagtgagagctggctactggtcgccgtcctcaagccgctactccccggtcagtagcatcgacgcctccttgtacactcacctctactacagctcagtgtccatcgacgaggcaagctatgctgtcgcgccacagccgaccgaagaggagggctcgctgctcgctgccttctccggtaccgtcaagtccgggagcccgtctaccaagaccatgctgtccatcggcacaaatgagtacagggtggatgcgtcgaatgccgccttctccacaatggcttcggacaaggacctccggggagtgttcatcaactcctccgtggaactggctcgagccaaccgcttcgacggcctggatttgtcgtggattttcccagtcacacagatggacatggagaaccttggagccctgcttgcagagtggcgagcaaggatcatggaggaatccgccaccaactccttgtctggtcctcttctcctgacggcaacactctacttctccaaccacatgtttgacatgcctgacggcaacctcgactacccaatagatgacatctcagacaacctggactgggcgaatatcctcaccttcggcttccacggggacagcagcgtcaccacagctgacgcacctctctacgacaagtcgtcgcacttctcagtgagctacggggtgatctcatggctggatgcaggagttcctccatgtaagctggtgatggggatacctctgtttggaagatcatggttcctcaggaacaaggccaagaatgggctaggatcgccgactgccgctgccggaacaaagcagagcaaaagcaaccagactgggataattgcatatgcagagactgaagagtacctgaactctgaaagcaccgttgttgcctatgacaaccaatcagtggcagagtatttctacaacggtgacctctgggtcagtttcgatggcgcacaggtagtgcagcagaagctagagttcgcggcgagatctcagttgcttggctacttcctctggaccgtcggcttcgatgattcaaacagcacaatatccaagaaagcatcggaatcatggcaccaatatactcaaggtggatttggaatcatgcacgcaggaggttcaaaccaatatgttgcatttaattcatcttcagtatcacttggtagctggtattcaaaatctctcagctgtttgctgtcttcagtacttctgttggtgattctgtttcattaa

SEQ ID NO: 202 - protein, 446 aa, Sorghum bicolor
MELAWFIRSSIISLAGFLSVVSASTSQQQCGGIGGPAGVRAGYWSPSSSRYSPVSSIDASLYTHLYYSSVSIDEASYAVAPQPTEEEGSLLAAFSGTVKSGSPSTKTMLSIGTNEYRVDASNAAFSTMASDKDLRGVFINSSVELARANRFDGLDLSWIFPVTQMDMENLGALLAEWRARIMEESATNSLSGPLLLTATLYFSNHMFDMPDGNLDYPIDDISDNLDWANILTFGFHGDSSVTTADAPLYDKSSHFSVSYGVISWLDAGVPPCKLVMGIPLFGRSWFLRNKAKNGLGSPTAAAGTKQSKSNQTGIIAYAETEEYLNSESTVVAYDNQSVAEYFYNGDLWVSFDGAQVVQQKLEFAARSQLLGYFLWTVGFDDSNSTISKKASESWHQYTQGGFGIMHAGGSNQYVAFNSSSVSLGSWYSKSLSCLLSSVLLLVILFH

SEQ ID NO: 203 - DNA, 2136 bp, Sorghum bicolor
atgccgcactccgtcctcgcccgcctgccccacggctccatccgactcgtcgtcgccttcgggctgctgctcctcgtctcgctgctcgtcctccaccgccgccccgggaggccccatgcggcggccgccgctgccggcggtcgcctctccgatcccgccgggctgttcctgtcgctatccccgggggccaacgcgagcatcgcggccgacctccgcgcgctcaccgcggggccgcacctcgcggggacgcgcgcgtcggcgggggccgccgcgcacgtgctcgcccgcctccgcgccgcggggctccgaaccctaacgcgcgagtacgagccgctgctctcgtaccccgggcacgcctccctcgcgctgctccggcccgacggctccctgctcgcgcgcctgtcgctcgaggagcccgcggacgtggggcgccgcgtcgtgcggccgtaccacgcgtacgcgccgtccggcggtgccgtcgccgaggcggtgttcgtcaacctcggccgcgaggaggactacgccgcgctcgagaggcttggggtgggcgtgcgcggccgcgtcgcggtggcgcgccgcgggggcgggtaccgcggcggagtggtggcgcgcgcagcggagaagggagccgtcgccgtgctcatcgcgggcaacgcggatggcggcgtcgagagaggagtcgttcttctcggcggccccggtgatccgctcacccccgggtgggccgccaccagcggtgcggagcgtttggggttcgacgataaggcagtcaagaggcggtttccgagtatcccctccatgccggtgtcagccaagacggcagcagcgatcattcgaagtctgggcggtccggctatgccggcggaatggaaagacggccttggggtggatgtcggtggcgttggacctggccccactctggtcaacttcacctatcaggaggacaggaagttttataagatacgagacatttttggtatcataaaagggcaagaagaacctgaccgttacgtgatactcggtaaccacagagatgcatggacctatggagcagttgatcctaacagcgggacagctgcacttctagacatcgctcggcgtcttggaacaatgctgcaatcaggatggaaaccacggaggtccatcattctttgtagttgggacgctgaagaatttgggatgattggatcaactgaatgggttgaagagaacctcgaagatctgcattccaaagctgtagcttacttgaatgttgattgtgctgtgcaaggtgtgggattttttgctggctctactccccagttggacaaactcttggttgatattacgagacaggtaaaggatcctgatgttacaggaaagatggttcatgatacatggaatgaaatgagtggcagcatcaaaatagaaaggcttgccagaactgattccgattttgctccatttctacatcatgctggaattccctctgtagacttgtactatggagaagaatttcctggttaccatactgctcttgacacttataattggatggaaaagcatggcgatccattatttcttcgtcatttggctatcacagaaatttggggactattagctcttcgattggccaatgatcccgtgttaccttttgattatcaagcttacacttcagacttacaggagcatataaaaacattttctgcgctgacggacaatggccacgcagtaaatttgatgaatgggttcgtcaatgatctttctggtgcagctatggaagttgtgaaggagatgaagaaactacagcagctggatttatatgatgatcacgctaggatgagaaggcgattgttgaatgatcgcctcctacttgccgaaagaagcttcctgcaacctgaaggactccaaggaagaggatggtttaagcatctgttgtactcgcctccggaggattatgaaagcaagttttcgttcttcccggggatcgcggacgccatctcacggtcggccaatctgagtgacaaggaacgggaggtggcagtgcagcatgaagtgtggaaagtctgccgggcaattcaaagggccgcgagtgttcttagaggtgaattcagtgagcgaaaaccgataaattttagttctttggtggctccatga

SEQ ID NO: 204 - protein, 711 aa, Sorghum bicolor
MPHSVLARLPHGSIRLVVAFGLLLLVSLLVLHRRPGRPHAAAAAAGGRLSDPAGLFLSLSPGANASIAADLRALTAGPHLAGTRASAGAAAHVLARLRAAGLRTLTREYEPLLSYPGHASLALLRPDGSLLARLSLEEPADVGRRVVRPYHAYAPSGGAVAEAVFVNLGREEDYAALERLGVGVRGRVAVARRGGGYRGGVVARAAEKGAVAVLIAGNADGGVERGVVLLGGPGDPLTPGWAATSGAERLGFDDKAVKRRFPSIPSMPVSAKTAAAIIRSLGGPAMPAEWKDGLGVDVGGVGPGPTLVNFTYQEDRKFYKIRDIFGIIKGQEEPDRYVILGNHRDAWTYGAVDPNSGTAALLDIARRLGTMLQSGWKPRRSIILCSWDAEEFGMIGSTEWVEENLEDLHSKAVAYLNVDCAVQGVGFFAGSTPQLDKLLVDITRQVKDPDVTGKMVHDTWNEMSGSIKIERLARTDSDFAPFLHHAGIPSVDLYYGEEFPGYHTALDTYNWMEKHGDPLFLRHLAITEIWGLLALRLANDPVLPFDYQAYTSDLQEHIKTFSALTDNGHAVNLMNGFVNDLSGAAMEVVKEMKKLQQLDLYDDHARMRRRLLNDRLLLAERSFLQPEGLQGRGWFKHLLYSPPEDYESKFSFFPGIADAISRSANLSDKEREVAVQHEVWKVCRAIQRAASVLRGEFSERKPINFSSLVAP

SEQ ID NO: 205 - DNA, 1833 bp, Sorghum bicolor
atggatctccgccggccgccgcgctcctcgtcgggcggcgtggagccgaagatccgccaggtcggcttcttcaccccggacgcctccgcgccgtcggagcccctgccccccgccgccgcggcggccccggcgccgtcggcgcagcagaggccggccgcggggtcgccgccggcgtccgacgacctctccacgggccgcctctcccccgtcatgatcccgcccccgcgccacgccgaccacctcgccccgggcccaccctcccccgctgcggccgacgtcgtcctcgctacttccgcgcccgtgcgttcgtccccgcgcctcgacgtcgcgtcggagatcggcgacgacgactcctggtcacgcgcgccttctgctgtggagctagaagaaaacaagcgtggtttggctgaaatacagaacaagggtgctccagcctccattccacaaaagcagaaaacctcgaaggcagagagacgtgcaattcaggaggctcaacgtgctgctaaagctgcagcgaaggaggcagataaatcaggaaaatctgctggtgctgcgatgtccaagcaagcaaagtcagcaaaaactgctcagaaaaaagatgtgccccaagctgcaagtacagttgcttctgagaagaaggctactgaacgtcctccagaaagagaaagaaagttagatgctcctcatccccgcatgcagtttgatgatgtgcataaggtggagaaagcaaaaaaacgtgcagtagtcaaccaatcagaagctcgaaacagagttgaattgttcaggcatcttcctcagtacgtgcatggcactcagcttcctgacctggaggcaaaattctttcaactagaaccaatgcatccttctgtatacaaggttgggctccaatatttatctagtgaagtatctggtggtaatggtcgttgcatagcaatgcttcttgcattcaaagaggcaataaaagattacactacacctccaaataaaacactcagcagagatcttactgcaaaaatcagcagttatgtgtcatttcttatcgagtgtaggcctctttcaatcagcatgggtaatgctattaggtttctgaaaagcaggattgcaaagctaccacatgcactgtcagagtctgaggccaaaactcgtcttcagtctgatattgatcgttttataaatgagaagatagtccttgctgacaaagctattgtcagccatgccatcacaaaggtcagagacaatgatgtcttactgacatatggatcatcatcagttgttgaaatgattttggagtatgctcatgaacttgggaggaactttcgagttgtagtggtagattctcgcccaaagcttgagggacagggattgctgcggagattagtggcaaagggcatcaactgcacatatacacacataaatgccatctcatacatcatgcatgaagtaactcgagtcttgttgggtgcctcatcaatattatcaaatgggacagtttattctcgagttgggacagcatcggtggctatggttgcacatgcatttggagttccagttctggtctgttgtgaggcatacaagtttcatgagagagtgcaacttgattctatatgtgctaatgagcttggcgatcctgatgtcattttgaaaattcctgggagggcagaggaccatcttaagaactgggcagacaatgcaaatctccaattgctaaatttaacgtatgatgccaccccgcctgattatgtgtcgatgatcataacagactatggaatgcttccacccactagtgtaccggtcattgtgagagagtaccgcaaggagcaactgtggatatga

SEQ ID NO: 206 - protein, 610 aa, Sorghum bicolor
MDLRRPPRSSSGGVEPKIRQVGFFTPDASAPSEPLPPAAAAAPAPSAQQRPAAGSPPASDDLSTGRLSPVMIPPPRHADHLAPGPPSPAAADVVLATSAPVRSSPRLDVASEIGDDDSWSRAPSAVELEENKRGLAEIQNKGAPASIPQKQKTSKAERRAIQEAQRAAKAAAKEADKSGKSAGAAMSKQAKSAKTAQKKDVPQAASTVASEKKATERPPERERKLDAPHPRMQFDDVHKVEKAKKRAVVNQSEARNRVELFRHLPQYVHGTQLPDLEAKFFQLEPMHPSVYKVGLQYLSSEVSGGNGRCIAMLLAFKEAIKDYTTPPNKTLSRDLTAKISSYVSFLIECRPLSISMGNAIRFLKSRIAKLPHALSESEAKTRLQSDIDRFINEKIVLADKAIVSHAITKVRDNDVLLTYGSSSVVEMILEYAHELGRNFRVVVVDSRPKLEGQGLLRRLVAKGINCTYTHINAISYIMHEVTRVLLGASSILSNGTVYSRVGTASVAMVAHAFGVPVLVCCEAYKFHERVQLDSICANELGDPDVILKIPGRAEDHLKNWADNANLQLLNLTYDATPPDYVSMIITDYGMLPPTSVPVIVREYRKEQLWI

SEQ ID NO: 207 - DNA, 456 bp, Sorghum bicolor
atgctgcaggagctgcctgctcagcagagagcagacgcggtgagcagcctggtgtacgaggcgaacgcgcgcatgagggaccccgtgtacggctgcgtcggcgccatctcctacctccagcagcaggtctcccagctccaggtgcagctcgccctcgccaaggccgagatcctctgcgtccagatgcaccacgactacgagtcagcttcagctgctgctgctgccgcgccagctccggcaaagcaacaacaactccagcagcagcagcaggaggagatggaatgcgaggcttatggcaacctgctcgtgcagaatggcctgatgatgaacacgttgaacggtactggtgcagttcatcagcagcagaagcagatgctgggtggcttcggctctgcagggaacactgcaatgatgctccaggaggcgtgcctcaagaaagagtccctttgggcatga

SEQ ID NO: 208 - protein, 151 aa, Sorghum bicolor
MLQELPAQQRADAVSSLVYEANARMRDPVYGCVGAISYLQQQVSQLQVQLALAKAEILCVQMHHDYESASAAAAAAPAPAKQQQLQQQQQEEMECEAYGNLLVQNGLMMNTLNGTGAVHQQQKQMLGGFGSAGNTAMMLQEACLKKESLWA

SEQ ID NO: 209 - DNA, 828 bp, Sorghum bicolor
atggatagataccacagggtagagaagcctcggaatgacacgccaatcagccagaatgagatcaggatcactactcaggggaggatgaggaactatatcagctatgggatgtcgctgcttgaggaaaatggccatgatgagattaatatcaaggccatgggacgggccataaataagacagttatggttgttgaattgatcaagagaagggttggaggtcttcatcagaacactgctactgaatctgttgatatcacggacacatgggaacctttggaagaaggccttctcccactagagacaactcgccatgtgtcgatgatcactgtaacactgtcaaagaagcctctggatacatcatctccaggataccaaccacctatcccagctgaagaggtgaaacctgcttttgactatgatcatgaagaatcgtatcccactggtcgtggaagaggacgttttggtgggagaagaggcaggggaagaggtatgagcaatggtccccctccacctgcttatggttacaatgacgagtgggaggaggatggagattattacaacagagggcgtgggagaggaaggtcacgtggacgaggagggagaggccgtggtggctactatggaggtgggaggcgtggtggctacggttatgattatggctatggcgggagaggcgggtactatgaagagcaagatgaatactacgatgagcccgaagaatatgcccctccccctggccgtgggcgtggcagaggaagaagggggatgccttggcgcgggcgtggtgggcgtgggccgccgcgcggcggccgaggaggctactactag

SEQ ID NO: 210 - protein, 275 aa, Sorghum bicolor
MDRYHRVEKPRNDTPISQNEIRITTQGRMRNYISYGMSLLEENGHDEINIKAMGRAINKTVMVVELIKRRVGGLHQNTATESVDITDTWEPLEEGLLPLETTRHVSMITVTLSKKPLDTSSPGYQPPIPAEEVKPAFDYDHEESYPTGRGRGRFGGRRGRGRGMSNGPPPPAYGYNDEWEEDGDYYNRGRGRGRSRGRGGRGRGGYYGGGRRGGYGYDYGYGGRGGYYEEQDEYYDEPEEYAPPPGRGRGRGRRGMPWRGRGGRGPPRGGRGGYY

SEQ ID NO: 211 - DNA, 432 bp, Sorghum bicolor
atgatcagcgccaagaggattgctcatcaggccaagaagtggcagaggatggctgcacaaggcaggaagcgcctcatctgggctgcagcagcaaaggaagccaacgagtgctgcagctccgtggcaagcaagggccactgcacggtgtacacggccgacggcgcacggttcgaggtgccgctggcgtgccttagcaccgtgttcttccgggagctcctgcaaatgtcacaggaagagttcgggttcacgggcggcgacgacaggatcacgctcccctgcgacgcggccgtcatggagtacgccatgtgtttgctcaggagaggcgcctctgccgagctagagcaggctttccttagcaccatggcgatgtcgtgccactatgtcagccgtgtggcgccgtgtgttgaagcaagccagcagattgctgtttag

SEQ ID NO: 212 - protein, 143 aa, Sorghum bicolor
MISAKRIAHQAKKWQRMAAQGRKRLIWAAAAKEANECCSSVASKGHCTVYTADGARFEVPLACLSTVFFRELLQMSQEEFGFTGGDDRITLPCDAAVMEYAMCLLRRGASAELEQAFLSTMAMSCHYVSRVAPCVEASQQIAV

SEQ ID NO: 213 - DNA, 2223 bp, Sorghum bicolor
atgccagtggcgtaccaccagcgacctgcccattgctggtgctgtttggcgggcgcggcgcgtgagtttcttgttgagacttgcttggagattcgccgtctccccctctcgtctaaaagcgggcaaagcagagacggtggaggcaggcagagccgccctgtcgccggcgcggcctcctgctcctcctcctcctctgccaccgcctcccaactcccagcgcgcaggggccgacggcgacgggaggggagaagcggcagaggtagtccgaggaggggcggggccgacggcgacgggaggggagaagcggcagaggtagtccgagggggggcggagagaggctgcgccgtcccactccgtccggtgcctcagcccccggagccccttcgcgaaggttcgggaatggcgcactgggttagcgacggtgatggcagtgacagcttcgaatgggatagtgatggcaatggggaggaggcagggagcttcaacactgctggtgccagttcatcagcaatggcatcaacgaacactgacgctccaggcccatcgagacgggtaagccaggttgctaatggcaatgggaaggctgggccatctgcctctttggttcagaggtatatagacatgggtttcgcagaagagattgttgtgaaggccataaaggacaatggcgataatggagcagatgcattagttgagctgcttcttacttaccaggaactaggcaatgacctcaacgtggataacggctttgcttctggttgtgtcccccaaactgttgacgatagtggtgatgatgactttctagaaaactgggatgatttagatgctggtgggagaagcaccagagttgctaattctgttgatgattctggagacgaggatttcttacatgagatgtcacagaaggacaacaaaattgattccttagttaaaatggggtttcctgaagacgaggctgcactggctattactagatgcgggcaggatgcgtctatttctgttctggcggattctatctatgcttcacagaccgcaggagatggttattgtggcaatttgtctgactatgaggatggagggagaaacaaaggaaggttcatggatgggaacaacaaaaagagaaagagatatggaagtcaagcactgggaagtagaggcccattagatggtagcgctgatgaacccatgctgctcccaaatccaatggttggatttagcttgccagatcagtggccaagaccagtgaacagagatctacctgcactagctatgggtccaccatacttctactatgagaatgttgctcttgctccaaaaggtgtctggactatcatatcaagattcttgtatgatattcagccggagtttgtggactcgaagtacttctgtgctgctgccaggaaaagaggttatatacacaatttgccacttgagaacaggtcacctctcctccctaaacctccaaggacaataactgtagcatttcctcataccaaaaggtggtggccatcatgggacccaagacaacagttcaattgcctccagacttgtgtgtctagtgcaaaactgttagagaagattcgcgtaacccttacaaacagttcagatccacctcctccaagagttcagaagctggtgttggaggagtgtaggaaatggaatcttgcttgggttggcttaaacaaggttgctcctctagagcctgatgagatggagtttctactcggctttccgaaggatcacaccagaggtatctgcaggacagagaggtttcgatctctaggaaattcatttcaagttgatactgttgcttaccatctctcagtcctcaaggatatgtacccagaaggcatgaatgtactatctttattctctggtattggaggagcagaggtggctctccacaggcttggtatacgcatgaagacagttatttcagtagagaagtctgaggtcaataggacaattctgaggagttggtgggatcagacgcagaccggtactttgattgagatcaatgatgtgcagacactgacatctgagaggattgaggcatatattagaagatttggcggctttgatcttgtgattggtggaagtccctgtaacaatcttgctgggagcaaccgtcaccacagaaatggtttggagggcgaacattcttcattgttctttcagtatgttaggatcttagagtccgtcaagtccatccagcgtttatag

SEQ ID NO: 214 - protein, 740 aa, Sorghum bicolor
MPVAYHQRPAHCWCCLAGAAREFLVETCLEIRRLPLSSKSGQSRDGGGRQSRPVAGAASCSSSSSATASQLPARRGRRRREGRSGRGSPRRGGADGDGRGEAAEVVRGGAERGCAVPLRPVPQPPEPLREGSGMAHWVSDGDGSDSFEWDSDGNGEEAGSFNTAGASSSAMASTNTDAPGPSRRVSQVANGNGKAGPSASLVQRYIDMGFAEEIVVKAIKDNGDNGADALVELLLTYQELGNDLNVDNGFASGCVPQTVDDSGDDDFLENWDDLDAGGRSTRVANSVDDSGDEDFLHEMSQKDNKIDSLVKMGFPEDEAALAITRCGQDASISVLADSIYASQTAGDGYCGNLSDYEDGGRNKGRFMDGNNKKRKRYGSQALGSRGPLDGSADEPMLLPNPMVGFSLPDQWPRPVNRDLPALAMGPPYFYYENVALAPKGVWTIISRFLYDIQPEFVDSKYFCAAARKRGYIHNLPLENRSPLLPKPPRTITVAFPHTKRWWPSWDPRQQFNCLQTCVSSAKLLEKIRVTLTNSSDPPPPRVQKLVLEECRKWNLAWVGLNKVAPLEPDEMEFLLGFPKDHTRGICRTERFRSLGNSFQVDTVAYHLSVLKDMYPEGMNVLSLFSGIGGAEVALHRLGIRMKTVISVEKSEVNRTILRSWWDQTQTGTLIEINDVQTLTSERIEAYIRRFGGFDLVIGGSPCNNLAGSNRHHRNGLEGEHSSLFFQYVRILESVKSIQRL

SEQ ID NO: 215 - DNA, 1473 bp, Sorghum bicolor
atgtccgcccgcatcgacctcaacaacaccgccggatccgcctccgcctcccaaaccctggcgccagcgccacccaagcgcggccgcggccgcccccgcaagaaccccccgcctcccgctcacccgcgccctccggatcccgacactcccatggtcggcggcttcgctccgggcgacatggtctggggaaagaagctcaaccacgccgcctggccgggcctcatctactccgccggagggaacggcaccggccacgagggccagttcctcgtctcctacttcggcgacaaggccttcgcctggtgcgacggcgccgagctcaggccctacgagccctacttccccgtcgccgagctctacgacgacggcggtgaggacttcgacgccgccgtcgaggcctccctcgacgagttctcccgccgcgtcgaggccgctctcgcctccgccgcccgcccctttgcccccgccgatttcctcacctcgctccacgatctcgcagcggatcgcatgggcttcaccaacagggtgcaggccgccgtcgccaaggcgcatctcagagccttcgacgccttcagggctctgccggacccacctcagtacaccttggagctcggtctgctcccacacatcccgctcccgctgcccaatcctaaggctgccgcggatgctgacaccacccccgcttccccttccaggaggggcaggaagaggaaggagcaactcgtcaaggacttcgactccgatgaggactgggaccccaggaagaggggtgccaccgactctgattccgatgtggattttgaccgcaggagaggattcaggggcaggggcggtggcggcggtgctggcagtggcgcgccccgtggcaggcctcgagggaggcccaggaaaacagatgcctgcagggaccctgcaccaccactcaaggacaacaatgacgacggtggcattcaagacaaacttgagtatccatcggctgctgagatgttgctgcagcttttgtctgtcgccgctgatcctgtaaatggcaattatgactctgctcctgtgattgttagcttcttctcaaagcacaaggactctgaggcgcctagtgtatacgaagataaagagctgcttgagacttttggttgcaagaagggtaggaaaaagtccatcgtaagctcaggcccagctacaaagtcagaagctggcgatgataaggatcagttcatgactgcagatggtcagaggggccggaggaagtctgctgggagcctgtactcagctagaaaggctgaagattcctattggtgtgatatcatcatcagcgatttcgacgatggagatagtgactatgaaggtcgcaagaggaagcggccctctcagaacactaacaggagtgccaataagaagatgaagcaggaggagcagccacctcgaggagccccatcggatgtgaaaaatggggctcctacagatccatcattttaa

SEQ ID NO: 216 - protein, 490 aa, Sorghum bicolor
MSARIDLNNTAGSASASQTLAPAPPKRGRGRPRKNPPPPAHPRPPDPDTPMVGGFAPGDMVWGKKLNHAAWPGLIYSAGGNGTGHEGQFLVSYFGDKAFAWCDGAELRPYEPYFPVAELYDDGGEDFDAAVEASLDEFSRRVEAALASAARPFAPADFLTSLHDLAADRMGFTNRVQAAVAKAHLRAFDAFRALPDPPQYTLELGLLPHIPLPLPNPKAAADADTTPASPSRRGRKRKEQLVKDFDSDEDWDPRKRGATDSDSDVDFDRRRGFRGRGGGGGAGSGAPRGRPRGRPRKTDACRDPAPPLKDNNDDGGIQDKLEYPSAAEMLLQLLSVAADPVNGNYDSAPVIVSFFSKHKDSEAPSVYEDKELLETFGCKKGRKKSIVSSGPATKSEAGDDKDQFMTADGQRGRRKSAGSLYSARKAEDSYWCDIIISDFDDGDSDYEGRKRKRPSQNTNRSANKKMKQEEQPPRGAPSDVKNGAPTDPSF

SEQ ID NO: 217 - DNA, 1506 bp, Sorghum bicolor; identical to SEQ ID NO: 121

SEQ ID NO: 218 - protein, 501 aa, Sorghum bicolor; identical to SEQ ID NO: 122

SEQ ID NO: 219 - DNA, 876 bp, Sorghum bicolor
atgagcggcggcggtcaggatctgcagctgccgccggggttccggttccacccgacggacgaggagctggtgatgcactacctctgccgccgctgcgccggcctgcccatcgccgtccccatcatcgccgagatcgacctctacaagttcgacccatggcagctccccaggatggcgctgtacggcgagaaggagtggtacttcttctccccgcgggaccgcaagtacccgaacgggtcgaggccgaaccgcgccgccgggtccggctactggaaggccaccggcgccgacaagcccgtgggcacgcccaagccgctcgccatcaagaaggcgctcgtcttctacgccggcaaggcgcccaagggcgagaagaccaactggatcatgcacgagtaccgcctcgccgacgtcgaccgctccgcccgcaagaagaacagcctcaggttggatgactgggtcctgtgccgcatctacaacaagaagggcgggctggagaagccgtcggcggtcgccggcggcgaccacaagccgatgttcgcagcggccgcggtgagctccccaccggagcagaagccgttcgtggcggcgccgggcgggcttcccccattcccggacctggcggcgtactacgaccggccgtcggactcgatgccgcggctgcacgcggactccagctgctcggagcaggtgctgtcgccggagcagctggcgtgcgaccgggaggtgcagagccagcccaagatcagcgagtgggagcgcaccttcgcctccgaccccgtcaaccccgccggctccatgctcgaccccgtcgtcggtggccacgccggcgacccgctgctgcaggacatcctcatgtactggggcaagccgttctag

SEQ ID NO: 220 - protein, 291 aa, Sorghum bicolor
MSGGGQDLQLPPGFRFHPTDEELVMHYLCRRCAGLPIAVPIIAEIDLYKFDPWQLPRMALYGEKEWYFFSPRDRKYPNGSRPNRAAGSGYWKATGADKPVGTPKPLAIKKALVFYAGKAPKGEKTNWIMHEYRLADVDRSARKKNSLRLDDWVLCRIYNKKGGLEKPSAVAGGDHKPMFAAAAVSSPPEQKPFVAAPGGLPPFPDLAAYYDRPSDSMPRLHADSSCSEQVLSPEQLACDREVQSQPKISEWERTFASDPVNPAGSMLDPVVGGHAGDPLLQDILMYWGKPF

SEQ ID NO: 221 - DNA, 732 bp, Sorghum bicolor; identical to SEQ ID NO: 199

SEQ ID NO: 222 - protein, 243 aa, Sorghum bicolor; identical to SEQ ID NO: 200

SEQ ID NO: 223 - DNA, 1374 bp, Sorghum bicolor
atgggtgagggggaggcggcggaggtgaagggcggggtgctgcagggccgctacgagctgggccgcgtgctggggcacggcaacttcgggcgcgtccacgcggcgcgggacctgcgcacagggcgcggcgtggcggtcaaggtgctcgtcaaggacaaggtgctgcgcgcgggcatgatggagcagatcaagcgcgagatcgccgtcatgaagcgcgtgtcccaccccaacatcgtggagctccacgaggtgatggccacgcgctccaagatctacctcgcgctcgagctcgtccgcggcggggagctcttcgcgcggatcgtgcgcgccggccgggtcaaggaggacgtcgcgaggcgctacttccgccagctcatctccgccgtcgacttctgccacgcgcgcggcgtgtaccaccgcgacctcaagccggagaacctcctcatcgacgaagcggggaacctcaaggtcgtcgacttcggcctcagcgcgctcgccgaccacgcgcgcagcgatggattgctgcacacgctctgcgggacgccggggtacgtcgcgccggaggtgttccggaacaagggctacgacggcgccaaggccgacatctggtcgtgcggcgtcatcctctacgttctcctcgccgggtcgctgccgttcccggaggacaacatcgccgccatgttcaggaagatgagccgcggcgactaccggtgcccgccgtggctgtccaccgaggcgcgcaggctcatccccaagctgctcgaccccaaccccgacacccgcatcaccatcgcccagatcgtcgagacgccatggttcaacaagccatccatcgccaagcccgtcaaagcctccgccgccgccgccgccgagccgccggccgagcctgtctgctccgtaaaggacggcggcgacaaggacgagccgccggagacgctgaacgcgttccacctgatttccctctccgcggggttcgacctctcgccgctgttcgatgtggaaggcggtcccgcgaggtgccataaccgggagggcggtatgcggttcgcgacgcgggagtccgcgagcggcgtcgtctcccgtctcgaggaggtggcggcccgcggcggcgggcggatgcgggtgaccaagagcggcgcccgcggcgtgcggctcgagggcgcggagcgcgggggccgcaagggccgcctagccgtggcggccgacatcttcagcttatcgccgtccgtgctcgtggtggacgtcaagaaggacggcggcgacacgctcgagtaccgctccttctgcagcgaggagctccggccagcgctcaaggacatcgtctgggcggccgacccgcagcccgccgccaccgccaccgccgtcgtcgtgtga

SEQ ID NO: 224 - protein, 457 aa, Sorghum bicolor
MGEGEAAEVKGGVLQGRYELGRVLGHGNFGRVHAARDLRTGRGVAVKVLVKDKVLRAGMMEQIKREIAVMKRVSHPNIVELHEVMATRSKIYLALELVRGGELFARIVRAGRVKEDVARRYFRQLISAVDFCHARGVYHRDLKPENLLIDEAGNLKVVDFGLSALADHARSDGLLHTLCGTPGYVAPEVFRNKGYDGAKADIWSCGVILYVLLAGSLPFPEDNIAAMFRKMSRGDYRCPPWLSTEARRLIPKLLDPNPDTRITIAQIVETPWFNKPSIAKPVKASAAAAAEPPAEPVCSVKDGGDKDEPPETLNAFHLISLSAGFDLSPLFDVEGGPARCHNREGGMRFATRESASGVVSRLEEVAARGGGRMRVTKSGARGVRLEGAERGGRKGRLAVAADIFSLSPSVLVVDVKKDGGDTLEYRSFCSEELRPALKDIVWAADPQPAATATAVVV

SEQ ID NO: 225 - DNA, 3330 bp, Sorghum bicolor
atggcgctcgtcgtgtcccttccgaccccagtcccgccgtcccgtcgcatccactgccgcgcctacgcctatctgacaccgcacgccgtcagcctgccgtgcgccgtcccccagccagcagcagcagcaccacctcctcccgccctgcctgccccggctgcttgcttgcctctgtttgacctgcctatcatcagctcgcccgccccgtccgtccccgccgccgcggattccattccattctccaccaccacctctccctgcgctcccttttattccatccaccaccaccacgtccccctcgcctcgccaccacaccacagcaccacaatgcctcctcccatcctcctctgcttcctcctgctcctgctcctcctgctcctgctccccgcccccgcctccgccacgccggagcgggacgcgtacgcgctgtccaagctcaagtcgtccctcgtcccgtccaccaactccacctccaacgcgctgtccgactgggaccccaccgcgaccccgccggcgcactgcgccttcacgggcgtcacctgcgacgccgccacctcgcgcgtcgtcgcgatcaacctcaccgccgtgccgctccacgggggagcgctcccgcccgaggtcgcgctgctcgacgcgctcgccagcctcaccgtcgccgcctgctccctccacggccgcgtcccgccggtgctctcgtccatgcccgcgctccgccacctcaacctctccaacaacaacctcagcgggtccttcccgtctccaccgccctccccctccacgccctacttcccggcgctcgagctcgtcgacgtctacaacaacaacctctccggcccgctcccgccgctcggcgcgtcgcaggcgcgcaccctgcgctacctccacctcggcgggaactacttcaacggctccatcccggacaccttcggcgacctcgccgcgctcgagtacctggggctcaacggcaacgcgctgtcgggccgtgtcccgccgtcgctctcccgcctctcccgcctccgggagatgtacgtcggctactacaaccagtacagcggcggggtgccacccgagttcggcgacctccagtcgctcgtccgcctcgacatgagcagctgcacgctcacggggcccatcccgccggagctcgcgcggctgtcccgcctcgacacgctcttcctctccatgaaccagctcacggggctgataccgccggagctcggcgggctcaccagcctccagtcgctcgacctctccatcaacgacctcagcggtgagatacccgacagcttcgccggcctcactaacctcacgctgctcaacctcttccggaaccacctccgcggcgagataccggagttcgtcggcgagttcccgttcctcgaggtgctgcaggtgtgggacaacaacctcaccggcagcctcccgcccgcgctcggcaggaacgggcggctcaagacgctggacgtcaccgggaaccacctcaccggcaccataccgccggacctctgcgctggacggaagcttcagatgctcgtgctcatggacaacgccttcttcggcagcattccggactcgctcggcgactgcaagacgctcacgcgcgtccgcctcggcaagaacatgctgaccggcccagtcccgcccgggctcttcgaccttcccctggcgaacatgctcgagctcaccgacaacatgctcaccggcgagctcccggacgtgatcgccggcgacaagatcggcatgctcatgctagggaacaatgggatcggaggccgcatccccgccgccatcggcaacctcgccgcgctgcagacgctgtccctggagtcgaacaacttctctggccccctgccgccggagatcggcaggctcaggaacctcaccaggttcaacgccagcggcaacgcgctcacgggcggcatcccgagggagctcatgggctgcggctccctgggcgccatcgacctcagccggaacggcctcaccggcgagataccggacaccgtgacgtcccttaagatcctttgcacgttcaacgtgtcgaggaacatgctctccggcgagctgccgccggcgatttccaacatgacgagcctgacgacgctggacgtgtcctacaaccagctgtggggccccgtgccgatgcagggccagttcttggtgttcaacgagagctcgttcgtcggcaacccggggctgtgcggcgcgcccttcgccggcggcagcgacccatgccccccatcattcggcggcgcgcgctcgccgttctcgctgcgtcagtgggacacgaagaagctactggtatggctggtggtcctcctcaccctcctcatcctggccatcctcggcgcgcggaaggcgcgcgaggcgtggcgtgaggcggcgcgtcggcgttcgggcgcctggaagatgacggcgttccagaagctggacttctcggcggacgacgtggtggagtgcctgaaagaggacaacatcatcggcaagggcggcgccgggatcgtgtaccacggcgtgacccgcagcggcgccgagctggcgatcaagcggctggtgggtcgaggctgcggcgaccacgaccgcgggttcacggcggaggtcaccacgctgggccgcatccggcaccgcaacatcgtgcgcctgctgggcttcgtctccaaccgggagaccaacctgctgctgtacgagtacatgcccaacggctccctcggcgagatgctccacggcggcaagggcggtcacctcgggtgggaggcgcgggcgcgcgtcgccgtggaggcggcgcgcggcctctgctacctgcaccacgactgcgcgccacggatcatccaccgtgacgtcaagtcaaacaacatcctgctcgactccggcttcgaggcgcacgtggctgacttcggcctcgccaagttcctcggcggcgccacgtccgagtgcatgtctgccatcgctggctcctatggctacatcgccccagagtacgcctacaccctgcgcgtggacgagaagagcgacgtgtacagcttcggcgtggtgctgctggagctcatcactggtcgccgccccgtgggcagcttcggcgacggcgtggacatcgtgcactgggtgcgcaaggtgaccgcggagctcccggacgccgccggtgccgagcccgtcctggcggtggcggacaggcggctggcgccggagccggtgccgctgctggcggacctctacaaggtggccatggcgtgcgtggaggacgccagcacggcccggccgaccatgcgcgaggtcgtccacatgctctccacctccgccgccgcccagcccgacgtcctccacgccttctga

SEQ ID NO: 226 - protein, 1109 aa, Sorghum bicolor
MALVVSLPTPVPPSRRIHCRAYAYLTPHAVSLPCAVPQPAAAAPPPPALPAPAACLPLFDLPIISSPAPSVPAAADSIPFSTTTSPCAPFYSIHHHHVPLASPPHHSTTMPPPILLCFLLLLLLLLLLPAPASATPERDAYALSKLKSSLVPSTNSTSNALSDWDPTATPPAHCAFTGVTCDAATSRVVAINLTAVPLHGGALPPEVALLDALASLTVAACSLHGRVPPVLSSMPALRHLNLSNNNLSGSFPSPPPSPSTPYFPALELVDVYNNNLSGPLPPLGASQARTLRYLHLGGNYFNGSIPDTFGDLAALEYLGLNGNALSGRVPPSLSRLSRLREMYVGYYNQYSGGVPPEFGDLQSLVRLDMSSCTLTGPIPPELARLSRLDTLFLSMNQLTGLIPPELGGLTSLQSLDLSINDLSGEIPDSFAGLTNLTLLNLFRNHLRGEIPEFVGEFPFLEVLQVWDNNLTGSLPPALGRNGRLKTLDVTGNHLTGTIPPDLCAGRKLQMLVLMDNAFFGSIPDSLGDCKTLTRVRLGKNMLTGPVPPGLFDLPLANMLELTDNMLTGELPDVIAGDKIGMLMLGNNGIGGRIPAAIGNLAALQTLSLESNNFSGPLPPEIGRLRNLTRFNASGNALTGGIPRELMGCGSLGAIDLSRNGLTGEIPDTVTSLKILCTFNVSRNMLSGELPPAISNMTSLTTLDVSYNQLWGPVPMQGQFLVFNESSFVGNPGLCGAPFAGGSDPCPPSFGGARSPFSLRQWDTKKLLVWLVVLLTLLILAILGARKAREAWREAARRRSGAWKMTAFQKLDFSADDVVECLKEDNIIGKGGAGIVYHGVTRSGAELAIKRLVGRGCGDHDRGFTAEVTTLGRIRHRNIVRLLGFVSNRETNLLLYEYMPNGSLGEMLHGGKGGHLGWEARARVAVEAARGLCYLHHDCAPRIIHRDVKSNNILLDSGFEAHVADFGLAKFLGGATSECMSAIAGSYGYIAPEYAYTLRVDEKSDVYSFGVVLLELITGRRPVGSFGDGVDIVHWVRKVTAELPDAAGAEPVLAVADRRLAPEPVPLLADLYKVAMACVEDASTARPTMREVVHMLSTSAAAQPDVLHAF

SEQ ID NO: 227 - DNA, 1908 bp, Sorghum bicolor
atggacggatgtgattgcatcgagccactatggcctactgatgatcttctcgtcaagtatcagtacatctcagacttcttcatagctctcgcgtacttctcaatcccattggagctcatctattttgtgaagaagtcgtccttcttcccgtacagatgggtcttgatccagtttggtgcgtttatagttctctgtggggcgacccatctgataaacctgtggactttcaccacacatacaaagaccgttgcgatggtcatgaccatagcaaaggtttctacagcagttgtgtcctgtgcaactgctttgatgcttgttcatatcatccccgacttgttgagtgtgaaaactagggagttgttcctcaagaataaagctgaacagcttgatagagagatgggactgataaggacgcaggaggagaccggtaggcatgttaggatgcttacacatgaaatcagaagtactcttgataggcatacaattttgaagactactcttgttgagctaggaaggaccttgggtctggaagaatgtgcattgtggatgccatctcgaagtggttcaagccttcagctttctcatactctgcgccaccagattactgtcggatcatcagtgccaattaatcttcctgtcgtcaatcaagtgttcagtagcaaccgagcaattataataccccacacatctcctttggcgcggattcgacctcttgcagggcgatatgttccgccagaagtggctgcagtccgtgtacctcttctacacctttcaaacttccaaataaatgattggcctgagctttcagcgaaaagctttgcaatcatggttttgatgcttccatctgatagtgcaagaaaatggcatgtgcatgaattggagctggttgaggtcgttgctgatcaggtagcagttgcactatctcatgcagcgattcttgaagagtccatgagagcacgtgatttactaatggagcagaatgttgccttggatttagctcgaagagaggccgagatggctatccgtgctcgcaatgatttcctagctgttatgaatcacgaaatgagaacacccatgaatgcaataatagccctttcctccttgcttttggaaactgagcttactcctgagcagcgtctaatggtggaaacagtactgaaaagcagcaatctgttagcaacactcatcaatgatgtgctggatctttccaaacttgaggatggaagccttgaattggagattaaagcattcaatcttcatgctgttttcaaagaagtgatgagtttcattaaaccaattgcatctatcaagaggctatctgtatcggttatgttggcaccagatttgccgttatgtgctattggtgatgaaaagagactcatgcaaactattctgaacatatctggcaacgctgtaaagtttaccaaggagggacacatcacgcttgtagcttccattgtgaaggctgactctctgagagagttcagaaccccagaatttcatccaactgcaagtgatgaccatttctatttgaaagttcaggtaaaagatacaggctgtggaattagtcctcaggatctacctcatgtatttacaaagtttgctcatcctcaaagtggaggaaaccgagggttcaatggtagtggtcttggccttgccatctgcaaaaggtttgttagtctcatgggagggcacatctggatcgacagcgaaggaactggaagaggttgcaccgcaacattcgtcatcaagctcggcgtgtgtgacaacacaaacacctaccagcagcagttgatccctctagtctggccaagcagtgcagactctgatttgtctgctcctaaagtgcttcccgacgggagagggtctgctacttccctgaaatctcggtaccaaagaagcgtatga

SEQ ID NO: 228 - protein, 635 aa, Sorghum bicolor
MDGCDCIEPLWPTDDLLVKYQYISDFFIALAYFSIPLELIYFVKKSSFFPYRWVLIQFGAFIVLCGATHLINLWTFTTHTKTVAMVMTIAKVSTAVVSCATALMLVHIIPDLLSVKTRELFLKNKAEQLDREMGLIRTQEETGRHVRMLTHEIRSTLDRHTILKTTLVELGRTLGLEECALWMPSRSGSSLQLSHTLRHQITVGSSVPINLPVVNQVFSSNRAIIIPHTSPLARIRPLAGRYVPPEVAAVRVPLLHLSNFQINDWPELSAKSFAIMVLMLPSDSARKWHVHELELVEVVADQVAVALSHAAILEESMRARDLLMEQNVALDLARREAEMAIRARNDFLAVMNHEMRTPMNAIIALSSLLLETELTPEQRLMVETVLKSSNLLATLINDVLDLSKLEDGSLELEIKAFNLHAVFKEVMSFIKPIASIKRLSVSVMLAPDLPLCAIGDEKRLMQTILNISGNAVKFTKEGHITLVASIVKADSLREFRTPEFHPTASDDHFYLKVQVKDTGCGISPQDLPHVFTKFAHPQSGGNRGFNGSGLGLAICKRFVSLMGGHIWIDSEGTGRGCTATFVIKLGVCDNTNTYQQQLIPLVWPSSADSDLSAPKVLPDGRGSATSLKSRYQRSV

SEQ ID NO: 229 - DNA, 831 bp, Sorghum bicolor
atgatgtcgtcggtgccggagacgttcaacctggaccagcagcacctcgtcgtgcagcagcagcagcctccgccggcggagcaggagcagatctgctacgtgcactgcagctactgcgacaccatcctcgcggtgggcgtgccgtgcagcagcttgttccagacggtcaccgtgcggtgcggccactgctccaacctgctctacgtcaacctccgcgccctcctgctgccggcggccgccaaccagctaccacccttcggcggccaggctctcctctccccaacctccccgcacggtctacttgatgctgagaccatgtcgtcgttccaagcgccgaggagcctgcagccgagtactgatccgccgagcgcttgcgtgagcaccatcacaagcatcaacaacacctgcggtggtggcaacagcgcgtcggccatgtcgtcgatggcgccgccgccaccagccaaacctgcactgctggagccgcagcttcccaagagcgcagcgtcaggcaacaaaacttcagagaagcggcagagagttccttccgcgtacaaccgtttcatcaaagatgagatccagcgcatcaaggccagcaatccggacatcactcacagggaagctttcagcgcggctgccaagaattgggcccatttcccgcacatccatttcggtctcatgcccgaccagggcctgaagaagaaccctatgcaaaatcaggagggagctgaatgcatgcttttcaaggacggtctctacgcagcagcagctgccgctgcagcagcagccgccgccgccacagctgcgtccggcatgggcatttcaccattctga

SEQ ID NO: 230 - protein, 276 aa, Sorghum bicolor
MMSSVPETFNLDQQHLVVQQQQPPPAEQEQICYVHCSYCDTILAVGVPCSSLFQTVTVRCGHCSNLLYVNLRALLLPAAANQLPPFGGQALLSPTSPHGLLDAETMSSFQAPRSLQPSTDPPSACVSTITSINNTCGGGNSASAMSSMAPPPPAKPALLEPQLPKSAASGNKTSEKRQRVPSAYNRFIKDEIQRIKASNPDITHREAFSAAAKNWAHFPHIHFGLMPDQGLKKNPMQNQEGAECMLFKDGLYAAAAAAAAAAAAATAASGMGISPF

SEQ ID NO: 231 - DNA, 678 bp, Sorghum bicolor
atgcagcagcaacacctgatgcagatgaaccagaacatgattgggggctacacctctcctgccgctgtgaccaccgatctcatccagcagtacctggatgagaacaagcagctgatcctggccatcctcgacaaccagaacaatggaaaggtggaggagtgcgaacggcaccaagctaagctccagcacaacctcatgtacctggcggccatcgctgacagccagccaccacagactgcaccactatcacagtacccgtccaacctgatgatgcagccaggccctcggtacatgccaccgcagtccgggcagatgatgagcccgcagtcgctaatggcggcgcggtcctccatgatgtacgcgcacccgtccatgtcgccactccagcagcagcaggcagcgcacggccagctgggcatggcttcagggggcggcggtggcacgaccagtgggttcagcatcctccacggcgaggccagcatgggcggtgctgctggcgcaggcaccggcaacagcatgatgaacgccggcatgttctcaggctttggccgcagcggcagtggcgccaaggagggatcgacctcgctgtctgttgacgtccgtggtggcaccagctccggcgcgcagagcggggacggcgagtacctgaaagcaggcaccgaggaagaaggcagttaa

SEQ ID NO: 232 - protein, 225 aa, Sorghum bicolor
MQQQHLMQMNQNMIGGYTSPAAVTTDLIQQYLDENKQLILAILDNQNNGKVEECERHQAKLQHNLMYLAAIADSQPPQTAPLSQYPSNLMMQPGPRYMPPQSGQMMSPQSLMAARSSMMYAHPSMSPLQQQQAAHGQLGMASGGGGGTTSGFSILHGEASMGGAAGAGTGNSMMNAGMFSGFGRSGSGAKEGSTSLSVDVRGGTSSGAQSGDGEYLKAGTEEEGS

SEQ ID NO: 233 - DNA, 408 bp, Sorghum bicolor
atggagacctgcccctcggtgaagaacatcctcttgctggactccgaggggaagcgcgtcgccgtgaagtactacagcgatgactggcctactctctccgcgaagctggccttcgagaagtcggtctttgccaaaacccagaaagcgaatgctggaacggaagctgagattgtaatgtttgatggtcaaattgtggtatacaagttcatccaagacctgcatttctttgttactggaggagaagaggagaatgagcttattttagcatcagttcttcagggattctctgatgctgtcgaacgacttctcaaaaacatggttgacaaaaggacagcacttgagaatttggacctgatcctgttgtgtcttgatgaaattgttgatggaggaaggaagagagatagctga

SEQ ID NO: 234 - protein, 198 aa, Sorghum bicolor
MVVASILFKGLKEFQGLNLCLMQETCPSVKNILLLDSEGKRVAVKYYSDDWPTLSAKLAFEKSVFAKTQKANAGTEAEIVMFDGQIVVYKFIQDLHFFVTGGEEENELILASVLQGFSDAVERLLKNMVDKRTALENLDLILLCLDEIVDGGIVLETEGREIAEKVSGHGLEGASSAEQTLVNALTQAREHFAKSLLM

SEQ ID NO: 235 - DNA, 687 bp, Sorghum bicolor
atggcacctgcgaaatccggggagaaggcgaccagcttcgccatggcctgcagcctgctcagccgctacgtcaggcagaacggcgccgccgccggcgatctcggcctcgccatcagagctgaagccgatggaaagagggcgtcggcagacacggaaaagggggacacgacgaaggagaccatggatctattccctcagaacgctgggttcggctcggaggctgccatgaaggaagcccctgatgtgagggagccagagaagcgccagctgactatcttctatggcgggaaggtccttgtgttcaatgacttccctgctgagaaagcaaaagacctgatgcaaatggccagcaagggttcgtctgtagctcagaaccctggcatgctgccttcccccacagttgcaacagttactgacagcaccaagatcacagcagtgccagccgcaccaattgctgtggtcaatgcccaaaagagtccagcagatataccccaggctcccaaggcatctcttcgccggttccttgagaagagaaaggatcgccttaccgcgaaagcaccataccaaggttccccttcagatgctacacctgtgaagaaggagatggcggagggtcagccatggcttgggctgggacctcagatcgccaatcctgatctgagcttgtgcaaggaggggagccaatga

SEQ ID NO: 236 - protein, 228 aa, Sorghum bicolor
MAPAKSGEKATSFAMACSLLSRYVRQNGAAAGDLGLAIRAEADGKRASADTEKGDTTKETMDLFPQNAGFGSEAAMKEAPDVREPEKRQLTIFYGGKVLVFNDFPAEKAKDLMQMASKGSSVAQNPGMLPSPTVATVTDSTKITAVPAAPIAVVNAQKSPADIPQAPKASLRRFLEKRKDRLTAKAPYQGSPSDATPVKKEMAEGQPWLGLGPQIANPDLSLCKEGSQ

SEQ ID NO: 237 - DNA, 1314 bp, Sorghum bicolor
atggcgcacgacctgtgcgacgacttggagctcgtcgccgactgcggctacgacgacgacgactacttggacgacttccatttccatgacgacgacggcttcccctcctcccctgccaccaccaccgctgctgcgtccggctccggcctgcagcagcatgagcagatggataatacttcagctttggactataaagaagggaaagacatgcaaggaataccctgggaaagactgaactacactagggagcagtatcgtcagatgaggttgaaagaatacaagagctatcagaacctcacgagatcacgcagcgggctacagcaggaatgcaaacaagtggagaggaaggatactttctatgatttccatttgaacacgagagctgtcaaatcaacaatagttcattttcagctgaggaacctcctgtggcctacttcgaagcacgacgtgtacctggtgcagaactactccgtgatgcactggtctgccctgctccagagaggaacggaagtgctcaatgtggccggccgattggccccgacacagaatgtgaagggggctagaccattgtcgagggttcagatcagcaccatggctgtgaaggacaacctcattgttgccggcggcttccagggagaactcatctgcaagtatgttgataaacccggggtggcattctgcacgaacctgaccggcgacgacaactccaccaccaacgccgtcgacatctaccaggcacccaaaacattcgacgccgagagatacagccttctcagtcagttcaccttcccgtggtctgtcaacagcacgtcggtgagccccgacggcaagctgctggcggttctgggcgacagcacggagtgcgtgatcgcggacccgcagtcgggcagggcgacggcgacgctgcgcgggcaccaggactactccttctcgtcggcgtggcaccccgacggccgcgtcctggcgacggggaaccaggacgggacgtgcaggctgtgggacgcgcgcagcctgtcggagccgttcgcggtgctgaaaggccggatcggcgccgtccggggcctccggttctcccccgacggcggcaggttcctggcagcggccgaggccgccgacttcgtgcacgtgtacgacgccgcggccgggtacgtcgggcgcgagcaggaggtggagctgttcggggaggtggccggcgccgcgttcagccccgacggcgaggcgctgttcgtcagcgtcgccgaccgcacctacggcggcctgctcgagttccgccgccgccgggcggacggctacctcgacacgtgtttcttctga

SEQ ID NO: 238 - protein, 437 aa, Sorghum bicolor
MAHDLCDDLELVADCGYDDDDYLDDFHFHDDDGFPSSPATTTAAASGSGLQQHEQMDNTSALDYKEGKDMQGIPWERLNYTREQYRQMRLKEYKSYQNLTRSRSGLQQECKQVERKDTFYDFHLNTRAVKSTIVHFQLRNLLWPTSKHDVYLVQNYSVMHWSALLQRGTEVLNVAGRLAPTQNVKGARPLSRVQISTMAVKDNLIVAGGFQGELICKYVDKPGVAFCTNLTGDDNSTTNAVDIYQAPKTFDAERYSLLSQFTFPWSVNSTSVSPDGKLLAVLGDSTECVIADPQSGRATATLRGHQDYSFSSAWHPDGRVLATGNQDGTCRLWDARSLSEPFAVLKGRIGAVRGLRFSPDGGRFLAAAEAADFVHVYDAAAGYVGREQEVELFGEVAGAAFSPDGEALFVSVADRTYGGLLEFRRRRADGYLDTCFF

SEQ ID NO: 239 - DNA, 612 bp, Sorghum bicolor
atggcttcccaccaggacaaggctagctaccaggccggcgagaccaaggctcgcaccgaggagaagactgggcaggcgatgggggcgaccaaggacacggcgcagcacgccaaggagaccaccaagcagaaggcgtccgactccgacaccggcagctaccttggccagaagaccgaggaggccaagcacaaggccggccagaccacggagtccaccaagcagaaggccggccagaccacggaggccgccaagcagaaggccgccgagaccacggaggcgaccaagcagaaggccggcgagacgacggaggcgaccaagcagaagaccgccgagacgacggaggccaccaagcagaaggccgccgaggccatggaagccaccaagcagaaggccgccgaggccgggcagtacgccaaggagaccgtcgtctccggcaaggacaagtccgccggcgtcatccagcaggccaccgagcaggtgaagagcgcggcggccggcgccaaggacgcggtgatgaacacgctggggatgggcggggacaacaacagcaagcagagcgacacaaacaccgacagcagcaaggactcctccaccatcaccagagatcactag

SEQ ID NO: 240 - protein, 203 aa, Sorghum bicolor
MASHQDKASYQAGETKARTEEKTGQAMGATKDTAQHAKETTKQKASDSDTGSYLGQKTEEAKHKAGQTTESTKQKAGQTTEAAKQKAAETTEATKQKAGETTEATKQKTAETTEATKQKAAEAMEATKQKAAEAGQYAKETVVSGKDKSAGVIQQATEQVKSAAAGAKDAVMNTLGMGGDNNSKQSDTNTDSSKDSSTITRDH

SEQ ID NO: 241 - DNA, 456 bp, Sorghum bicolor
tcccctcctcctactgcaaggcccgcccgtccgacccgccgcttcctcgcgtctcaggttcgtgcctggtggccgactctcgcggtggcggtggttctccggcgcctcggttgggcaggggacgagcgggttagggacagagggggtctttgctgcgattccgtgatggcggcgacggcggccatctgcgtggatgacgaggcgacctgcgccgccgcggaatgcgcgccgggggtcgagaagctggatctcgctgccgccggcgccggcgccgacggcaaggccggcggcagcaagaggagcgtctacctcatggactgcgcgccggtctggggctgcgcgtccacgcgcggccgcagcgccgagatggaggacgcctgcgccgcgttcccgcgcttcgccgacgtgccggtgcgcctgctcgccaggcgccgggacctcgacggcctgggcctc

SEQ ID NO: 242 - protein, 152 aa, Sorghum bicolor
SPPPTARPARPTRRFLASQVRAWWPTLAVAVVLRRLGWAGDERVRDRGGLCCDSVMAATAAICVDDEATCAAAECAPGVEKLDLAAAGAGADGKAGGSKRSVYLMDCAPVWGCASTRGRSAEMEDACAAFPRFADVPVRLLARRRDLDGLGL

SEQ ID NO: 243 - DNA, 642 bp, Sorghum bicolor
atggggaaggggttcgcgtcgtacctggcgatgaagacggggccggagggcggcggcccggcggcggcggcgcagcaggcgctgatcgacgccgacctgcgggagctcggcgtcgccgcgcggaagctcgccaaccatgccttcgttctcggcggcggcctgggtttcggcacttccttcctcaagtggctggccttctttgcggcagtgtatctcttgatattggaccgcacaaattggaagaccaacatgctgacagctctcctggttccttacattttcttcactctgcctaatgtgctgttttctctgatcagaggagaggtggggaaatggattgcgattattgctgttattctgcgtctattctttccacgccacttcccagattggttagagcttcctggttccatcatcctgctcacagtggtcgcccccagcctgttcgcagacaccttaaggggtgacatcgttggtgtcttgatatgccttgcgattggatgctacctgctccacgagcacatcaatgcatcaggtggattcaggaacgccttcaggaagggcaatggtgtatcaaactccattggcatccttctactcttcatctaccctgtatgggcttttgtgctgcaagtcctgtag

SEQ ID NO: 244 - protein, 213 aa, Sorghum bicolor
MGKGFASYLAMKTGPEGGGPAAAAQQALIDADLRELGVAARKLANHAFVLGGGLGFGTSFLKWLAFFAAVYLLILDRTNWKTNMLTALLVPYIFFTLPNVLFSLIRGEVGKWIAIIAVILRLFFPRHFPDWLELPGSIILLTVVAPSLFADTLRGDIVGVLICLAIGCYLLHEHINASGGFRNAFRKGNGVSNSIGILLLFIYPVWAFVLQVL

SEQ ID NO: 245 - DNA, 354 bp, Sorghum bicolor
atgaggagtctctttgtggtcgctctgatgatcgtggccgcggcctgcatcgccgcgccgcggggtgccgacggcgcgggcgagtgcggggcgacgccgccggacatgatggcgctgaagctggcgccgtgcgcgtcggcggcggaggaccccagctccgcgccgtctagctcctgctgcggcgcggtgcacagcatcgggaagcagagccccaagtgcctctgcgccgtcatgctgtccaacactgccaagagcgccgggatcaaggctgaggtcgccatcaccatccccaaacgctgcaacctcgtcgaccgccccgtcggctacaagtgcggagattacactctgccatga

SEQ ID NO: 246 - protein, 117 aa, Sorghum bicolor
MRSLFVVALMIVAAACIAAPRGADGAGECGATPPDMMALKLAPCASAAEDPSSAPSSSCCGAVHSIGKQSPKCLCAVMLSNTAKSAGIKAEVAITIPKRCNLVDRPVGYKCGDYTLP

SEQ ID NO: 247 - DNA, 266 bp, Sorghum bicolor
atggggaagagcaagaagagcaaggcccgcggcggcggggacgacctgctcgacagcagcgacgccgacagcgtcggctcctcgtccaccgcgctgtcggatctctccatctcgtatgccaccgagcacgtcaactcgcaggagttcgtcctcgacaagtacatcgacgcgctctacgagaagagggggtctacaagagaggcagcattggttaaactggttgatgcctttgaaagttttatgctccatggccttgtggagaatag

SEQ ID NO: 248 - protein, 434 aa, Sorghum bicolor
MGKSKKSKARGGGDDLLDSSDADSVGSSSTALSDLSISYATEHVNSQEFVLDKYIDALYEKRGSTREAALVKLVDAFESFMLHGLVENRYATLLSQFNNSIKKGSTKEVFLASHAIGLLAITLGAGSSSREIMEESHPQLCRILQAWSDASKMISALDCLAIITFVGATDLAETELSLKAMWDVIHPKSGSNVGTVRKPKPPVLAAALSAWTFLLTTIGSWRINTDSWKEPIAFLSTLLEADDRAVRMAAGEALALCFELNLLDVSSCEDGDVNTGGTGGSKNKLFLDMQALKAKISGLASNLSAEAGGKGADKKNLTDQRDLFQRILDFVKYGDCPEESIKIAGKRDVLRVSSWSELIQLNFLKRFLGKGFLKHVQENGLLQDIFDIKVDKAETLSSTDKKIFRSEEEKERALKLNKERRLAQVRKNAVMLDD

SEQ ID NO: 249 - DNA, 1083 bp, Sorghum bicolor
atggaggagatcacccaccactttggagttggcgcaagcagccacagccacggccacggccacggccagcaccaccatcaccaccacccatgggcatcctccctcagcgccgtcgttgcgccgccgccgcagcaaccgccgaccgcaggcctgccgctcaccctgaacacggtggcggccactgggaacagcggcgctagcggcaacccggtgctgcagcttgccaacggcggcagcctcctcgacgcgtgcgtcaacgtcaaggcgaagggcgagccctcgtcgtcgtctccctacgcaggcgacctcgaggccatcaaggccaagatcatctcgcacccacactactactcgctcctcgccgcctacctcgagtgcaagaaggtgggggcaccaccggatgtgtcggcgaggctgacggcgatggcgcaggagctggaggcgcggcagcgcacggcgctcagcggcctgggcgcagcgacggagccggagctggaccagttcatggaggcgtaccacgagatgctggtgaagttcaaggaggagctgacgaggccgctgcaggaggcgatggagttcatgcgaagggtggagtcgcagctcaactcgctttccatctctggaagatcgctgcgcaatatcctttcctctggctcttctgaggaggatcaagaaggtagcggaggagagacagagctccctgaagttgatgtccatggtgtagaccaagagctaaagcaccatctcctgaagaaatacagtggctatctaagctcgctcaagcaagaactgtcaaagaagaagaagaaagggaagctccctaaggaggctcgccagcagctccttagctggtgggatctgcactacaaatggccttacccctcagagactcagaaggtggcactggctgagtctaccgggcttgatctgaagcagatcaacaactggttcatcaaccagaggaagcggcactggaagccgtctgaggaaatgcaccacctgatgatggacgggtaccacaccaacactttcttcatggacggccatttcatcaacgatggcgggctctaccggcttggctag

SEQ ID NO: 250 - protein, 360 aa, Sorghum bicolor
MEEITHHFGVGASSHSHGHGHGQHHHHHHPWASSLSAVVAPPPQQPPTAGLPLTLNTVAATGNSGASGNPVLQLANGGSLLDACVNVKAKGEPSSSSPYAGDLEAIKAKIISHPHYYSLLAAYLECKKVGAPPDVSARLTAMAQELEARQRTALSGLGAATEPELDQFMEAYHEMLVKFKEELTRPLQEAMEFMRRVESQLNSLSISGRSLRNILSSGSSEEDQEGSGGETELPEVDVHGVDQELKHHLLKKYSGYLSSLKQELSKKKKKGKLPKEARQQLLSWWDLHYKWPYPSETQKVALAESTGLDLKQINNWFINQRKRHWKPSEEMHHLMMDGYHTNTFFMDGHFINDGGLYRLG

SEQ ID NO: 251 - DNA, 201 bp, Sorghum bicolor
atgagatcggcacttgtagtgagctttgcttgtgcgtggctgctgctgttgcagctcgcaggagcttcgcatgtcgtctacgacgagtttttcgaggccgaggctgcgacagcgaaggtgccaccgtccatcgtcaacccccagctgaggacggggtaccacttccatccccccaagaactggatcaatgctactaagtaa

SEQ ID NO: 252 - protein, 66 aa, Sorghum bicolor
MRSALVVSFACAWLLLLQLAGASHVVYDEFFEAEAATAKVPPSIVNPQLRTGYHFHPPKNWINATK

SEQ ID NO: 253 - DNA, 1359 bp, Sorghum bicolor
atggctctcctcaagaactccctcgtgctccaggggcggttgcgccatgcggcggcggcggcgttgttcacggcgcggcgcggcgcggcgacggcgacggaagagtacgcgcgccggaactacgccgataacacctccgagtacaacacggtcatcggctcgctcgtcgcccagcgcaggccctaccttctgcgtgatgcttatgacgacatgatgcttgatggcgtgaagcctgagcgggatacattccacacactcatagtcggtaccatgaaaggcagccggctacaagatgcactctacttccgtgatcagatgaaagaaatgggtttgcagcctgatgttaacctttacaacttcttgatctccacttgtggaaaatgcaagaactcagatgcagcaatcatgcttttagaagaaatgaaggcacatggtgttaagttgaaaggagaaacctacatttgtctactgaatgcacttgcatcaacagggcagactgatcaagtgtatgccatagttagtgatatgagtgctgctggtcttggattaaacaagttttgttatgctggactgataactgctttcaagaacaagacaccaaccactgaggaaactatggcaaagattcttgactttgtcgggcagtcgaaaggttggcaatatgttgaaagagcagcaaaggacagtgctgagaatataatgatgaatgtgtcagaggaagagctatacaacctcccaacagcagaatatgtaaatagacgaggaggatttgtctttaaacagcatacagtttatcatgttgctatccatgcttgtgcagaactgcgtagtaaagagacacttgaagcacttctggaaatgttcaataaggataatagagatggatctacttatgatgcctacatggtgatgcaagctatgaggtgttacctacggtgtggtgattttgattctgctgttaagatgtttgaagagtatttaagctcgagatccccacccgtggagttgtatgcgacacttgctgagggagctatgattgggtacactccgagaggaatgcaacttgctcaagaaactatagagaaaatggtttcaagaaatttcttcttgaatgccaggctgggatctgatctcctacttgcagctgccggtgaaacaactggtggatatacaactgcaaattatgtctgggatctcctgcaaagccgtaatgtcactccatatcttactgctgttgaggcataccacaaaggtttgatggcgcgagagattccttctgatgatccacggcttctcaatgtttcccgcgttttggacaacttgcagctccgatttggaccaagaagaaacactcagtaa

SEQ ID NO: 254 - protein, 452 aa, Sorghum bicolor
MALLKNSLVLQGRLRHAAAAALFTARRGAATATEEYARRNYADNTSEYNTVIGSLVAQRRPYLLRDAYDDMMLDGVKPERDTFHTLIVGTMKGSRLQDALYFRDQMKEMGLQPDVNLYNFLISTCGKCKNSDAAIMLLEEMKAHGVKLKGETYICLLNALASTGQTDQVYAIVSDMSAAGLGLNKFCYAGLITAFKNKTPTTEETMAKILDFVGQSKGWQYVERAAKDSAENIMMNVSEEELYNLPTAEYVNRRGGFVFKQHTVYHVAIHACAELRSKETLEALLEMFNKDNRDGSTYDAYMVMQAMRCYLRCGDFDSAVKMFEEYLSSRSPPVELYATLAEGAMIGYTPRGMQLAQETIEKMVSRNFFLNARLGSDLLLAAAGETTGGYTTANYVWDLLQSRNVTPYLTAVEAYHKGLMAREIPSDDPRLLNVSRVLDNLQLRFGPRRNTQ

SEQ ID NO: 255 - DNA, 825 bp, Sorghum bicolor
atggcggctgggctgaagagggacccgattgtgatcctgaggataaacggggaggacctgaatgagttcgtcgagagtccgaggtatgagcctgaagccatggccatattttcacaagtgggagtgggagtgggagtggggtctgacaacaacgcaacgccaaagctgcgccagtgcttgttggccgctcttggacagctcacggtcgaccatggcatgccaccagcttctgattcctgggtcatggagaatgttgtggagcctgcgttgcaagagctgtctgctaatcagctcgatcagcctgtttcccaggaagtcttcttccaagaattcaggaaatttctgggcatcatggctctaagactgcaacagcaccctgtgatcgtcgcccatacagagaacacctttgacgggagtggtatcaggaggctactgtcgaacaagttcgaattagacaagctgctggattctgtatggagagacgttccgaaagaacacaaagataaaacgtcgaaggagtacctccggattgcgcttgataggattgccgattcagcgagtctgccaccttttggagccgtcgatcaggttgatgctgtggtgaacgaagcattcaagatggcgaaagctgacgaaatgaaggcggtggacgaagcagagttcaagaagctgctgacggagattcttggggccatcatgctgcagttggacggcaacccgatcggtgtctcaaccaacaccgtcgtccatgagcccatgtccacctcctccgcgctgttgtcaccgacgccgctgtctccaatggtgtcctcaccaagtgaataa

SEQ ID NO: 256 - protein, 274 aa, Sorghum bicolor
MAAGLKRDPIVILRINGEDLNEFVESPRYEPEAMAIFSQVGVGVGVGSDNNATPKLRQCLLAALGQLTVDHGMPPASDSWVMENVVEPALQELSANQLDQPVSQEVFFQEFRKFLGIMALRLQQHPVIVAHTENTFDGSGIRRLLSNKFELDKLLDSVWRDVPKEHKDKTSKEYLRIALDRIADSASLPPFGAVDQVDAVVNEAFKMAKADEMKAVDEAEFKKLLTEILGAIMLQLDGNPIGVSTNTVVHEPMSTSSALLSPTPLSPMVSSPSE

SEQ ID NO: 257 - DNA, 561 bp, Sorghum bicolor
atggagaagcaggcggcggcacaggcgcaggcgcaggagcaggagcaggagcagtggcagggcgcggtggaggcgactctgccgtcgacgccagcgtccgcggcgtggccgcacatcgccagcttctgcgcgctgcaccggtacctcgcgagcatcgacgtgtgcgagctcgcggaaggggaggacggccggcccgggtgcgtccgctacgtggcctccctggcgccgggcaccaccacgggggagatcggcatctgggcgacggagaagctgctggagatcgaccacgacgcccggcggctcgcgtacgccgtcgtcggcagcagcttggggttcggcagatacgtcgctactatgagcatcgtcgctgctgacgacgaggacgacgcggggtgcaggctggtgtgggcgttcgagtgcgaccccgtgcaggggtggagccgggatgggatgctcgcctacctcgacgccggcgtcaagggcatcgccgcgcggatcgaggaagcccatgccgccgccgccagcgccagtgccggaggagacggcggcgtcgctgcttga

SEQ ID NO: 258 - protein, 186 aa, Sorghum bicolor
MEKQAAAQAQAQEQEQEQWQGAVEATLPSTPASAAWPHIASFCALHRYLASIDVCELAEGEDGRPGCVRYVASLAPGTTTGEIGIWATEKLLEIDHDARRLAYAVVGSSLGFGRYVATMSIVAADDEDDAGCRLVWAFECDPVQGWSRDGMLAYLDAGVKGIAARIEEAHAAAASASAGGDGGVAA

SEQ ID NO: 259 - DNA, 831 bp, Sorghum bicolor
atgaactcaaggaagctcagcggccaccggctgccgtcgtcgtccgaagacgatgttctggagacgacgagagatcagcacgtcggcgactgcggaccggaggctgacggcggcgagacgatggtgcatttcagccacccggagcaccggctggcccggttcgacttcccgtacctgttcatgtgcatggggtgcaaggagtacggcgccgggaagcggttcatgtgccaggcctgcggcttccagctgcacgagttctgcgcgctggcgccgccggcgctgcacgaccacccgttccaccgcaagcacccgcacctgctcttcttcgtgaagccatcgccgggcggcggcggcggcggcggcgggttcctccgccgcaagtgcgacctctgcggcaagtccgtgcgggggttctcgttccggtgcgcgtcgtgcagcttcgacatgcacccgtgctgcgcgtccatggcgcggcggctggagctccccgccgtgcacgagcacccgctgctgctggcacaggacgacggcggcggggagccggagacgagcttcgtgtgccaggtgtgcaggcggacgaagcggtcggggcagcacgtgtaccagtgcctgccgtgtggatactacctccacgccaggtgcgccaaggacatggtgaacgggctctacgtgcacggcgtcgtgccgccggagaagaagaacgcgctggccaccgccgccagggtcaccgtcaacgcgctgttcggggtcatcggcggactcatcgaagggatcggggagggcatcggggaggccttcgtcgagagcattgggagaagcaggagaagctag

SEQ ID NO: 260 - protein, 276 aa, Sorghum bicolor
MNSRKLSGHRLPSSSEDDVLETTRDQHVGDCGPEADGGETMVHFSHPEHRLARFDFPYLFMCMGCKEYGAGKRFMCQACGFQLHEFCALAPPALHDHPFHRKHPHLLFFVKPSPGGGGGGGGFLRRKCDLCGKSVRGFSFRCASCSFDMHPCCASMARRLELPAVHEHPLLLAQDDGGGEPETSFVCQVCRRTKRSGQHVYQCLPCGYYLHARCAKDMVNGLYVHGVVPPEKKNALATAARVTVNALFGVIGGLIEGIGEGIGEAFVESIGRSRRS

SEQ ID NO: 261 - DNA, 1551 bp, Sorghum bicolor
atgaggcccgctggcggttgttgccgccgcggcggcgggctgctggttctcggcctcgcgctctcgctctcggcggcgctgctgctgcgtggctgcgcggggcagcaagccgaggacgacggctcggcggacgccccggcggcggcggcggcggcggcgacggcccccatggaggagaaggagcgccgggccctgtacgccgccatcgagagcttcgtcggcaaggggtggaacggctcagggctctaccccgacccctgcggctggtctcccatccagggagtgtcatgtgatctcttcaatgggctgtggtacccaacggtgatgagcattggcccagttcttgacaactcgctgcagtgcgcccctgacgccaagttcagcccgcagctgttcgaccttcggcgcctccggacgctgtccttctacagctgcttcccggcgagcaaccccacggccatcccgaccgccggctgggagaagctgtcggggacgctggagacgctggagttccgcacgaacccgggcctcaccggcggcatcccgccctccctcggccgcctggccagcctgcagtcgctggtgctggtggagaacaacctgacggggcccgtccccgccgagctgggcgcgctgtcgaggctgagacggctggtgctgtccgggaacgggctgtcggggccgatcccggcgacactcggtaataacaacgaccgccgccaccgccacgcccacgatgacgagctattgatcgtggacctgagcaggaactctctaaccggctctctgccttcgtcactaggtggcctcacggggctcctgaagatggacctgagcaacaacctgttgcagggcagcatcccgccggagctcgcggggctcaagagcctcacgctgctggacctccgcaacaacagcctcaccggcgggctgccgcagttcgtgcagtgcatggcgtcgctgcaagacctgctgctgtcgaacaacccgcagctgggcggcgcgctgccgcagtcgggttgggagacgctggcagcgaacctggccacgctggacctgtccaacgtcggcctcgtgggcgccataccagcgtcgatggcgaagctgacggggctccggttcctggcgctggaccacaaccgcctgacgggcgccgtgccggccgagctcgaccagctgcccagcatcggcgcgctgtacctgaacggcaacaacctgacggggccgctgcagttctcgccggggttctaccagcggatgggccggcggttcgcgtcgtgggacaaccccgggctgtgctacaacatcgcggccgtggacgcggcgcacgcgccgtcgggcgtggtcgtgtgcaaggacctgcaggagcccagcgtggcgcgggacggggacggggaggaagagggcgggaggaaacccgaggcgagctccagcctcgtggcctcgtcgtcgtccggtgggtttgttggcagtgtcggtgggcactggtacctggtggtggttcagggaatggcggctgcggttcttggattgttgtcccaactactatag

SEQ ID NO: 262 - protein, 516 aa, Sorghum bicolor
MRPAGGCCRRGGGLLVLGLALSLSAALLLRGCAGQQAEDDGSADAPAAAAAAATAPMEEKERRALYAAIESFVGKGWNGSGLYPDPCGWSPIQGVSCDLFNGLWYPTVMSIGPVLDNSLQCAPDAKFSPQLFDLRRLRTLSFYSCFPASNPTAIPTAGWEKLSGTLETLEFRTNPGLTGGIPPSLGRLASLQSLVLVENNLTGPVPAELGALSRLRRLVLSGNGLSGPIPATLGNNNDRRHRHAHDDELLIVDLSRNSLTGSLPSSLGGLTGLLKMDLSNNLLQGSIPPELAGLKSLTLLDLRNNSLTGGLPQFVQCMASLQDLLLSNNPQLGGALPQSGWETLAANLATLDLSNVGLVGAIPASMAKLTGLRFLALDHNRLTGAVPAELDQLPSIGALYLNGNNLTGPLQFSPGFYQRMGRRFASWDNPGLCYNIAAVDAAHAPSGVVVCKDLQEPSVARDGDGEEEGGRKPEASSSLVASSSSGGFVGSVGGHWYLVVVQGMAAAVLGLLSQLL

SEQ ID NO: 263 - DNA, 1317 bp, Sorghum bicolor
atgtcggtggcggtgtgccgtggcccagctgttccggcgttcgaggcgccctgctggctgcgccctgtcgagccgtacaagcagccggcggaggtcgtcgtcgacgaccggcctgcgcaggtggacgtatggaacgccatccaggccgacgtcgacaaggtggcgccgaaggcgtcgtccaagccgtacgtgcacccgctcgtgcgccggtcgtcgagcctgatgagccagaagagcctcgaggtctgcacggagagcctcggcaacgagaccggctctggcgacttcacgtcgtccctggacatggccagcctattcgactcgccgctgccggcgtcggcggcggctgccacaccagtggaggagtccttctggcagcacgacgcggctcgctgctacgaggagcagcagtgggaaagcaaggatctcgcggccgtgaactaccactgctgggccgggaagcggtcaccgcgccgcgcgttcccgccgccgctgccgtccatgtcgcgcaccgacgggccgtgtctgcagatgcgcgcgcgccgccaggacgggcgcctcgtggtcgaggccgtggcggtgaggccgcgcgggtacctccacgcgaagcgccagggcggacgcctccgcctctccttcgtcgagtgctctgctcgcgaccagagcgcggcgagcaagatcaccgaggccgcagcagaggcgccgtacttccgcaccgtggagcccaggaacgtgcaggaagaagaggcggccgtggaaatggaggacgacaacgaggtgatggaggaggaggaggtggaggtggtggacaggggcaccgtcgtcgaggtcaaggtgagcacgcagccgcagacgcacaccgcggccaaggtgcaccgctcgacgctcgtgatcaacaagttcgtcggcagtacgccgctgtcagttgaccaaccccggtgcgacgccgacacgaacacgacactgcccgaggcggacacctgcaacgagacggcggcacaggcacaggcacagtcaccacgcccgaccctgcggcgggtgccgtcgtccacgacgacgctggcggccgcggtcgccgtggcctcgacggggaccgacgacgtcccgccggctccggaggaggacgacgacgagtgcggcgggctgcaccttcccggcgcctccgccggcgccgcggccgagaccaagcagctgctgctgtcgttcacgtcgcggaggggggacaagcaggacctgctgcagagcgtgcggcggtgccggcagctgcggcagaagaagctcttcatcctggagccctactgcattgccacctcctga

SEQ ID NO: 264 - protein, 438 aa, Sorghum bicolor
MSVAVCRGPAVPAFEAPCWLRPVEPYKQPAEVVVDDRPAQVDVWNAIQADVDKVAPKASSKPYVHPLVRRSSSLMSQKSLEVCTESLGNETGSGDFTSSLDMASLFDSPLPASAAAATPVEESFWQHDAARCYEEQQWESKDLAAVNYHCWAGKRSPRRAFPPPLPSMSRTDGPCLQMRARRQDGRLVVEAVAVRPRGYLHAKRQGGRLRLSFVECSARDQSAASKITEAAAEAPYFRTVEPRNVQEEEAAVEMEDDNEVMEEEEVEVVDRGTVVEVKVSTQPQTHTAAKVHRSTLVINKFVGSTPLSVDQPRCDADTNTTLPEADTCNETAAQAQAQSPRPTLRRVPSSTTTLAAAVAVASTGTDDVPPAPEEDDDECGGLHLPGASAGAAAETKQLLLSFTSRRGDKQDLLQSVRRCRQLRQKKLFILEPYCIATS

SEQ ID NO: 265 - DNA, 1017 bp, Sorghum bicolor
atgatgctgagcgggcacggcggcgggaggcgcctgttcacggcgtcgcagtggcaggagcttgagcaccaggcgctcatcttcaagtacatggcctccggcgcgcccgtgccgcacgacctcgtcctgccgctccgcctcgccaccggcgtcgacaccgcgccttccctcgccttcccgcctcagccttcgccgtcgctggcgtactggggctgctacggcgccggggcgccgttcggccgcaaggcggaggacccggagccggggcggtgccggcggacggacggcaagaagtggcggtgctccagggaggcccacggcgagtccaagtactgcgagaagcacatccaccgcgggaagagccgttcaagaaagcctgtggaagtgacctcccccgccgccgcggcgtaccgcccgtccgcgctctccatctcgccgcctcgcgcggccgacgcgccgccgccgagcctagcccacccgcaccagcatctccgccacggcgccgcctccgcagcagctgctgcccgcggcgccccgggtcaggccaccgctggcgcgctccagctccacctcgacgcgagcctgcacgcggcgtcgccgccgccgtcctaccacaggtatgctcactcccacgctcactacacaccgccgccatcgctcttcccgggcggcggcggtggctacgactacgggcaatccaaggagcttcgggaagcggagctcaggcggcggcacttccacgcgctcggggccgacctgagcctcgacaagccgctggccgccaccgccgccggctccgcggccgcggagaagccactgcggcgtttcttcgacgagtggccgcgggagagcggcgacacgaggccgtcgtcgtgggcgggggcggaggacgcgacgcagctctccatctccatccccgcggcctcgccctccgacctcgctgcctccgctgccgcgcgataccacaacggtgagccgtccggcgagcgaaagactccacttttactggttccttag

SEQ ID NO: 266 - protein, 338 aa, Sorghum bicolor
MMLSGHGGGRRLFTASQWQELEHQALIFKYMASGAPVPHDLVLPLRLATGVDTAPSLAFPPQPSPSLAYWGCYGAGAPFGRKAEDPEPGRCRRTDGKKWRCSREAHGESKYCEKHIHRGKSRSRKPVEVTSPAAAAYRPSALSISPPRAADAPPPSLAHPHQHLRHGAASAAAAARGAPGQATAGALQLHLDASLHAASPPPSYHRYAHSHAHYTPPPSLFPGGGGGYDYGQSKELREAELRRRHFHALGADLSLDKPLAATAAGSAAAEKPLRRFFDEWPRESGDTRPSSWAGAEDATQLSISIPAASPSDLAASAAARYHNGEPSGERKTPLLLVP

SEQ ID NO: 267 - DNA, 1047 bp, Sorghum bicolor
atggatctggtgaacggcgtgctcaactgggtggggacgccggccatggtggcctgcctgctgctcttctacccgccctactacctcttcaagacctgctactccttcctctcctggctcttccccgaggacctcgccggcaaggtcgtgctcatcaccggcgcttcctccggcatcggcgagcaactggcttaccagtacgctctgaaacgggcctccctcgccctcgtcgcaagaagggagtcgagcctccgacatgtcgccgaccgagcactcgagctcggcgcgcgcgacgtcatcgtcctcccgggcgacgtctctgcccccgatgactgcaacagatttgttcagaccgcgatcagtcactacgaccgattggaccatctcgtgtgcaatgccggcatcgcgagcgtcggcgcgtttcaggagattccagatgtcacaaaatacagctctcagcttgatgtcaatttctggggttctgttcaaacgacgttcgctgccctgcctcatctgaagagaagccgaggaaggattgtggtgactgcatctgcaaccggatggaacccagttcctagaatgagcttctataatgctgccaatgctgccctcataaacttcttcgagacgctgcggactgagctaggaaaccaagttgggatcacggtggtgacgcccgggtggatcgagtccgagatgtcgaaagggaagtacctcaaggagcatggcgaagtggaggttgatcaagaaatgcgcgacgctcagatcggtctgttcccggtggagtacgccaagaactgcgccaaggccatggtgcaggcggcgcagcaaggcgagcgatacctcaccgtgccggcgtggttcaggccgatgtacctgtggcgggtgttcgcgccggaggtcgtcgaggcctgctaccgcctcctgtacatgcacggccatggcgccaggcaggccgacacggcgagcaggacgatggcggactccggtggtaagcagctgctgtacccgacctcgctgcgctctgaggagatcaagagtgactga

SEQ ID NO: 268 - protein, 348 aa, Sorghum bicolor
MDLVNGVLNWVGTPAMVACLLLFYPPYYLFKTCYSFLSWLFPEDLAGKVVLITGASSGIGEQLAYQYALKRASLALVARRESSLRHVADRALELGARDVIVLPGDVSAPDDCNRFVQTAISHYDRLDHLVCNAGIASVGAFQEIPDVTKYSSQLDVNFWGSVQTTFAALPHLKRSRGRIVVTASATGWNPVPRMSFYNAANAALINFFETLRTELGNQVGITVVTPGWIESEMSKGKYLKEHGEVEVDQEMRDAQIGLFPVEYAKNCAKAMVQAAQQGERYLTVPAWFRPMYLWRVFAPEVVEACYRLLYMHGHGARQADTASRTMADSGGKQLLYPTSLRSEEIKSD

SEQ ID NO: 269 - DNA, 1119 bp, Sorghum bicolor
atggggaagggagcgcaagggagcgacgcggcggtggcggcggcggcggcggctggggctggcgaggtggaggagaacatggcggcgtggctggtggccaagaacaccctcaagatcatgcccttccagctcccgccccttggccctcatgatgtccgcgtgcgcatgaaggcagtggggatttgcggcagcgatgtgcactacctcagggagatgcgcatcgcgcacttcgtggtgaaggagccgatggtgatcggacacgagtgcgcgggcgtgatcgaggaggtgggcgccggcgtgacgcacctcaccgtgggtgaccgcgtggcgctggagcccggggtgagctgctggcgctgccgccactgcaagggcgggcggtacaacctgtgcccggacatgaagttcttcgccacgccgccgttccacggctcgctggcgaaccaggtggtgcaccctggcgacctgtgcttcaagctccccgacggcgtttccctggaggaaggcgccatgtgcgagccgctgagcgtgggcgtgcacgcgtgccgccgcgccggtgtcgggccggagacgggcgtcctcgtcgtgggcgccggacccatcgggctcgtcaccctgctggcggcgcgcgcgttcggcgcgccgaaagtggtgatcgtggacgtggacgaccaccgcctgtccgtcgccacgtccctcggcgccgacgcgacggtcaaggtgtcgacccgcgccgaggacctggagtcggaggtggagcggatccaggcggcgatggggtcggagatcgacgtgagcctggactgcgccgggttcagcaagaccatgtcgacggcgctggaggcgacgcgccccggcgggaaggtgtgcctcgtcgggatggggcacaacgagatgacgctgccgatgacgtcggcggcggcgcgggaggtggacgtggtgggcgtgttcaggtacaaggacacctggccgctctgcatcgacttcctgcgcaccgggaaagtggacgtcaagccgctcatcacccaccgcttcggcttctcgcagcgcgacgtcgaggaggccttcgaggtcagcgcccgcggccgcgacgccatcaaggtcatgttcaacctctag

SEQ ID NO: 270 - protein, 372 aa, Sorghum bicolor
MGKGAQGSDAAVAAAAAAGAGEVEENMAAWLVAKNTLKIMPFQLPPLGPHDVRVRMKAVGICGSDVHYLREMRIAHFVVKEPMVIGHECAGVIEEVGAGVTHLTVGDRVALEPGVSCWRCRHCKGGRYNLCPDMKFFATPPFHGSLANQVVHPGDLCFKLPDGVSLEEGAMCEPLSVGVHACRRAGVGPETGVLVVGAGPIGLVTLLAARAFGAPKVVIVDVDDHRLSVATSLGADATVKVSTRAEDLESEVERIQAAMGSEIDVSLDCAGFSKTMSTALEATRPGGKVCLVGMGHNEMTLPMTSAAAREVDVVGVFRYKDTWPLCIDFLRTGKVDVKPLITHRFGFSQRDVEEAFEVSARGRDAIKVMFNL

SEQ ID NO: 271 - DNA, 1560 bp, Sorghum bicolor
atggctcgcggcgacggcgagctggagctgtcggtgggggtccgcggcgccggcggcggggccgcggcggcggaccacgtggcgccgatcagcctcggcaggctcatcctcgccggcatggtcgccggcggcgtgcagtacggctgggcgctgcagctctccctcctgacgccctacgtgcagactctggggctttcacatgccctcacttcattcatgtggctatgcggtcctattgctggcttagtggttcaaccgttggttggcctgtacagtgataggtgtacagcaagatggggaagacggaggccattcattctgacaggatgtgtgctcatctgcattgctgtcattgttgttggcttttcgtcagacatcggagctgcgctaggggacacaaaggaacattgcagtctctatcatggtcctcgctggcatgctgcaattgtatatgttctggggttttggctccttgacttctccaacaatactgtgcaaggtccagcacgtgctatgatggctgatttgtgcggtcatcatgggcctagtgcagctaattcaatcttctgttcttggatggcgctgggaaacatcctaggttattcctctggttccacaaacaattggcacaagtggtttcccttcctcaaaacaaatgcctgttgtgaagcctgtgcaaacctgaaaggtgcatttctggtggctgtggtgttcctagtcatatgcttggctataaccctcgtcttcgccaaggaagtaccatacagaggaaacgagaacctcccaacaaaagcaaacggcgaggttgaagctgaacctaccgggccacttgctgtgctcaagggcttcaagaacttgccccgcgggatgccatccgttcttctcgtaactggcctcacctggctctcgtggttcccgttcatcctctacgacaccgactggatgggccgtgagatctaccacggcgacccaaagggcaccaatgctcagatctcggcattcaacgaaggtgtcagaataggcgcattcgggctgcttctcaactcgattgttctaggattcagctcgttcctgatcgagcccatgtgccggaaggtcgggccgagggttgtgtgggtgacgagcaacttcatggtgtgcatcgccatggcggccaccgcgctgatcagcttctggtcgctcaaggactaccacggatacgtgcagaacgccatcaccgccagcacgagcatcaaggccgtctgcctcgtcctcttcgccttcctgggtgtccctctcgccatcctgtacagcgtcccgttcgcggtgacggcgcagctagcggccagcatgggcggcgggcaggggctgtgcaccggcgtcctcaacatctccatcgttatcccccaggtgatcatcgcggtgggcgcaggcccgtgggacgcgctgttcggcaagggcaacatcccggcgttcggcgtggcgtcggggttcgccctcatcggcggcgtcgtgggcatgttcctgctgcccaggatctccaagcgccagttcagggccgtcagcgcgggcggccactga

SEQ ID NO: 272 - protein, 519 aa, Sorghum bicolor
MARGDGELELSVGVRGAGGGAAAADHVAPISLGRLILAGMVAGGVQYGWALQLSLLTPYVQTLGLSHALTSFMWLCGPIAGLVVQPLVGLYSDRCTARWGRRRPFILTGCVLICIAVIVVGFSSDIGAALGDTKEHCSLYHGPRWHAAIVYVLGFWLLDFSNNTVQGPARAMMADLCGHHGPSAANSIFCSWMALGNILGYSSGSTNNWHKWFPFLKTNACCEACANLKGAFLVAVVFLVICLAITLVFAKEVPYRGNENLPTKANGEVEAEPTGPLAVLKGFKNLPRGMPSVLLVTGLTWLSWFPFILYDTDWMGREIYHGDPKGTNAQISAFNEGVRIGAFGLLLNSIVLGFSSFLIEPMCRKVGPRVVWVTSNFMVCIAMAATALISFWSLKDYHGYVQNAITASTSIKAVCLVLFAFLGVPLAILYSVPFAVTAQLAASMGGGQGLCTGVLNISIVIPQVIIAVGAGPWDALFGKGNIPAFGVASGFALIGGVVGMFLLPRISKRQFRAVSAGGH

SEQ ID NO: 273 - DNA, 549 bp, Sorghum bicolor
ttggcagggctgtaccggtaccgtctaggggacgtggtgaaggtggccgggttctacaactcgacgccgaagctcaagttcgtgtgtcgacggaacctgatgctgagcatcaacatcgacaagaacagcgagcaggatctccagctcgccgtcgacagcgccgccaagatcctggcggcggagaagctggaggtggtggactacagcagccacgcggatgtgtcgcgcgacccgggccactacgtcgtgttctgggagctcaacgccgacggcaacgacgacgtgctgcagagctgctgcgacgagctggaccgcgccttcacagaccccggctacgtgagctcacggaagaccagcggcattggcccgctggagctcagggtgctgcagcggggaaccttccagaaggtgctccgccactacctctccctcggcgcccccgtcagccagttcaagtcgccgcggtgtgtcggacggtccaataactccggcgtcctccagatcctctccgccaacgtcgtcaaggtgttcttcagcaccgcctacgac

SEQ ID NO: 274 - protein, 183 aa, Sorghum bicolor
LAGLYRYRLGDVVKVAGFYNSTPKLKFVCRRNLMLSINIDKNSEQDLQLAVDSAAKILAAEKLEVVDYSSHADVSRDPGHYVVFWELNADGNDDVLQSCCDELDRAFTDPGYVSSRKTSGIGPLELRVLQRGTFQKVLRHYLSLGAPVSQFKSPRCVGRSNNSGVLQILSANVVKVFFSTAYD

SEQ ID NO: 275 - DNA, 1182 bp, Sorghum bicolor
atggcctcccccaaccccgaggcggccgcggggctgcagaccgtggctgtggcggcggggggaggggagggcggctcgtcctcatcgctcggcgccgttgcgggggcggcggctgtgtcgtcgtccggggagctagtgcccaggaggtccttggcggtgcggaaggagcgcgtgtgcacggccaaggagcgcatcagccgcatgcctccctgtgccgcggggaagcggagctccatctaccgcggggtcacccggcataggtggacaggtcgatatgaggctcacctttgggacaaaagcacttggaatcagaatcagaacaaaaaggggaaacaaggcgcatatgatgacgaagaggctgcagcaagggcctatgaccttgctgcattaaaatactggggagctggaacacaaataaattttccagtctctgactatgcaagagaccttgaagagatgcaaatgatctccaaggaggactatctcgtgtctcttaggaggcaacttcataattccagatgggatacctctttgggacttggcaatgactacatgagccttagttgtggcaaggatatcatgttggatgggaaatttgcaggaagctttgggttagagaggaaaattgatcttacaaattacatccggtggtggctaccaaagaagacaaggcagtcagatacatctaaaacagaagaaattgctgatgaaattcgagctattgaaagttcaatgcaacagactgaaccctataagttgccttctcttggcctcggctcgccatcaaagccctcttcagtgggtttatcagcatgcagcatattatctcagtctgatgcctttaaaagcttcttggagaagtctacaaaattatctgaagaatgtactcttagcaaagaaattgtagaaggaaagactgttgcctcagtacctgctactggatatgatacaggggcaattaatattaacatgaatgagttgctagtgcaaagatctacgtattcgatggcccctgttatgcctacaccaatgaagactacctggagccctgctgatccttccgtggatccacttttttggagcaactttgttttgccatcaagtcaacctgttacaatggcgacaataacaacaacaacgaatgaggtaagttcaagtgatccattccagagccaagagtga

SEQ ID NO: 276 - protein, 393 aa, Sorghum bicolor
MASPNPEAAAGLQTVAVAAGGGEGGSSSSLGAVAGAAAVSSSGELVPRRSLAVRKERVCTAKERISRMPPCAAGKRSSIYRGVTRHRWTGRYEAHLWDKSTWNQNQNKKGKQGAYDDEEAAARAYDLAALKYWGAGTQINFPVSDYARDLEEMQMISKEDYLVSLRRQLHNSRWDTSLGLGNDYMSLSCGKDIMLDGKFAGSFGLERKIDLTNYIRWWLPKKTRQSDTSKTEEIADEIRAIESSMQQTEPYKLPSLGLGSPSKPSSVGLSACSILSQSDAFKSFLEKSTKLSEECTLSKEIVEGKTVASVPATGYDTGAININMNELLVQRSTYSMAPVMPTPMKTTWSPADPSVDPLFWSNFVLPSSQPVTMATITTTTNEVSSSDPFQSQE

SEQ ID NO: 277 - DNA, 1005 bp, Sorghum bicolor
atggggaagcgcgtgtgggcggcggcgttcgcggcgctggccgtggtgatcgcgctcggcgtgcccgccggccgcgtcgctgaggcgcgcaccttggagaaggacggcctgctgggcggaggcttcggtgctggaggcggaggtggtttcggtgcgggtgcgggtgcgggccttggccatggcagtggtcttgggggcggatttggaggaggtaaaggcggcggtggaggccttggcggggggatcggacatggcggcggccttggtggtggcttcggtggcgggaaaggtggcgggctaggtggaggaggaggccttggtggtggccttggaggtggctttggaggcgggaaaggtggcggtcttggtggaggtggtggcctcggtggtggaggtggccttggtggtggcggcggccttggtggtggtgcaagcggaggcggcggccttgggggcggtgctggtggaggcagtggtcttagtggcggcgctggaggaggtgctggcggtggtcttggcggcggcgcgggaggtggtgctggcggtggtcttggcggcggcgctggaggaggtgctggcggtggtcttggcggcggtgcgggaggtggtgctggcggtggtcttggcggcggcgcgggaggtggtgctggcggtggtcttggcggcggcgcgggaggtggtgccggagctggcggcggtttcggaggaggcaaaggaggaggcttcggtggtggcgttggagggggcggcggcgcaggcggtggtgccggtggcggtttcggaggaggcaaaggcggcgggtttggcggcggcaagggaggcggcttcggcggaggcgcaggtggtggcaagggcggtggcttcggcggcggatcaggcggaggctttggtggtggcggcggcgcgggcggtggtttcggcggaggagctggtggtggtgccggtggcgggggcggcttcggcggaggcgctggaggcggcggcggcatcggtggcggactttga

SEQ ID NO: 278 - protein, 334 aa, Sorghum bicolor
MGKRVWAAAFAALAVVIALGVPAGRVAEARTLEKDGLLGGGFGAGGGGGFGAGAGAGLGHGSGLGGGFGGGKGGGGGLGGGIGHGGGLGGGFGGGKGGGLGGGGGLGGGLGGGFGGGKGGGLGGGGGLGGGGGLGGGGGLGGGASGGGGLGGGAGGGSGLSGGAGGGAGGGLGGGAGGGAGGGLGGGAGGGAGGGLGGGAGGGAGGGLGGGAGGGAGGGLGGGAGGGAGAGGGFGGGKGGGFGGGVGGGGGAGGGAGGGFGGGKGGGFGGGKGGGFGGGAGGGKGGGFGGGSGGGFGGGGGAGGGFGGGAGGGAGGGGGFGGGAGGGGGIGGGL

SEQ ID NO: 279 - DNA, 699 bp, Sorghum bicolor
atggatccatatcactaccagactatgtatgacccacgcggcttccccatcatccacccgcagccgccgtacctccaccacccggtggcggtggccggcgccctcagcgacagcagggtgcgcggcggcggcggaggcggtggcgtgcggcggcgtcctggtgccaagctctccacggacccgcagagcgtggcggcgcgcgagcggcggcaccgcatcagcgaccgcttccgcgtgctgcgcagcctcgtccccggcggcagcaagatggacacggtgtccatgctcgagcaggccatccattacgtcaagtttctgaaggcgcagatcagcctgcaccaggccgcgctgatgcagcacgaggaagggtgccatgctgagctagccgccgcctactccgcggcggcggcggcggtggctggtgacgacgaggtgacgctcgcgtcccacggtcgtaccggcgcatgcgatgaggtgatgcagctccagcttcaggtgccgggggaggaagctttgagttatggtgttgttgctgcccatcagccgtacgggctcgatcccaggcatcagctgagtggtgggcacgagctgcctccgttgcctgcttcttgcatcttcgtcgaggagcctgcagacgcatgctactctgtgtgtgacctcgacgacggggagactggtctgcccgccggctcttactag

SEQ ID NO: 280 - protein, 232 aa, Sorghum bicolor
MDPYHYQTMYDPRGFPIIHPQPPYLHHPVAVAGALSDSRVRGGGGGGGVRRRPGAKLSTDPQSVAARERRHRISDRFRVLRSLVPGGSKMDTVSMLEQAIHYVKFLKAQISLHQAALMQHEEGCHAELAAAYSAAAAAVAGDDEVTLASHGRTGACDEVMQLQLQVPGEEALSYGVVAAHQPYGLDPRHQLSGGHELPPLPASCIFVEEPADACYSVCDLDDGETGLPAGSY

SEQ ID NO: 281 - DNA, 1584 bp, Sorghum bicolor
atggtcgccgcggcgcgcgtcgccccggcgctcgggaacaagcctgggccggggcaggggctcgcgatgctggaggttgtggtggcgccgccgccaggaccagcggcgggggaggagcggctgtcggacgctgacacgacggcgtcgtcgacggccgcgcccaactccagcctcagctcggccagtagcgccgccagcctgccgcgctgctccagcctgtctcgcctctccttcgactgctccccgtccgccgccctgtccctggctgcgtctgctgctccggcctcctcctcctcgccagcgccggcgcggccgcaccggtccggagacgcggcgtgggcggcgatccgggcggcgtcgacgtcggccgcggcgccgctggggccacgggacttcaggctgctgcgccggatcggcggcggcgacatcggcaccgtgtacctgtgccgcctccgggagtcggaggcggacgcggggcggccgtgcctgttcgcgatgaaggtggtggaccggcgcgtggtggctaagaagaagaagctggagcgcgcggcggcggagaagcggatcctgcgcgttctggaccacccgttcctgcccacgctcttcgccgacttcgatgccgcgccgcacttctcctgcgtcgtcgtggagttctgccccggcggcgacctccactcgctccgccaccgcatgcccaaccgccgcttccctctcgcatcagctcggttctacgcggcggaggtgttgctggcgctggagtacctgcacatgatgggcatcgtgtaccgcgacctgaagccggagaacgtgctgatccgcgccgacggccacatcatgctcaccgacttcgacctgtctctccagtccacctccacgccgtcgctggagtcgtcctccgcctcttcctccgacgacgattcatcgacctccgtgtcctgcttcccggaccacctgttccgcttcacgcttcgtcgccgcggtggcggcagcagtagcagccggcgcgcgctcctccgccgcgccgcctcctcggcgcggcagccgctggtggtggcggagccagttgaggcgcggtcatgctcgttcgtaggcacgcacgagtacgtggcgcccgaggtggcccggggcggtccccacggcgcggccgtggactggtgggcgctgggcgtgttcctctacgagctcctgcacgggcgcaccccgttcgccggcgccgacaacgaggccacgctccgcaacatcgcgcgccgaccgctctccttcccctcgcctgccgtcggtggcgggtccagcggtgccgacgccgacgcgcgggacctgatcgaacgcctcctcgccaaggacccgcggcagcggctagggtcccgtcgcggcgccgccgacgtgaaggcgcacccgttcttccgcggtctcaacttcgcgctgctccggtcctcccgcccgcccgtcgtacccggcgcgtcccgctccccgccgctgcaccgctcgcagtcctgcagcgcggcgacagcgtctgcgacgcgcaggagggcgtcgaagccgccgccgcagccgcagccggacgctcggttcgacctgttctga

SEQ ID NO: 282 - protein, 527 aa, Sorghum bicolor
MVAAARVAPALGNKPGPGQGLAMLEVVVAPPPGPAAGEERLSDADTTASSTAAPNSSLSSASSAASLPRCSSLSRLSFDCSPSAALSLAASAAPASSSSPAPARPHRSGDAAWAAIRAASTSAAAPLGPRDFRLLRRIGGGDIGTVYLCRLRESEADAGRPCLFAMKVVDRRVVAKKKKLERAAAEKRILRVLDHPFLPTLFADFDAAPHFSCVVVEFCPGGDLHSLRHRMPNRRFPLASARFYAAEVLLALEYLHMMGIVYRDLKPENVLIRADGHIMLTDFDLSLQSTSTPSLESSSASSSDDDSSTSVSCFPDHLFRFTLRRRGGGSSSSRRALLRRAASSARQPLVVAEPVEARSCSFVGTHEYVAPEVARGGPHGAAVDWWALGVFLYELLHGRTPFAGADNEATLRNIARRPLSFPSPAVGGGSSGADADARDLIERLLAKDPRQRLGSRRGAADVKAHPFFRGLNFALLRSSRPPVVPGASRSPPLHRSQSCSAATASATRRRASKPPPQPQPDARFDLF

SEQ ID NO: 283 - DNA, 1317 bp, Sorghum bicolor
atgggcgtcaccgctcgagctcacgatctgaagcacctgcgccaccaccagcagcagcaggaggaggaggcgcgcgtgcacgacgccggcggcgcgtcgctcgcggcgatgtacctctacggcgacgtgctcgagtccgtggtggagcgtgtccccgcggcagacctggccgccacggcgcaggtgtcgcgggagtggctccgcgcggtgcgcgccgcgctgcgccgccgcccgcgtcggctgccctggctcgtcgtgcacctccaggcccgcggcggcggcgggggcggcctccggtgcgccgcggcgtacgacccgtgctcgggcgcctggctcgccgtgccggcgccaacgctgcgccacgccacgccgtcgcacgtccgcctcctgcgcggcgcgcgcggggaccgcgtctgcgcgctctcgctctcgggcctcgccgtcgccgccgacccgctcggggcgacggccgggtgcgtcgcgccgctggacgcccccgccgtgtggcgcgtcgacccggtgttcgcggccgtgggcgaccgcgtcgtcgcgctcggcggcgcgtgccgcctggcgctggccgacggcggggacgccgccgcggtcgaggtccacgaggccggcggcgggtggaccgcctgcgacccgatgccggacccgctgagtgactccgccgcggcgacgtggctctccgcggccgccacggacacgcgcgtgtacctcgtggagaggaccaccgggtgggcgagctggttcgacccggcgaaccggcggtggggccccacccgtcgcctcggtcccgaccccgccgtcaccacgtgggccgtcgcgcccggccgcgtcgtcggcgcggaggagcgcctcgttctgttcggggctaagcgggcggacaaggaggcggagtgcacagtcgtcgtgcaggcatgggaggtggacggcgacactctggagcaggccccctccgcatccggcgacgcgatgccggcggagctgtccgagaggctgtttcctcgtgacgacactgattacgacgacggcgaagaggaactggaggacagggcgttgtcgatcggggtgtgcggcaacgcggcgggcgggtacgtgtacaatgcggccgagccggcgaacggcgcggtgctctacgagctgtgggaggaggggaaggccaagggaagcgccaccgccgtggcgcggtgggactgggtgccctgcgcaccagccgtgcaggcccagccgctggcccgtgccatcctggcctgctcgccggtggggctggatgagctggcgttggccgttggtgcaaggagcccacgctga

SEQ ID NO: 284 - protein, 438 aa, Sorghum bicolor
MGVTARAHDLKHLRHHQQQQEEEARVHDAGGASLAAMYLYGDVLESVVERVPAADLAATAQVSREWLRAVRAALRRRPRRLPWLVVHLQARGGGGGGLRCAAAYDPCSGAWLAVPAPTLRHATPSHVRLLRGARGDRVCALSLSGLAVAADPLGATAGCVAPLDAPAVWRVDPVFAAVGDRVVALGGACRLALADGGDAAAVEVHEAGGGWTACDPMPDPLSDSAAATWLSAAATDTRVYLVERTTGWASWFDPANRRWGPTRRLGPDPAVTTWAVAPGRVVGAEERLVLFGAKRADKEAECTVVVQAWEVDGDTLEQAPSASGDAMPAELSERLFPRDDTDYDDGEEELEDRALSIGVCGNAAGGYVYNAAEPANGAVLYELWEEGKAKGSATAVARWDWVPCAPAVQAQPLARAILACSPVGLDELALAVGARSPR

SEQ ID NO: 285 - DNA, 1491 bp, Sorghum bicolor
atgttcatcgagagcttccgcgtcgagagcccccacgtgcggtacggcccgacggagatcgagtcggagtaccggtacgacacgacggagctggtgcacgagggcaaggacggcgcctcccgctgggtcgtccgccccaagtccgtcaagtacaacttccggaccagcaccgccgtccccaaactcggggtgatgcttgtggggtggggaggcaacaacgggtccacgctgacagctggggtcattgccaacagggaggggatctcatgggcgaccaaggacaaggtgcagcaagccaactacttcggctccctcacccaggcctccaccatcagagttggcagctacaacggggaggagatctatgcgccattcaagagcctcctgcccatggtgaacccagacgaccttgtgttcggaggctgggacatcagcaacatgaacctggctgattccatgaccagggccaaggtgctggacattgacctgcagaagcagctcaggccctacatggagtccatggtgccacttcccggcatctatgacccagacttcatcgccgctaaccagggctctcgcgccaacaatgtcatcaagggtaccaagaaagaacaggtggagcagatcatcaaggatatcagggaatttaaggagaagaacaaagtggacaagatagttgtgctgtggactgcaaacactgaaaggtacagcaatgtatgcactggtctcaacgacacaatggagaatctgctggcgtctgtggacaagaacgaggcagagatctcgccatcaacactatatgccattgcctgtgtcatggagggggtgccgttcattaatgggagccctcagaacacctttgtgccagggctgattgatcttgctattaagaacaactgcttgattggtggtgacgacttcaagagtggacagaccaagatgaaatctgtcttggttgatttccttgttggtgctggaataaagcccacctcaattgtgagctacaaccaccttggaaacaacgatggcatgaacctgtctgcccctcaaacattcagatccaaggagatctccaagagcaatgtggtggatgacatggtctcaagtaatgctatcctctatgagcctggcgagcatcctgatcatgttgttgtcatcaagtatgtgccgtatgtgggagacagtaagagggctatggacgagtacacctccgagatcttcatgggtggcaagaacaccatcgtgctgcacaacacctgtgaggactcactcctcgccgcacctatcatccttgatctggtgctcctggctgagctcagcaccaggatccagctaaaagctgagggagaggacaagttccactccttccacccggtggccaccatcctgagctacctcaccaaggcacccctgagggcgatgctggagaacatcatgagggcctgcgttggcctggccccagagaacaacatgatcctggagtacaagtga

SEQ ID NO: 286 - protein, 510 aa, Sorghum bicolor
MFIESFRVESPHVRYGPTEIESEYRYDTTELVHEGKDGASRWVVRPKSVKYNFRTSTAVPKLGVMLVGWGGNNGSTLTAGVIANREGISWATKDKVQQANYFGSLTQASTIRVGSYNGEEIYAPFKSLLPMVNPDDLVFGGWDISNMNLADSMTRAKVLDIDLQKQLRPYMESMVPLPGIYDPDFIAANQGSRANNVIKGTKKEQVEQIIKDIREFKEKNKVDKIVVLWTANTERYSNVCTGLNDTMENLLASVDKNEAEISPSTLYAIACVMEGVPFINGSPQNTFVPGLIDLAIKNNCLIGGDDFKSGQTKMKSVLVDFLVGAGIKPTSIVSYNHLGNNDGMNLSAPQTFRSKEISKSNVVDDMVSSNAILYEPGEHPDHVVVIKYVPYVGDSKRAMDEYTSEIFMGGKNTIVLHNTCEDSLLAAPIILDLVLLAELSTRIQLKAEGEDKFHSFHPVATILSYLTKAPLVPPGTPVVNALAKQRAMLENIMRACVGLAPENNMILEYK

SEQ ID NO: 287 - DNA, 7401 bp, Sorghum bicolor
atgaagccctcgccgcacttcccggagatcgggaagaagcctaaagatttgattgctaaggaccacgcatttaacatcgcggcttacatctcgtctggagcggatgttattgctgctgcgctccgtaaacatgttgaggaggaagcccgagatcttagtggtgaagcttttttaaggtttatggatcagctctatgagcagatatctagtttactgcagagcaacgatgtcactgaaaatttactggctctccgtgctattgatgctttaattgatatgccctttggagaaggtgcttccaaagtttctaagtttgccagcttcttgagaaatgtatttgaagtgaagcgcgaccctgaaatcctagttccagcaagtgcagtgctgggtcatttagcaaaagcggggggagcaatgactgcagatgaagtggagcgacaaattaaaacagctttggggtggcttactggtgatcgagtggaatatcgccggtttgcagctgtactcattctcaaagagatggctgaaaatggatcaacagttttcaatgttcatgttcctgagtttgtagatgctatatgggtagcactgagagaccctaaacaggctgttcgtgaaaaagcagttgaagccttgcgtgcttgtctccatgttattgaaaaacgggagactcgttggcgtgtacaatggtattaccgcatgtgtgaagccgcacaagttggacttggcagaaatgcttctgttcatagtattcatggctcattattggctgttggagaattgctgaggaatacgggggagtttatgatgtctcgatacagagaagtggctgatattgtcctcgattatttaaagcatcgagatcagcttgttcgacgtagtataacatcacttcttcctcgaattgcccacttcctgcgtgacagatttgtgactaattacctgaagatttgcatggatcatatcttgtttgttctacgtacaccagacgagcgtgctagcggctttgttgcacttggagagatggctggggctctgggtgttgaacttgtgccttatttaccagcaattacttcacatttgcaagatgcgattgctcctcgcagaggaaggccatctcttgaggcaatttcttgtgtaggaagctttgcaaaagctatgggtcctgcaatggaacctcatattcgtagcggactgctagatgctatgttttttgctggtctttctgataaactggtagatgcacttgagtctataagcacaagcatcccgtctttactacccacaatacaggagcgtttattggattgtatatctcaagcactaccaaagtcatcaataaggccaggtgcttctgttggtcgagcaaacaggtcaaacagtttgcaacagtttgtggactctaatagtcctcttcttgtgcaacttgcactgtggactctagcaaacttcaactttaagggccatgaacttctggaattcgctagagagagtgtcatactttatttggaagatgaagatagcagtaccagaaaagctgcctcattgtgttgttgcaaattagttgcacactccctttctgcttcctcaacttcacagttcggttcaaataggacaaatcgtattggaggagctaagcgccgccggcttgtagaggagatagtggagaaacttcttatggctgcagttgctgatgctgatgttggtgttagaagttcggtcttcaaggcgttgtatcgaaatccagcttttgatgatttcttggcccaagctgacatcttgacttcaatttttgttgccttaaatgatgaggaatatgatgtcagagaattggcgatttctgttgctggccgattgtctgaaaagaatcctgcatatgtactgcctgcccttcgtcgctatcttatacagttgctcacatatcttgaccagagtatggatagcaagtgtagagaggaaagtgctagattattgggttgtttaattaggagctgtgcacggctcattcttccttacattgctccagttcacaaggcgcttgtgactagattgtgtgaaggaacgggaccaaatgctaataatgctcttgctgcgggagtgcttgccactgttggagaactggccaaagtgggtggctttgctatgaggcgatatcttcctgagctgatgcctgtagttgtggatgctcttttagatggaggtgctgttagtaaaagggaagtggctgtgtcaactctgggacaaattatccaaagcacaggctatgttatcgccccctataacgagtacccgccgttgcttggcttactcttgaagttgctgaatggtgaattggaatggtcaactagactagaagtgctaaaggttttagggattatgggtgcattggaccctcatgcacacaagcgaaatcagcataatctacctggtcaacatagagaggtcctacggccaacaatcgagactgcacagcatattgtttctatggaagagttaccgactgacttctggccatctttttcggcatctgaggactattactcaacagttgcaattagttccctcatgcgaattcttcgagatccttctctttcgagttatcaccaaatggtggttggctctcttatctttatttttaagtcaatgggccttggctgtgttccatacttaccaaaggttctccctgagctattgcgtgctgttcgcatgtgcgaggatggtggtttaaaagagttcataacctggaagcttggaacattgatatctattgtccgtcagcacatccggaaatatttacaagacatactttcccttatctctgagttgtggacttcctcattcagcttgcctgcaccaaatcggaccatacagggcccacagggttcaccggttcttcaccttgttgagcaattatgcttagctttaaatgatgagttcagaatttatttacttcacattctaccaagttgtatccaagtcttaggtgacgctgaacgttgcaatgattattactatgttcctggcatattacacacacttgaagtttttggtggaaatttggatgagcacatgcatttggttgctccagtgcttgttcgtttatttaaagtggagctggttgatatcagacggcgtgctattgttactttgactaatcttattcccaaggttcaggttggcactcatgtttcggctttagtgcatcatctgaagcttgtcttagatggcaacaatgatgatctgcggaaagatgctgcagaagcgctctgctgcctcgcacatgcccttggagaagactttactatcttcgtaccatcaatacgcaaaattcttgtgaagcaccatttacggtacagaaaatgggatgagattgaaaatcggttactgaggcgagagctactcatcactgaaaacttgtctgtacaaaagtacacacaatgtccacctgatgtcattagtgacccccttgatgattttgatggtacaccttctgagatagctgatgaaacacagcgacaagcaagaagtcatcaagtcaatgatgtccggttgcggagtgctggtgaggcttctcagaggagtactagggaagactgggctgaatggatgagacatttcagtattgcacttctcaaagagtcaccatctccagctttacgcacttgtgcaaggctagctcagcttcagccttctgttggccgcgagttgtttgctgcgggttttgcaagttgctgggcccaaatgagtgaatctgcccaggaacaacttgtgagaagtctcaagacagccttctcatctcaaaacattcctcctgaaattcttgctacactgctgaacttagcagagtttatggaacacgatgagaagccgcttcctattgatacaaggctgcttggtgcacttgctgagaagtgtcgagcatttgcaaaagccctccattataaagaaatggagtttgaagctgtgtgcaccaagaagatgggtgcaaatcctgttacggtggttgaatcccttattcatattaacaatcaactacaccagcatgaggcagctattggcatattgacttactcacagcagaatttggaagttcagttgaaagaatcatggtatgaaaaattgcaccgttgggatgaggcccttaaagcatacaccataaaatcatctcaagcacctggtcctttacaaaacttggatgctacattaggtcgaatgaggtgtctagcggctttggctcggtgggaagatttaagtgcattatgcagagagcaatggactggtgcagaaccatctgctcgattggaaatggctccaatggctgcaaatgctgcttggcatatgggtgagtgggaccatatggcagaatatgtttctcgcctggatgatggagatgaaaataagctccgtatgttgggtaacacaacggctagtggtgatggaagcagtaatggtgctttcttccgggcagttctttcagttcgttccaaaaagtatgatgaagctcggatatttgttgagcgagctcggcggtgtttagctacagaacttgcagcactggtacttgagagttatgagcgcgcttataataacatggtgcgtgttcaacaactttcaaaactggaagaggtgattgattactgcactcttcctgcggaaagccccatagctgacggacggagggaacttattcgcaatatgtggaatgaacgcattaaaggaacaaaacggaatgtggaggtctggcaagccctacttgcagtcagggagttggttcttcctcctaacgaagacagagacacctggataaaatttgctaaactttgctggaagaatggtcgtattagtcaggctagatctacattagtcaaacttttacagtttgatcctgaatcttctcctgaattgacactgtatcatgcacatccacaagtagccctggcttatctaaaataccagtatgcagttggtgatgagcttaaaagaagggatgcattttctagattgcaagagttgtctatgcagcttgctactgccatgggcaatttccctggaacatcagcaaaccatggtaccatgtcaaatgctggagttccactcattgctcgtgtttatttgacacttggtacctggaagaaggcgctatcacctgcattagatgatgattccattcaagaaattttgatttcttacaatcatgccacactaagtgcaaaggactgggggaaggcctggcacacatgggctttgttcaacacagaagtcatgtcacgctatactttccgaggtcgaccagatattgctggaaaatatgttgttgcagcagtaactgggtatttctattctattgcttgtcaatctactacgaaaggggttgatgatagcttacaggatatccttcgtctgttaactctttggttcaaccatggggctacctcagaagttcaaacagcgttgcagaaaggcttttcacttgtcaagattgagatgtggctggttgtgctgccccagataattgcaaggattcattcgaacaccagagtagttagagaactgatacaatctttgctagttcgaattggaaaggggcatccacaggctttgatgtatcctctcttggttgcctgcaaatcaataagtatattgagacaacgtgcagcgcaggaggtcgttgataagatccgccagcacagtggaggtcttgttgaccaggcacaacttgtatcaaaggaactgatacgggtagcaattttgtggcatgaaatgtggcatgaggctcttgaggaagctagcaggatgtactttggtgagcacaatattgaaggaatgcttgctgtacttgagccattgcatgcaatgcttgagaggggacctgagacaattaaagaaaatgccttcattcaggcttatggacatgaattactggaagctcatgaatgctgttcgaaatatcgggctacaggagaggatgctgagctaactaaggcctgggatttgtattaccatgttttcagaagaatcgacaaacagcttccaagtcttacaactctcgatttgcactctgtttcgcctgagctactcaaatgtcgaaagttggaacttgctgtgccaggaacttatgctgcagattcaccacttgtgacgattgagtattttgttccccaattgattgttataacatccaagcaaagaccaagaaaactgacaattcatggaagtgatggcaatgattatgcattcttgcttaaaggccatgaagatttgcgacaagatgaacgtgtaatgcagctttttggtctggtgaatactctcctagagaactcaaggaaaacatcagagaaggatttatcaatccaaagatatgctgttatacctttgtcgcctaacagtggtttaatcggatgggttccaaactgtgacacacttcatgctctgatccgtgaatacagagatgccaggaagattttcttgaatcaggagcacaaacttatgttggcttttgcacccgattatgatcacttacccctcattgcaaaggtggaagtgtttcagcatgctttgcaaaacaccgagggaaatgaccttgcaaaggttctgtggcttaagagtcgaacttcggaagtgtggcttgagcgccgcacaaactacgctagaagcctggctgttatgagcatggttgggtatttgcttggtttaggagatcgtcacccaagtaatcttatgttagatcgctatagtggaaaaatattacacattgactttggagattgctttgaggcttcaatgaatcgagaaaagttccctgaaaaagtaccattccgtttgactagaatgcttgtgaaagcaatggaagttagtggtattgagggtacattccgaacaacatgtgaaaatgtgatgcaagtccttcgcacaaacagagacagcgttatggccatgatggaggcatttgtacatgacccattaatcaattggcgtctgttcaatttcaatgaggttcctcaagtgtcaaactatggtaatgctcatgctcacacggttgtcagtagtgaagacgcagtggctaatcgagaactcatgcaacctcagcgaggagcacgtgagagggaactgctacaggccgtcaatcaacttggtgatgctaatgaagttctgaatgagcgtgctgtagctgtgatggcacggatgagtgacaagctaacagggcgtgacttctcttctgggtcagctttggctggagcaggtagctcgacccaacatggcagtgagcacttggcttcaggagatgcccgggatgcgcaacctgctctctcggtgaaggttcaggttcagaagctcatactccaagccacctcgcacgaaaatttgtgccaaaactatgtcgggtggtgtccgttctggtga

SEQ ID NO: 288 - protein, 2466 aa, Sorghum bicolor
MKPSPHFPEIGKKPKDLIAKDHAFNIAAYISSGADVIAAALRKHVEEEARDLSGEAFLRFMDQLYEQISSLLQSNDVTENLLALRAIDALIDMPFGEGASKVSKFASFLRNVFEVKRDPEILVPASAVLGHLAKAGGAMTADEVERQIKTALGWLTGDRVEYRRFAAVLILKEMAENGSTVFNVHVPEFVDAIWVALRDPKQAVREKAVEALRACLHVIEKRETRWRVQWYYRMCEAAQVGLGRNASVHSIHGSLLAVGELLRNTGEFMMSRYREVADIVLDYLKHRDQLVRRSITSLLPRIAHFLRDRFVTNYLKICMDHILFVLRTPDERASGFVALGEMAGALGVELVPYLPAITSHLQDAIAPRRGRPSLEAISCVGSFAKAMGPAMEPHIRSGLLDAMFFAGLSDKLVDALESISTSIPSLLPTIQERLLDCISQALPKSSIRPGASVGRANRSNSLQQFVDSNSPLLVQLALWTLANFNFKGHELLEFARESVILYLEDEDSSTRKAASLCCCKLVAHSLSASSTSQFGSNRTNRIGGAKRRRLVEEIVEKLLMAAVADADVGVRSSVFKALYRNPAFDDFLAQADILTSIFVALNDEEYDVRELAISVAGRLSEKNPAYVLPALRRYLIQLLTYLDQSMDSKCREESARLLGCLIRSCARLILPYIAPVHKALVTRLCEGTGPNANNALAAGVLATVGELAKVGGFAMRRYLPELMPVVVDALLDGGAVSKREVAVSTLGQIIQSTGYVIAPYNEYPPLLGLLLKLLNGELEWSTRLEVLKVLGIMGALDPHAHKRNQHNLPGQHREVLRPTIETAQHIVSMEELPTDFWPSFSASEDYYSTVAISSLMRILRDPSLSSYHQMVVGSLIFIFKSMGLGCVPYLPKVLPELLRAVRMCEDGGLKEFITWKLGTLISIVRQHIRKYLQDILSLISELWTSSFSLPAPNRTIQGPQGSPVLHLVEQLCLALNDEFRIYLLHILPSCIQVLGDAERCNDYYYVPGILHTLEVFGGNLDEHMHLVAPVLVRLFKVELVDIRRRAIVTLTNLIPKVQVGTHVSALVHHLKLVLDGNNDDLRKDAAEALCCLAHALGEDFTIFVPSIRKILVKHHLRYRKWDEIENRLLRRELLITENLSVQKYTQCPPDVISDPLDDFDGTPSEIADETQRQARSHQVNDVRLRSAGEASQRSTREDWAEWMRHFSIALLKESPSPALRTCARLAQLQPSVGRELFAAGFASCWAQMSESAQEQLVRSLKTAFSSQNIPPEILATLLNLAEFMEHDEKPLPIDTRLLGALAEKCRAFAKALHYKEMEFEAVCTKKMGANPVTVVESLIHINNQLHQHEAAIGILTYSQQNLEVQLKESWYEKLHRWDEALKAYTIKSSQAPGPLQNLDATLGRMRCLAALARWEDLSALCREQWTGAEPSARLEMAPMAANAAWHMGEWDHMAEYVSRLDDGDENKLRMLGNTTASGDGSSNGAFFRAVLSVRSKKYDEARIFVERARRCLATELAALVLESYERAYNNMVRVQQLSKLEEVIDYCTLPAESPIADGRRELIRNMWNERIKGTKRNVEVWQALLAVRELVLPPNEDRDTWIKFAKLCWKNGRISQARSTLVKLLQFDPESSPELTLYHAHPQVALAYLKYQYAVGDELKRRDAFSRLQELSMQLATAMGNFPGTSANHGTMSNAGVPLIARVYLTLGTWKKALSPALDDDSIQEILISYNHATLSAKDWGKAWHTWALFNTEVMSRYTFRGRPDIAGKYVVAAVTGYFYSIACQSTTKGVDDSLQDILRLLTLWFNHGATSEVQTALQKGFSLVKIEMWLVVLPQIIARIHSNTRVVRELIQSLLVRIGKGHPQALMYPLLVACKSISILRQRAAQEVVDKIRQHSGGLVDQAQLVSKELIRVAILWHEMWHEALEEASRMYFGEHNIEGMLAVLEPLHAMLERGPETIKENAFIQAYGHELLEAHECCSKYRATGEDAELTKAWDLYYHVFRRIDKQLPSLTTLDLHSVSPELLKCRKLELAVPGTYAADSPLVTIEYFVPQLIVITSKQRPRKLTIHGSDGNDYAFLLKGHEDLRQDERVMQLFGLVNTLLENSRKTSEKDLSIQRYAVIPLSPNSGLIGWVPNCDTLHALIREYRDARKIFLNQEHKLMLAFAPDYDHLPLIAKVEVFQHALQNTEGNDLAKVLWLKSRTSEVWLERRTNYARSLAVMSMVGYLLGLGDRHPSNLMLDRYSGKILHIDFGDCFEASMNREKFPEKVPFRLTRMLVKAMEVSGIEGTFRTTCENVMQVLRTNRDSVMAMMEAFVHDPLINWRLFNFNEVPQVSNYGNAHAHTVVSSEDAVANRELMQPQRGARERELLQAVNQLGDANEVLNERAVAVMARMSDKLTGRDFSSGSALAGAGSSTQHGSEHLASGDARDAQPALSVKVQVQKLILQATSHENLCQNYVGWCPFW

SEQ ID NO: 289 - DNA, 777 bp, Sorghum bicolor
atggcgcaccacctcgcgctgctcctgctcctgctggcctcgccggcggcgacgcgtctagcatccgccgcctgcgggagcgagaagttcccagcggggcgcgcgtacgcgtcgtgcgaggacctgccgaagctgggcgcgtcaatccactggacgtacgacgcgtccaagacctccctgtccgtggcgttcgtcgcggcccccgcggcggccggcgggtgggtggcgtggggcctgaacccgacgggggaaggcatggcggggacgcaggcgctggtggcgctggcggggtccgggtccgcggcgcccaccgtgcgcacgtacaacatcacgggctacgtcccgctcggcaaggcgtcgacgccgctcgacttcccggccaccgacctcgccgcggacgccgccgggagtggaggcaagatccgggtgtacggcaagctgcagctgcgcaaggggatgaaggccgtgaaccaggtgtggcaggtcggcgcgtcatccaccggcggcgcacccgacaagcacgcgttccaggcggataacctcagcgccaagagcaagctcgtcctcgccggcaaggccgccgcggccgaggccccctcgcctgcctcccccgcgcccgaggccggcggcccgtccgcgtccggcgcaggcagcgacagcggcgcggcgtcgtccatgtcgccctccaagtcgcctaacgctgctgtgcccgcggctggcgtgtccgcgcccgcactcctcgtgctcgcgctggtgggcttcttggtgacggtatga

SEQ ID NO: 290 - protein, 258 aa, Sorghum bicolor
MAHHLALLLLLLASPAATRLASAACGSEKFPAGRAYASCEDLPKLGASIHWTYDASKTSLSVAFVAAPAAAGGWVAWGLNPTGEGMAGTQALVALAGSGSAAPTVRTYNITGYVPLGKASTPLDFPATDLAADAAGSGGKIRVYGKLQLRKGMKAVNQVWQVGASSTGGAPDKHAFQADNLSAKSKLVLAGKAAAAEAPSPASPAPEAGGPSASGAGSDSGAASSMSPSKSPNAAVPAAGVSAPALLVLALVGFLVTV

SEQ ID NO: 291 - DNA, 1743 bp, Sorghum bicolor
atggatcctaccactattgattcgaaatggacgtctcccatcactgaagatgggtccatggacagacgaggaaacccagctgtcaagacaaccaccggaggatggagatctgccatcctgctgttagctaactatggactcgcgacgtgcgccttcttcggcgtcggcgtgaacctcgtggtgttcctgcgccgggtgctccaccagggcaacgccgaggcggccaacaacatcagcaagtggacagggaccgtctacatcttctccctcatcggcgccttcctcagcgactcctactggggccgttacgtcacctgcgccatctttcagatcatctatgtgacgggcctggtgatcctgtcgcttgcgtcatggttcttgttggtgaagccctccggctgcggcggcgtcaaggtgcactgcgacgagccgtcggcgcccggcgtcgcgctgttctacctgtccacctacatgatcgcgttcggcaacggagggtaccagccttccatcgcgaccttcggatcggaccagttcgacgagacggaccccaaggaggggcgctccaaggtcgccttcttcagctacttctacctggcgctcaacgtggggtccctgttttccaacacggtgctggtgtactacgaggactcagggcggtgggtcatggggttctgggtctcggcggccgccgccgcgctggcgctcgtgctcttcttgctcggcacgcccaactaccggcacttcaagccgagcggcaacccgctgacccgcgtcgcgcaggtgttcgtcgccgcgttccgcaagtggcacgctgaggttccccgcggcgagctcctccacgaggtggaaggagaggaccctaagatctcgggcatccgcaagatccttcacagcgacgagctcaggttcctcgacaaagcggcgacgatcaccgagggggagaagatggagaacccgtggaggctctgcacggtgacgcaggtggaggaggtgaagtgcatcctgaagatgctgcccatctggctgtgcacgatcgtgtactcggtggtgttcacccagatggcgtcgctgttcgtggagcagggcgccaccatggacaccaacatcgggtcgttccacttccccgcagcgagcatgtcgctgttcgacgtcctcagcgtgctggcgttcatcgccatctaccggcgggtcctggtgcccgtcatggcgcggctgtcgggcaacccgcagggcctgacggagctgcagcgcatgggcgtcgggctcgtgatcggcatggcggcgatggtggtggcgggcgtggtggaggtggagcggctgaagcgcgtggcagccccggaccagccgagctccctgagcgtgctgtggcaggtgccgcagtacgcgctgatcggggcgtcggaggtgttcatgtacgtggggcagctggagttcttcaacgggcaggcgcccgacggcgtcaagagcttcggcagcgcgctgtgcatggcgtccatctcgctggggaactacgtgagcatcatgctggtgagcgtggtcacaagcctcaccgccggggagaagcgtccggggtggatccctgggaacctcaactccggccacctggacaggttctacttcctcctcgcagcgctctcgctcgtcgacctcgccgtctacatcgcctgtgccatgtggtacaagggcatcaagcttgacggcggcgacggcgatgacagtagaaaggtctctgcgcatgtctag

SEQ ID NO: 292 - protein, 580 aa, Sorghum bicolor
MDPTTIDSKWTSPITEDGSMDRRGNPAVKTTTGGWRSAILLLANYGLATCAFFGVGVNLVVFLRRVLHQGNAEAANNISKWTGTVYIFSLIGAFLSDSYWGRYVTCAIFQIIYVTGLVILSLASWFLLVKPSGCGGVKVHCDEPSAPGVALFYLSTYMIAFGNGGYQPSIATFGSDQFDETDPKEGRSKVAFFSYFYLALNVGSLFSNTVLVYYEDSGRWVMGFWVSAAAAALALVLFLLGTPNYRHFKPSGNPLTRVAQVFVAAFRKWHAEVPRGELLHEVEGEDPKISGIRKILHSDELRFLDKAATITEGEKMENPWRLCTVTQVEEVKCILKMLPIWLCTIVYSVVFTQMASLFVEQGATMDTNIGSFHFPAASMSLFDVLSVLAFIAIYRRVLVPVMARLSGNPQGLTELQRMGVGLVIGMAAMVVAGVVEVERLKRVAAPDQPSSLSVLWQVPQYALIGASEVFMYVGQLEFFNGQAPDGVKSFGSALCMASISLGNYVSIMLVSVVTSLTAGEKRPGWIPGNLNSGHLDRFYFLLAALSLVDLAVYIACAMWYKGIKLDGGDGDDSRKVSAHV

SEQ ID NO: 293 - DNA, 1140 bp, Sorghum bicolor
atggcgaccgcggggaaggtgatcaagtgcaaagctgcggtggcatgggaggccggcaagccgctgtcgatcgaggaggtggaggtagcgcctccgcaggctatggaggtgcgcgtcaagatcctcttcacctcgctctgccacaccgacgtctacttctgggaggccaaggggcagactccggtgttccctcggatcttcggtcatgaggctggaggtatcatagagagtgttggagagggtgtgactgacgtagctcccggtgaccatgtccttcctgtgttcactggggagtgcaaggagtgcgcccactgcagatcggcagagagcaacatgtgtgatctgctcaggatcaacactgaccggggtgtgatgattggcgatggcaagtcacggttttcaatcaatggaaagcctatctaccattttgttgggacttcaaccttcagcgagtacactgtcatgcatgttggttgtgttgcaaagatcaaccctgaggctccccttgataaagtttgtgttcttagttgtggtatttctactggtcttggtgcatcaattaatgttgcaaaaccaccaaagggttctacagtggctattttcggtctaggagcagttggtcttgccgctgcagaaggtgcaaggattgctggagcatcaaggatcattggtgttgacctgaaccccagcagattcgaagaagctaggaagtttggttgtactgaatttctgaacccaaaagaccacaagaagcccgtgcaggaggtacttgctgagatgaccaacggaggggttgaccgcagtgtggaatgcactggcaacatcaatgctatgatccaagcatttgaatgtgttcacgatggctggggtgttgctgtgctagtgggtgtgccacacaaggatgctgagttcaagacccacccaatgaacttcctgaacgagaggaccctgaagggaaccttctttggcaacttcaaaccacgcactgatctgccaaatgtggtggagctgtacatgaaaaaggagctggaggtggagaagttcatcacacacagcgttccgttcacggagatcaacaaggccttcgacctgatggctaagggagaaggcatccgctgcatcatccgcatggagaactag

SEQ ID NO: 294 - protein, 379 aa, Sorghum bicolor
MATAGKVIKCKAAVAWEAGKPLSIEEVEVAPPQAMEVRVKILFTSLCHTDVYFWEAKGQTPVFPRIFGHEAGGIIESVGEGVTDVAPGDHVLPVFTGECKECAHCRSAESNMCDLLRINTDRGVMIGDGKSRFSINGKPIYHFVGTSTFSEYTVMHVGCVAKINPEAPLDKVCVLSCGISTGLGASINVAKPPKGSTVAIFGLGAVGLAAAEGARIAGASRIIGVDLNPSRFEEARKFGCTEFLNPKDHKKPVQEVLAEMTNGGVDRSVECTGNINAMIQAFECVHDGWGVAVLVGVPHKDAEFKTHPMNFLNERTLKGTFFGNFKPRTDLPNVVELYMKKELEVEKFITHSVPFTEINKAFDLMAKGEGIRCIIRMEN

SEQ ID NO: 295 - DNA, 1443 bp, Sorghum bicolor
atggtgaagatctgctgcatcggtgctggctatgtcggtggcccgaccatggccgtcattgccctcaagtgcccagacattgaggttgtcgttgttgacatctccaagccccgcattgaggcctggaacagtgacaccctcccgatctacgagcctggtctcgatgatgttgtgaagcagtgcaggggcaagaacctcttcttcagcactgatgttgagaagcacgtcgctgaggctgacattatctttgtctcggtgaacacccccaccaagacccgtggacttggagctggcaaggctgccgacctcacctactgggagagtgctgctcgtatgatcgctgatgtctctaagtctgacaagattgttgttgagaagtccactgtccctgtcaagactgctgaggctattgagaagatcttgacccacaacagcaagggcatcaactaccagatcctttccaacccagagttccttgctgagggcactgctattgaggacctgttcaagcctgacagagtgctcatcggtggccgggagacccctgagggcaggaaggctgtccaggctctcaaggatgtgtacgctcactgggttcctgaggacaggatcctcaccaccaacctgtggtctgctgagctctccaagcttgctgccaacgcgttcttggcacagaggatctcctctgtgaatgccatctctgcgctctgtgaggccactggtgccaatgtgtctgaggtggcttacgccgtgggcaaggacaccagaattggccctaagttcctgaacgccagtgttgggtttggtggctcttgcttccagaaggacatcctgaacttggtgtacatctgcgagtgcaatggcctgcccgaggtggcccactactggaagcaggtgatcaagatcaacgactaccagaagagccggttcgtcaaccgcgtcgtgtcctccatgttcaacaccgttgccggcaagaagatcgccgtcctcggcttcgccttcaagaaggacaccggtgacaccagggagaccccggccattgacgtctgcaagggcctgttgggtgacaaggctcagatcagcatctacgacccccaggtgacggaggaccagatccagcgggacctggccatgaacaagttcgactgggaccacccgatgcacctgcagccgacgagccccacggccgtgaagcaggtgagctgcgtgtgggacgcgtacgaggccaccaagggtgcccacggtctgtgcatcctgaccgagtgggacgagttcaagaccctggactaccagaagatcttcgacaacatgcagaagcctgccttcgtcttcgacggtcgcaacattgtcgaccccgagaagctgagggagatcggcttcatcgtctactccatcggcaagcccctcgacgcctggcttaaggacatgcccgcggtcgcttaa

SEQ ID NO: 296 - protein, 480 aa, Sorghum bicolor
MVKICCIGAGYVGGPTMAVIALKCPDIEVVVVDISKPRIEAWNSDTLPIYEPGLDDVVKQCRGKNLFFSTDVEKHVAEADIIFVSVNTPTKTRGLGAGKAADLTYWESAARMIADVSKSDKIVVEKSTVPVKTAEAIEKILTHNSKGINYQILSNPEFLAEGTAIEDLFKPDRVLIGGRETPEGRKAVQALKDVYAHWVPEDRILTTNLWSAELSKLAANAFLAQRISSVNAISALCEATGANVSEVAYAVGKDTRIGPKFLNASVGFGGSCFQKDILNLVYICECNGLPEVAHYWKQVIKINDYQKSRFVNRVVSSMFNTVAGKKIAVLGFAFKKDTGDTRETPAIDVCKGLLGDKAQISIYDPQVTEDQIQRDLAMNKFDWDHPMHLQPTSPTAVKQVSCVWDAYEATKGAHGLCILTEWDEFKTLDYQKIFDNMQKPAFVFDGRNIVDPEKLREIGFIVYSIGKPLDAWLKDMPAVA

SEQ ID NO: 297 - DNA, 582 bp, Sorghum bicolor
atggcggagtgcaaggacagcagcggccggtctccgtcgtcgtccatggatagcagcacgcacccggtgctctccaccacgtcgtcgggctgccggccggcggcgaggagggacgacctcagcaccgacctccagctagggctcagcctgtcgccggcgtcctcgtccctcctggtagcggagagcaagaggagcatcccttctacgccaaggaaccaagtactcccggattggcccccgatcaaaccgttccttagaagcgccttgacagcctcggcacgccgacggagcacattgttcgtgaaggtgtacatggaaggcgttccaatcggtcggaagctggacttgctcttgctggatgggtacgacagcctcctagccaaactccgccacatgttcaaggcctctatcacttatgctgatgttatggagtaccatcaaagagctcctcacgagaaggctgcacatgttctcacctatgaagaccaggatggagactggatgatggttggggatgtaccgtgggagctcttccttggaagtgtaaggaaactgaggattgcaagaacagataaatgctag

SEQ ID NO: 298 - protein, 193 aa, Sorghum bicolor
MAECKDSSGRSPSSSMDSSTHPVLSTTSSGCRPAARRDDLSTDLQLGLSLSPASSSLLVAESKRSIPSTPRNQVLPDWPPIKPFLRSALTASARRRSTLFVKVYMEGVPIGRKLDLLLLDGYDSLLAKLRHMFKASITYADVMEYHQRAPHEKAAHVLTYEDQDGDWMMVGDVPWELFLGSVRKLRIARTDKC

SEQ ID NO: 299 - DNA, 1002 bp, Sorghum bicolor
atgagtttccgtgtgtcgctactcactttcctcctgttcgctgtgtttggaggtatgcgcccaaatttggcaacaacggacggccgcagtgctacagtgcccagtgctggttctgctatcattgcatactggcaaaaaatgctacctgactctaccatgccatcagctatacgtgaccttttgacccccaataataatgctgatgatgctgaccatcatgttcacgaacatcgccatatcgatggtggccatgaccatttcgattcgaggaacatcggcttcctcttcctagaggacgccttgacacctggatccaaggttgccccttatatcgacccggctagcagccgaggtgctcctttgctgcctcgtgatgtggccgattccatcccgatgtccacaaagagcttcacggacatcctcagaatgttttcaccggtatcacgcgccatggcggagagcatatggtactcgctagagctgtgtgagcaccctcgccctatcaagggcgagaagagggggtgtgtgacatccatcgagtccatggtcgatttcgcagcgtccatgctcgggacaagcgacctccgggccttttcatccccaagcgtccccgtcgaaggccgtaatgcttccaaggtttacaccgtgctggcggtgagggcgatcaccagcccgggagacaccatgacatgccatggcatcccgttcccatacaaggttttcctgtgccatgccctggtgccaaccaaggtgtactctgtgacggtagagagcgacgacgacgacggcgtggaggagaaagagaggatggaagaagcgctggtcgtgtgccacctcaatacggcggagttcgaccccatgaagatgccgccgcgtgtgaaacctggagacgccccagtctgccacttcctcaacaacgacgacgtcctctgggcgcccgctgcaactacacttgggacacagcaaggagcagccgaggacgtcgtcgtagctgcccagtag

SEQ ID NO: 300 - protein, 333 aa, Sorghum bicolor
MSFRVSLLTFLLFAVFGGMRPNLATTDGRSATVPSAGSAIIAYWQKMLPDSTMPSAIRDLLTPNNNADDADHHVHEHRHIDGGHDHFDSRNIGFLFLEDALTPGSKVAPYIDPASSRGAPLLPRDVADSIPMSTKSFTDILRMFSPVSRAMAESIWYSLELCEHPRPIKGEKRGCVTSIESMVDFAASMLGTSDLRAFSSPSVPVEGRNASKVYTVLAVRAITSPGDTMTCHGIPFPYKVFLCHALVPTKVYSVTVESDDDDGVEEKERMEEALVVCHLNTAEFDPMKMPPRVKPGDAPVCHFLNNDDVLWAPAATTLGTQQGAAEDVVVAAQ

SEQ ID NO: 301 - DNA, 738 bp, Sorghum bicolor
atgcgagggccatggacagcggaggaggacaagaagctcattagcttcatcctgacacatggccggtgctgctggcgggcagtgcctaaactggcagggctgcttcgttgcggcaagagctgccgtctgcggtggactaactaccttcgccctgacctcaagcgtggcctcctcagcactgccgaggagcagctcgtcattgacctccatgccaagctcggcaataggtatactaagttgcatgccaagttacctgggagaacagacaatgagatcaagaaccactggaacacgcacatcaagaagaagctcatcaagatgggcctcgacccggccacgcaccagcctctatccaattccaatgcaacttcctcacagtccacggttacagatgaatctgctaaatccagcgacttcagagaggagctgagcttgaaggatgacagccatagggaggttccactgtccactgattcatcagagcagtccagctggccagagtcaagcaccaacggctgtgatcaagaccctgaactgctggtgaattggccagacctgttgatggatgagccatggttgaattttatgagcagcaacgatgaacttgggaatgtcgagggggcgttgccatgggatggaacaacagactggctgctggactaccaagacttcggcatgtgcagctcgaactcagtcgacaattcaacgttccacgcctcaaatggatcgaacttctaa

SEQ ID NO: 302 - protein, 245 aa, Sorghum bicolor
MRGPWTAEEDKKLISFILTHGRCCWRAVPKLAGLLRCGKSCRLRWTNYLRPDLKRGLLSTAEEQLVIDLHAKLGNRYTKLHAKLPGRTDNEIKNHWNTHIKKKLIKMGLDPATHQPLSNSNATSSQSTVTDESAKSSDFREELSLKDDSHREVPLSTDSSEQSSWPESSTNGCDQDPELLVNWPDLLMDEPWLNFMSSNDELGNVEGALPWDGTTDWLLDYQDFGMCSSNSVDNSTFHASNGSNF

SEQ ID NO: 303 - DNA, 1119 bp, Sorghum bicolor; identical to SEQ ID NO: 269

SEQ ID NO: 304 - protein, 372 aa, Sorghum bicolor; identical to SEQ ID NO: 270

SEQ ID NO: 305 - DNA, 777 bp, Sorghum bicolor
atggggcggtcgccgtgctgcgagaaggcgcacacgaacaagggcgcgtggaccaaggaggaggacgaccgcctggtggcgtacatccgcgcgcacggcgaagggtgctggcggtcgctgcccaaggcggccggactgatgcgctgcggcaagagctgccgcctccgctggatcaactacctccgccccgacctcaagcgcggcaacttcaccgccgacgaggacgacctcatcatcaagctgcacagcctcctcggcaacaagtggtcgctcatcgccgcgcggctcccggggcggacggacaacgagatcaagaactactggaacacgcacatccggcggaagctgcttggcaggggcatcgaccccgtcacgcaccgccccatcgccgacgccggcgccggcaccgtcaccaccatctcgttccagcccaacaaacccaacgccgccgtcgcagcgcaggcgccacaacatcagccgatcaaggcggtggcgacggccgtcgttaaggtgcccaggtgccccgacctcaacctcgatctctgcatcagcccgccgtgccaacagaaggaagacgaggagctggacctcaagcccgccgtcgtcgtcaagcgggaggtgctgcaggccggccatggcggcagcctctgcttcggctgcagcctgggcatccaaaaaggagcccccgggtgcagctgcagcagcagcaacagccaccaccgcttcttggggctccggtccggcatgctcgacttcagaggcctcgagatgaagtga

SEQ ID NO: 306 - protein, 258 aa, Sorghum bicolor
MGRSPCCEKAHTNKGAWTKEEDDRLVAYIRAHGEGCWRSLPKAAGLMRCGKSCRLRWINYLRPDLKRGNFTADEDDLIIKLHSLLGNKWSLIAARLPGRTDNEIKNYWNTHIRRKLLGRGIDPVTHRPIADAGAGTVTTISFQPNKPNAAVAAQAPQHQPIKAVATAVVKVPRCPDLNLDLCISPPCQQKEDEELDLKPAVVVKREVLQAGHGGSLCFGCSLGIQKGAPGCSCSSSNSHHRFLGLRSGMLDFRGLEMK

SEQ ID NO: 307 - DNA, 2214 bp, Sorghum bicolor
atgggtgagaagaagaatacggcgggtttcgcggacgccctggatttctggcaagaaaaccagctgcggatcctcgtcgtggcgagcctggtgatccagtggttcctcttcgtcttggcgccctttcgtcagcgacggatcccaggtttgctgaggctctccatctggctggcgtacctgggcagcgacgccgtggccatctacgccctcgccaccctcttcaactcccacaggtgcgacgacaccggcaccggcaccggcggcgtggagctgctgtgggcgccaatcctgctggtgcacctgggcggccaggacagcataacggcctataacatcgaagacaacgagctgtggagacgccatgtccttacagcggtgtctcaggtggcggccgctatttatgtgttcgtcaagtcgtggccaaattccaacgtgactaccagtcatgtaggagtacccaatattgaccagataaaggccatcaaggctcacaacgaagagatggaggcttacaagagaatcttcacgccagcactcctgctgttcttctgtgggatcaccaaatgcgtatgcaagccctgggacctcaagagagtcagcgtcaacagccttgtggactcttcaccagcaggcagctcagaagcagaagcaggcaagggcgagaccgagaccgagaccgagatcaattcgcttcacgagtacgttgcagctgcaacgcagcatttcgaggcccggggtggcagcggcgacggcggcggcgacggcgacgacaacacttgtaaagtagaggaaatctggaagccctacaacctatgcgtagacctcgcgccaccctactccggccggctgagctgcctgaaacacctggtggtgcgcctcccggcagacggagctcatcggctggtgaaatccagcctctccgcgacgttccaccagctctacaccaaggaatcgctcaagctgcacgacgtctcgcacctggtgttcaccagcaacgccgccgagaaccgcttgacgatgctcacctcggctcgcggcgtacggacggtggccgcggccgtcctgctgggggcgatcgccgtgttccactacggcggcggcgacgacactgaaaagtccaaaccgattgacgtcaccatcacgtatgccctgctatggtctgctgtcgtgatggagtacgtcttgcccaccgtgatccaccacacgtctggcaggatacagcgactgtgcaccgggcaccggacatggccggagcaggtggcgcagtacaacctcatggggtacgtcgcccgctgcagcaggaagcacccctggctcatgaaggtggcggcgttcctgggctgcagggacctggtcgaccagctctggaccatgaagccatgcaagggcggcgcggcgatcatcaccggcctcgtccacggccatgtcgccggagcttggacggagggtcacatagccggcgccgactcgttccgggcgttcaacgactacaggggccagtggacgctcagcagggaggtcgccggcgtcggcgtcgggcgcagcgtaccatccatggtattgatcatgagcgtgtcgaggccgccgttcgacgagagcgtcctggtgtggcacctcgccaccgacttctgcttccacatactccgggaggacccgtcaccttccagcgccgccgctcgccgctgcagggagatgtccaactacatggcgtacctcctcttcgtgaagccggagatgctgatgcccggtgcccggcgaaacctgttccgagacgcgtgcggcgagatcgcggacatgctcgagaaggatcctcctccgagaacgccgaggggccgggggaagaggggcctcgcgcacaaggtcatccagctgctcaagagggacggcgacggcggcggcggcggcggcggcggtagtgtcgttcgacaggcttggagtgtcgccgaggagctcatggattcgcacaagggcaacgaggagaagatgtggacggtgatgcagggcgtgtgggtggagatgctctgcttctcggccagccggtgcaagggctacctgcacgcgaagagcttgggaaccggcggggagtacctgtcctacgtctggctcctgctcttgtacatggggatggagaccttggcggagaagatgcagaggacggagctgtacgacggccccacgccagcacggtcgtccatcagtggccacaatgtttga

SEQ ID NO: 308 - protein, 737 aa, Sorghum bicolor
MGEKKNTAGFADALDFWQENQLRILVVASLVIQWFLFVLAPFRQRRIPGLLRLSIWLAYLGSDAVAIYALATLFNSHRCDDTGTGTGGVELLWAPILLVHLGGQDSITAYNIEDNELWRRHVLTAVSQVAAAIYVFVKSWPNSNVTTSHVGVPNIDQIKAIKAHNEEMEAYKRIFTPALLLFFCGITKCVCKPWDLKRVSVNSLVDSSPAGSSEAEAGKGETETETEINSLHEYVAAATQHFEARGGSGDGGGDGDDNTCKVEEIWKPYNLCVDLAPPYSGRLSCLKHLVVRLPADGAHRLVKSSLSATFHQLYTKESLKLHDVSHLVFTSNAAENRLTMLTSARGVRTVAAAVLLGAIAVFHYGGGDDTEKSKPIDVTITYALLWSAVVMEYVLPTVIHHTSGRIQRLCTGHRTWPEQVAQYNLMGYVARCSRKHPWLMKVAAFLGCRDLVDQLWTMKPCKGGAAIITGLVHGHVAGAWTEGHIAGADSFRAFNDYRGQWTLSREVAGVGVGRSVPSMVLIMSVSRPPFDESVLVWHLATDFCFHILREDPSPSSAAARRCREMSNYMAYLLFVKPEMLMPGARRNLFRDACGEIADMLEKDPPPRTPRGRGKRGLAHKVIQLLKRDGDGGGGGGGGSVVRQAWSVAEELMDSHKGNEEKMWTVMQGVWVEMLCFSASRCKGYLHAKSLGTGGEYLSYVWLLLLYMGMETLAEKMQRTELYDGPTPARSSISGHNV

SEQ ID NO: 309 - DNA, 777 bp, Sorghum bicolor; identical to SEQ ID NO: 289

SEQ ID NO: 310 - protein, 258 aa, Sorghum bicolor; identical to SEQ ID NO: 290

SEQ ID NO: 311 - DNA, 3783 bp, Sorghum bicolor
atgagctcgtcgtcggacaatggcgccggcccggaggccggcgggaagaagaagaagaagaaggcggcggaggaggaggcggcggcggccaaggtgccgttcctgaagctgttctcgttcgcggaccggtgggactgcgtgctgatggctgtgggctcgctgggcgcgtgcgcgcacggcgcctccgtcccggtcttcttcatcttcttcggcaagctcatcaacatcatcggcctcgcctacctcttccccaccaccgtctccggccgcgtcgccaagtactcgctggacttcgtgtacctcggcgtcgtcatactcttctcgtcctggaccgaggtggcgtgctggatgcacacgggggagcggcaggcggcgaagatgcggcaggcgtacctgcgcgcgatgctggaccaggacatcgccgtcttcgacacggaggcgtccaccggcgaggtcatcaacgccatcaccagcgacatcctcgtcgtccaggacgccatctccgagaaggtgggcaacttcatgcactacatcagccggttcctggccggcttcgccatcggcttctcgcaggtgtggcagatcagcctcgtcaccctcgccatcgtccccctcatcgccattgccggcggcacctacgcctacgtcaccatcggcctcatggcccgcgtccgcaagtcctacgtcaaggccggcgagatcgccgaggaggtgatcggcaacgtgcggacggtgcaggcgttcgtcggcgaggagaaggccgtgaggtcgtaccgggaggcgcttctgaggacgtacaagtacggcaagaggggcggcctcgccaagggcctcggcctcggctccatgcactctgtgcttttcctctcctgggcactgctcatctggttcaccagcgtcgtcgtccacaagcggatttccaacggcggcgagtccttcaccaccatgctcaacgtcgtcattgctggcctgtcgctcggccaggcggcgccgaacatctcgacgttcctgcgggcgaggacggcggcgttccccatcttccagatgatcgagaggagcaccgtgaacaaggcgagctccaagaccggccgcacgctgcccgcggtcgacgggcacatccagttccgcaacgtccacttcagctacccctcacggccggacgttgtcatcctcgataggttcagcctggactttccggccgggaagatcgtcgctctcgtcggtgggagcgggtccggcaagagcaccgtcgtctcgctcattgagcgcttctatgagccgctgtccggctccattctgcttgatgggcacgacatcaaggagctcgacgtcaagtggctgcgccggcagatcgggctggttaatcaggagccggccctgttcgcgacgagcatccgcgagaacatactctacggcaaaggcgacgccaccatggaggagatcaaccacgccgcgaagctgtcagaggcgatcacgttcatcaaccacctccctgatcggtacgagacgcaggtcggcgagcgcgggatacagctctccggcggccagaagcagcgcatcgcgatctcgagagcgatactgaagaacccgtcgatactgctcctcgatgaggcgacgagcgcactggacgccgagtccgagaagagcgtgcaggaggcgcttgaccgcgtcatggtcggccgcaccaccgtggtgatcgcgcaccgcctgtcgactatccggaacgccgacacaatcgcagtcgtcgacggtggcaggatcgtcgaaacaggcacgcacgagcagctcatggcgaacccgtgcagtgcctactcctcgctgatccaacttcaagaggccgcccagcttcagcacaaaccttctttgtctgacagtgcaagcatcaccaggccactaagtttcaagtattcgagggagttgtccgggaggacgagcatgggcgccagcttccgctctgacaaggactcaatcagccggtacggtgctggtgaggcgcatgacgaagtgcgcaaggggaagcccgtgtccatgaagaagctctactccatggtgcggccggattggttcttcggcgtgtcgggcaccatcagcgcctttgtggccggctcccagatgccgctcttcgcgcttggcgtcacgcaggcgctggtgtcctactacatggggtgggagaccacgaagctggaggtgcgcaagatcgccgtgctcttctgctgtggcgccgtgctgacagtcgtgttccacgtgatcgagcacctcagcttcggcatcatgggtgagcggctcaccctgcgggtccgggagaagatgttctcggcgatactgcggaacgagatcgggtggttcgacgacaccagcaacacgagcgccatgctatcgtcgcggctcgaggctgatgcgacgcttgtgcgcaccatcgttgtcgaccgctccaccatcttgctccagaacatcggtatgatcgtgacgtcgctcatcattgccttcatacttaactggaggatcacgctggtcgtccttgccacctatcccctcatggtcagcggccacatcagcgagaaaatgttcatgaaaggctacggaggcaacctcagcaagtcctatctgaaggccaacatgctcgccgcggaggcagtgagcaacatccggacggtggccgccttctgctcggaggagaaggtgataaaactctacgcggacgagctgaaggagccttctaagaggtccttccggcgaggccagggcgccggcctcttctatggagtctcccagttcttcctcttctcctcttacgcactggcgttatggtatggttcagtgctgatgagcaaggaattggccagcttcaagtccgtgatgaagtccttcatggtgctcatagtgacagcactggcaatgggggagacgctagcaatggcacctgatatcatcaaagggaaccagatggcgtcctcggtgttcgagatcctggaccgcaagactgacgtccggatcgacacaggtgaggacatcaagaaggtagaggggctgatcgagctgcgcggcgtcgagttccggtacccagctaggcccgacgtgaccgtgttcaagggccttgacctgctgatgaaggccggcaagagcatggcgcttgtcgggatgagcggctccggcaagagcaccgtgctgtcgctcatcctccggttctacgacccgatcgctggaagagtcttgatcgatgggaaggacgtcaagaagcttaagctgaagtctctgaggaaacatattgggctggtccagcaagagccggcgctgttcgcgacgacgatctacgacaacatcctgtacggcaaggacggggccacggaggccgaggtcgtcgaggcggccaagctggcgaacgcgcactcgttcatcagctcgctgccggaggggtacaagaccaaggtcggggagcgcggcgtgcagctgtcgggcgggcagaagcagcggatcgcgatcgcgcgcgccatcgtgaaggacccggctatcctgctgctggacgaggcgacgagcgcgctggacgtggagtcggagcgcgtcgtgcagcaggcgctggaccgggtgatgaagaaccggaccaccgtgatggtggcgcaccggctgtccacgatcaagaacgccgacgtcatctcggtgctgcaggacggcaagatcatcgagcagggggcgcaccagcacctgatcgagaacaagaacggcgcctaccacaagctcgtcaacttgcaacagcagcaacagatgcagacgcagcagagctcatga

SEQ ID NO: 312 - protein, 1260 aa, Sorghum bicolor
MSSSSDNGAGPEAGGKKKKKKAAEEEAAAAKVPFLKLFSFADRWDCVLMAVGSLGACAHGASVPVFFIFFGKLINIIGLAYLFPTTVSGRVAKYSLDFVYLGVVILFSSWTEVACWMHTGERQAAKMRQAYLRAMLDQDIAVFDTEASTGEVINAITSDILVVQDAISEKVGNFMHYISRFLAGFAIGFSQVWQISLVTLAIVPLIAIAGGTYAYVTIGLMARVRKSYVKAGEIAEEVIGNVRTVQAFVGEEKAVRSYREALLRTYKYGKRGGLAKGLGLGSMHSVLFLSWALLIWFTSVVVHKRISNGGESFTTMLNVVIAGLSLGQAAPNISTFLRARTAAFPIFQMIERSTVNKASSKTGRTLPAVDGHIQFRNVHFSYPSRPDVVILDRFSLDFPAGKIVALVGGSGSGKSTVVSLIERFYEPLSGSILLDGHDIKELDVKWLRRQIGLVNQEPALFATSIRENILYGKGDATMEEINHAAKLSEAITFINHLPDRYETQVGERGIQLSGGQKQRIAISRAILKNPSILLLDEATSALDAESEKSVQEALDRVMVGRTTVVIAHRLSTIRNADTIAVVDGGRIVETGTHEQLMANPCSAYSSLIQLQEAAQLQHKPSLSDSASITRPLSFKYSRELSGRTSMGASFRSDKDSISRYGAGEAHDEVRKGKPVSMKKLYSMVRPDWFFGVSGTISAFVAGSQMPLFALGVTQALVSYYMGWETTKLEVRKIAVLFCCGAVLTVVFHVIEHLSFGIMGERLTLRVREKMFSAILRNEIGWFDDTSNTSAMLSSRLEADATLVRTIVVDRSTILLQNIGMIVTSLIIAFILNWRITLVVLATYPLMVSGHISEKMFMKGYGGNLSKSYLKANMLAAEAVSNIRTVAAFCSEEKVIKLYADELKEPSKRSFRRGQGAGLFYGVSQFFLFSSYALALWYGSVLMSKELASFKSVMKSFMVLIVTALAMGETLAMAPDIIKGNQMASSVFEILDRKTDVRIDTGEDIKKVEGLIELRGVEFRYPARPDVTVFKGLDLLMKAGKSMALVGMSGSGKSTVLSLILRFYDPIAGRVLIDGKDVKKLKLKSLRKHIGLVQQEPALFATTIYDNILYGKDGATEAEVVEAAKLANAHSFISSLPEGYKTKVGERGVQLSGGQKQRIAIARAIVKDPAILLLDEATSALDVESERVVQQALDRVMKNRTTVMVAHRLSTIKNADVISVLQDGKIIEQGAHQHLIENKNGAYHKLVNLQQQQQMQTQQSS

SEQ ID NO: 313 - DNA, 1485 bp, Sorghum bicolor
atggcccctgcctccagcgtcgccgtggagaacctcaacccaaaggtcttaaaatgtgagtatgcagtccgtggggagattgtcatccatgctcagcgcttgcagcaacaactacaaacgcaaccagggtctcttcctttcgatcagctcattccaattatatttttacccttgcagatcctcttctgcaacattgggaatcctcaatctcttggtcagcaacctgtgacattcttcagggaggttcttgctctttgtgatcatccatgcctcttggaaaaagaggaaaccaaatcattgttcagtgctgatgctatttctcgagcaaagcagattcttgcaactattcctggaagggcaaccggtgcatatagtcacagccagggtatcaaaggactgcgtgatgcaattgctgctggtatcacctcacgtgatggattccctgcaaatgcagatgacattttcattacagatggagcaagtcctggggtccacatgatgatgcaattactgattaggaatgagaaggatggcattctgtgcccaattcctcagtaccccttgtactcggcctccatagctcttcatggtggagctcttgtcccctattaccttgatgaaaaaactgggtggggtttggagatctctgatcttaagaagcaactcgaagatgctcggtcaaaaggcattgatgttagggccttggtggttatcaatccaggaaatccgactgggcaggttcttgctgaagacaaccaatatgacatagtgaaattctgcaaaaatgagggccttgttcttctagctgacgaggtatatcaagagaacatctatgttgacaacaagaaatttaactctttcaagaagattgcaagatccatgggatacggcgaggatgatctccctctagtatcatttcagtctgtttccaaaggatactatggagagtgtggtaaaagaggaggttacatggagatcactggcttcagtgctccggtaagagagcagatctacaaggtagcttcagtgaacctgtgctccaatatcactggtcaaatccttgcaagcctcgtcatgaatccaccaaaggttggggacgaatcatatgcttcctacaaggcagagaaagatgcaatccttcagtctttagctcgtcgtgcaaaggcattggaggatgcattcaacaagcttgagggaatttcatgtaacaaggctgaaggagcaatgtaccttttccctcagattcatctgccacagaaggcaattgaggctgctaaagctgctgagaaagcacctgatgcgttctatgctctccgtctccttgaatcaactggaattgttgtggtccctggatctggatttggtcaagttcctggaacatggcacatcagatgcactatcctgccgcaagaagacaaaatccccgcggtgatcacccgcttcaaggctttccatgaggcgttcatggctgagtaccgcgactaa

SEQ ID NO: 314 - protein, 494 aa, Sorghum bicolor
MAPASSVAVENLNPKVLKCEYAVRGEIVIHAQRLQQQLQTQPGSLPFDQLIPIIFLPLQILFCNIGNPQSLGQQPVTFFREVLALCDHPCLLEKEETKSLFSADAISRAKQILATIPGRATGAYSHSQGIKGLRDAIAAGITSRDGFPANADDIFITDGASPGVHMMMQLLIRNEKDGILCPIPQYPLYSASIALHGGALVPYYLDEKTGWGLEISDLKKQLEDARSKGIDVRALVVINPGNPTGQVLAEDNQYDIVKFCKNEGLVLLADEVYQENIYVDNKKFNSFKKIARSMGYGEDDLPLVSFQSVSKGYYGECGKRGGYMEITGFSAPVREQIYKVASVNLCSNITGQILASLVMNPPKVGDESYASYKAEKDAILQSLARRAKALEDAFNKLEGISCNKAEGAMYLFPQIHLPQKAIEAAKAAEKAPDAFYALRLLESTGIVVVPGSGFGQVPGTWHIRCTILPQEDKIPAVITRFKAFHEAFMAEYRD

SEQ ID NO: 315 - DNA, 1125 bp, Sorghum bicolor
atgtctgccaccgaaccggcagccggcctggcctccgatggctatgaccgccggcgcgagctgctgcaagcgttcgacgacaccaaggcgggcgtgaaggggctcgtcgacgccggcgtcacggccatcccagccatcttccgccaccccccggagtcactcgaggcgacctcgtccccaccgcccaccgacgtcgtggccagcgccggcaccatcccggtcatcgacctcgcagctgcagcaccgcgaggagaggtggccagccaggtgaagcgcgcggccgagaccgtggggttcttccaggtgaccaaccatggcgtgccgcgggagctcatggccggcgtgctcgccggggtgaggcggttcaacgagcagcaaccggaggtgaaacgccggttctacaccagggacactgcgcgcaaggcgaggttctgctccaattacgacctcttccagtcggccgccgccaactggcgcgacaccctcttctgcgagctcgcgccggacccgccgcggccagaggagctcccggaggctgtcaggggcgtgatgctggagtacggcgacgcggcgacgaagctggcgctgtgggtgttggagctgctgtcggagtccctggggctggcgagcgaccacctgcgcgagatggggtgcgcgcagagcctcaacgtggcgagccactactacccgccgtgcccggagccgcacctcaccctcggcaccagcaggcacgccgacgccaccttcgtcaccgtcctcctgcaggacggcacgggcggcctgcaggtgctcctcgaccgcggcggctgggtggacgtccctcccctccccggcgctctcatcgtcaacatcggcgactttcttcagcttgtcagcaacggccggttcaggagcgtggagcaccgggtcctggcgaacaagagcagggacacgccgagggtctcggtggcgtgcttcttcaacgcggacgccaagagatctacgaggctttacggacccatcacggatggcggcagtgcgccgctctacaagagcgtcacggctagggagttcgtcgcgtactcgtacagcaaaggtctcggcggtcgcccgcttgagcacttccggttgggggcagaagactag

SEQ ID NO: 316 - protein, 374 aa, Sorghum bicolor
MSATEPAAGLASDGYDRRRELLQAFDDTKAGVKGLVDAGVTAIPAIFRHPPESLEATSSPPPTDVVASAGTIPVIDLAAAAPRGEVASQVKRAAETVGFFQVTNHGVPRELMAGVLAGVRRFNEQQPEVKRRFYTRDTARKARFCSNYDLFQSAAANWRDTLFCELAPDPPRPEELPEAVRGVMLEYGDAATKLALWVLELLSESLGLASDHLREMGCAQSLNVASHYYPPCPEPHLTLGTSRHADATFVTVLLQDGTGGLQVLLDRGGWVDVPPLPGALIVNIGDFLQLVSNGRFRSVEHRVLANKSRDTPRVSVACFFNADAKRSTRLYGPITDGGSAPLYKSVTAREFVAYSYSKGLGGRPLEHFRLGAED

SEQ ID NO: 317 - DNA, 1041 bp, Sorghum bicolor
atggctgctgctgtcatggccattggcctgctgttggccggcgccgtcgtcggcgcagtagtgccgcctcatcatgatcatcttcagctggtgattgacactgacggtggtttgtcgctggacttccacgcggcgtcgtgcccgcagctggagggcatcgtgcgcgccgccgtgcaggccgagcgaggccaggacgtccaagtcaccgccggcctcctccgcatcttcttccatgactgcctcccgcaggggtgcgacgcgtccatccttctggacggcgagaaggcctttggtcccaatgcttctctacagccacgggcgctgcagctcatcgagagcatccgcgccaaggtgcacgccgtgtgcggcgccacggtctcctgcgccgacatcatcgcgctcgccacccgcgacgccgtcagcctggccggaggaccgtccatcgcgatgccccagggccgcaccgacagcctcaggccggccaccaacgccgaggtaaacaccctcccgtcgcccttctccgacgtgagcacgctcctcggcaccttcagccgcaggggcctcgccgaccccgccgacctcgtcgcgctctccggcggccacaccgtggggaaggccagctgcggcttcatcagggggaacgacgacttctcccggaggctcgccgcgaactgctccgccggtcgcaccgggaagcagagcctggacgtcatcacgcccgacgccttcgacaacaggtacttcgtcgcgctgaggagcacccagggggtactgctctctgaccagggcctcgccggcgaccggcgcacggcccgcttcgtcaccgccttcgccagcaaccaggccgccttcttcaaccagttcgccaagtccatggtcaagctgggcagcatcaaggcaaccgccgccggcgagatacgccgcaactgcttcaggcctaacggccgcgtcagcttcgacgacgtcagtgctctcactctcaccggtgatgatgccgccgccgtcgctaccagcgacgagggctttgcagcctctgcttaa

SEQ ID NO: 318 - protein, 346 aa, Sorghum bicolor
MAAAVMAIGLLLAGAVVGAVVPPHHDHLQLVIDTDGGLSLDFHAASCPQLEGIVRAAVQAERGQDVQVTAGLLRIFFHDCLPQGCDASILLDGEKAFGPNASLQPRALQLIESIRAKVHAVCGATVSCADIIALATRDAVSLAGGPSIAMPQGRTDSLRPATNAEVNTLPSPFSDVSTLLGTFSRRGLADPADLVALSGGHTVGKASCGFIRGNDDFSRRLAANCSAGRTGKQSLDVITPDAFDNRYFVALRSTQGVLLSDQGLAGDRRTARFVTAFASNQAAFFNQFAKSMVKLGSIKATAAGEIRRNCFRPNGRVSFDDVSALTLTGDDAAAVATSDEGFAASA

SEQ ID NO: 319 - DNA, 2181 bp, Sorghum bicolor
atgcctcctccccaggacggggcccatgactccgcggcgcgggtcccgctcctcccgccccctgctccgcgccgcgcggccgtgaggctccgcccgctcccgctcctcatcgccgcggcgttcgcggcctcctaccgcctcctcttccacctcgcgcccgcgccgtcctactaccagtccctcctcctctccctcggctccaacgacaccgccgccgcccacttgcacgcgctcaccatccgcccccacctagcgggcacgggcgccaacgcgctcgccgccgcgcacgtcgcctccgcgctctcctcccactccttccccacccgcctcaccagctactccgtgctcctctcctaccccgcgcaccgctcgctctcgctctccgcgccggatcgcgacacggtgctcttcgctttgaagcaggaaacctacgcaggcgacccctacgacgcggtctccgacgaggccgtccccaccttcctcgcctacgcggcctccggctcggtcaccgccgaggccgtctacgccaactacggccgcgcggaggactacgcttacctcgccgctcgcggcgtcaacgtcaccggaaaggtcgccgtcgcgcgctacggcaaagtgttccgcggcgacatcgtcaggaacgctcgcgacgccggcgccgccgcggcggtgatatacaccgacgcgaaggactacgcggccgggaaggccttcccggacggaccgtggatgccgccgacaggcgtgcaggtgggtagcacgttcaagggggtcggggaccccacgacaccgatgtggccgtcgtcggagggctgcgagcgcctgagcgtcgcggaggcgatgagttccgatgacatgccggggataccggcgctgccggtgtcctggatggatggggagaccatactacagctcatcggcggcgatgtggcgcccaaggattggcaaggaggcgatggcgcggccgcttacaggattgggcccggcccggcagtgctcaacctgacctacatagggaatgagacgatggttactattcagaatgtcatttcggtgattgaagggagagaagaacctgaacggtatgtaatccttggaaatcaccgtgatgcatggacatttggggcagctgatccgaacagtgggacagcaaccttgcttgagctagctcaacggttgtctgagctgcaaaagaagggctggacacctcgacggaccatcatcttgtgcaactgggatgccgaagagtatggattgacaggatccactgaatgggtcgaggagaacagggcaatgctaacttcaagaactgttgcttacctaaatgttgatattgcggtggatggttatggattttacgcatctgcaactcctcaacttgatgaattgcttaaagaagctagtaagcaggtccaaaatccgaacaatgggacacagagtctctatgatctgtggatggcttctaacagttctcctttgattggaagattaggaggtggaggatcggattattctgcattcgttcaacacattggtattccatcagtggacatgacgattgggtcagactatgcagtctatcatagcttgtatgatgacttcatctggatggaaaagtttggagatcccttgttccagaggcatgttgcagttgcgagcatgtggggtcttgttgctcttaggctctcagatgaggagatcctacccttcaactacagcaattatgccacggagcttgagaatggagcattggatataagtgaaagtgtactgggagtgtctgtcagcttatcgcccctgcacaagtcaatcaaagagttcagaaaggcagttctgaaagtggattctgaattgaaggctctacagacatggaaattttgggccccatggaaaaacagtcccttgaaggtcagagacatcaatgaccggctgatgatgaccgaacgggcattcactgaccgggaaggactatctggacggccatggtacaagcacctgatatacgcaccttcactgcacaacgactacggggctcaagtgtatccaggtgttgatgacgccattcagaaggcgaagaaaacaaatacttctgaatcctggcaatctgtacagcatgagatttacagggtctctcgagtcataaatcaggcagcgctagttttaagtggagatctaacttga

SEQ ID NO: 320 - protein, 726 aa, Sorghum bicolor
MPPPQDGAHDSAARVPLLPPPAPRRAAVRLRPLPLLIAAAFAASYRLLFHLAPAPSYYQSLLLSLGSNDTAAAHLHALTIRPHLAGTGANALAAAHVASALSSHSFPTRLTSYSVLLSYPAHRSLSLSAPDRDTVLFALKQETYAGDPYDAVSDEAVPTFLAYAASGSVTAEAVYANYGRAEDYAYLAARGVNVTGKVAVARYGKVFRGDIVRNARDAGAAAAVIYTDAKDYAAGKAFPDGPWMPPTGVQVGSTFKGVGDPTTPMWPSSEGCERLSVAEAMSSDDMPGIPALPVSWMDGETILQLIGGDVAPKDWQGGDGAAAYRIGPGPAVLNLTYIGNETMVTIQNVISVIEGREEPERYVILGNHRDAWTFGAADPNSGTATLLELAQRLSELQKKGWTPRRTIILCNWDAEEYGLTGSTEWVEENRAMLTSRTVAYLNVDIAVDGYGFYASATPQLDELLKEASKQVQNPNNGTQSLYDLWMASNSSPLIGRLGGGGSDYSAFVQHIGIPSVDMTIGSDYAVYHSLYDDFIWMEKFGDPLFQRHVAVASMWGLVALRLSDEEILPFNYSNYATELENGALDISESVLGVSVSLSPLHKSIKEFRKAVLKVDSELKALQTWKFWAPWKNSPLKVRDINDRLMMTERAFTDREGLSGRPWYKHLIYAPSLHNDYGAQVYPGVDDAIQKAKKTNTSESWQSVQHEIYRVSRVINQAALVLSGDLT

SEQ ID NO: 321 - DNA, 1089 bp, Sorghum bicolor
atgggcaggtcgtcccgctgcagctgcagcagatcagtggccgccgtgcagctgctggtggccatctcagcggtctgcggcgccgccctctcgtcggccacggtgaccgtgaacgaacccgatatcgcaaacggcctctcctggaggttctacgacgcgtcctgcccgtacgtggaggacatcgtgagctggcacgtcaccgaggcactccgccgcgacatcggcatcgccgccgggctcatccgcatcttcttccacgactgcttcccgcagggctgcgacgcgtccgtgctcctgtcgggtcccaagagcgagcagattgagatacccaaccagacgctgcgtcccgcggcgctgaaactcatcgacgacatccgcgccgacgtccacgccacctgtgggccaaccgtgtcctgcgccgacatcaccacgctagctacccgggacgccgtcgtcgcgtccggcggccccttcttcgacgttcctctggggcgtcgcgacggtctggcgccggcgtcgagcgacctggtgggcaccctgccggcgcccttcttcgacgttccgacgctgatctcggcgttcgagaaccgcggcctgaacaaggcggacctggtggctctctccggcgcgcacaccgtgggccgcggccactgctcctccttcagcgaccgtctgccgccgaacgcggacgacgacaccatggacccggcgttccggcggaagctggcggccaagtgcgccagcgaccccagcgggaacgtggtcacccaggtgctggacgtgcgcacgcccgacgccttcgacaacaagtactacttcgacctcatcgccaagcaggggctgttcaagtcggaccagggcctcatcaaccacccggacaccatgcgcaccgccacacgcttcgcgctcaaccaggccgccttcttcgaacagttcgccaggtccttcgtcaagatgagccagatggacgtgctcaccggcaccgccggagagatccgcctcaactgctccgtgcccaatatcgtcgtctcatcatcagcccacaccgccgccggcgacggcgacgaggggcgagcggccgacgagtga

SEQ ID NO: 322 - protein, 362 aa, Sorghum bicolor
MGRSSRCSCSRSVAAVQLLVAISAVCGAALSSATVTVNEPDIANGLSWRFYDASCPYVEDIVSWHVTEALRRDIGIAAGLIRIFFHDCFPQGCDASVLLSGPKSEQIEIPNQTLRPAALKLIDDIRADVHATCGPTVSCADITTLATRDAVVASGGPFFDVPLGRRDGLAPASSDLVGTLPAPFFDVPTLISAFENRGLNKADLVALSGAHTVGRGHCSSFSDRLPPNADDDTMDPAFRRKLAAKCASDPSGNVVTQVLDVRTPDAFDNKYYFDLIAKQGLFKSDQGLINHPDTMRTATRFALNQAAFFEQFARSFVKMSQMDVLTGTAGEIRLNCSVPNIVVSSSAHTAAGDGDEGRAADE

SEQ ID NO: 323 - DNA, 2382 bp, Sorghum bicolor
atgtcgtcgccgccggaggatgtcacggtgggcatggaggaggagcagcggcccctgaaccgggcactgctccaccggagcgccaccaacaacacctcccaggtggccatggtcggctccaatccttgccctatcgagagcctcgactacgagatgatagagaacgagctgttcgaccagaactggaggacgaggtccaagggcgaccaggtgcggtacgtggtgctcaagtgggccttctgcttcgccatcggcatcctcaccggcaccgtcggcttcgtcatcaacctcgccgtcgagaacgtcgccggcttcaagcaccaggccgtctccgccctcatggactccaccagctactggacggcgttctgggtgttcgccggcggcaacctggcgctgctgctgctggcgtcgtcgatcacgtcgttcgtgtcgccggcggccggcgggtcggggatcccggaggtcaaggcgtacctcaacggcgtcgacgcgcccaacatcttctccctgcggaccctcgctgtcaaggtcgtggggaacatcgcgggcgtatcatcgtcgctgcacgtcggcaaggcggggccgatggtccacaccggcgcgtgcatcgccgccatcttcgggcagggaggctcccgcaagtacggcctcacctgccgctggctgcgctacttcaagaacgaccgggaccggcgcgacctggtgaccatcggcgccggcgccggggtggcggcggcgttccgcgcgcccgtcggcggcgtgctgttcgctctcgagtccctctcgtcgtggtggcgcagcgcgctcatctggcgctccttcttcacgacggccgtggtggcggtggtgctccgcctcttcatcgagctgtgcgcgtccgggcggtgcggcatgttcggccgcggcggcctcatcatgtacgacgtgagcaccattttcgacgacctcatgacctaccacctcaaggacatccccaccgtcatcctcatcggcgtcaccggcgccctcctcggcggcctctacaacttcctcatgatcaaggttctccgagtctacaacgccatcaacgagagaggaggagcgcacaagctgctgttagcggccaccgtctccatggtgacgtcgtgctgcgtgttcggcctgccatggctggcgccgtgccggccgtgcccgacgacggggccgctagcgtcgccggacgggacgtgccacgcgctgaaccgtttccggcggttccactgcccggcggggcactacaacgacctcgccagcctgttcctcaacatcaacgacgacgccatccgcaacctctacaccacgggcaccaacgacgtgtaccacccggcgtccatggccatcttcttcgtggcgtcgtacgcgctcggcgtgctgagctacggcgtggtggcgccgtcgggtctcttcgtccccatcatcctcaccggcgccacctacggccgcctcgtcgccatgctgctcggcggccggtccggcctcgaccacggcctcgtcgccatcctcggctccgcgtccttcctcggcgggacgctccggatgacggtgtccgtgtgcgtcatcatcctcgagctcaccaacaacctgctcctcctcccgctcgtcatgctcgtgctgctcatctccaagacggtcgccgactccttcaactccagcatctacgacctcatcctgcgcctcaagggcctgccgcacctcgacggccacgccgagccgtacatgcggcagctcaccgtcggcgacgtggtggccggcccgctgcggagcttcggcggcgtcgagaaggtcgggagcgtcgtgcacacgctgcggaccacggggcaccacgcgttccccgtcgtcgacgagccgccattctcgccggggccgccggtgctctacggcctggtgctgcgcgcgcacctgctggtgctgctcaagaagagggagttcctggcggcgcccgagcggtgccggaaggagtacgtggccgggaggttccaggcggaggacttcgacaagcgcgggtccgggaagcaggacgccatcgccgacgtggtgctgtcgccggaggagatggagatgtacgtcgaccttcaccccttcaccaacacgtcgccgtacacggtggtcgagaccatgtcgctggcaaaggcgctcgtgctgttccgggaggtcggtctgcgccacctcctcgtcgtgcccaaggcctgcgataggtcgccggtggtgggcatcttgacgaggcatgacttcatgccggagcacatcctggggctgcaccctgtgcttctaaaaagcaggtggaagaggctccggtggcagaggggcgccgtggccaagtacttgcgctcgctcattgagtgggtcgccaacagcggatga

SEQ ID NO: 324 - protein, 793 aa, Sorghum bicolor
MSSPPEDVTVGMEEEQRPLNRALLHRSATNNTSQVAMVGSNPCPIESLDYEMIENELFDQNWRTRSKGDQVRYVVLKWAFCFAIGILTGTVGFVINLAVENVAGFKHQAVSALMDSTSYWTAFWVFAGGNLALLLLASSITSFVSPAAGGSGIPEVKAYLNGVDAPNIFSLRTLAVKVVGNIAGVSSSLHVGKAGPMVHTGACIAAIFGQGGSRKYGLTCRWLRYFKNDRDRRDLVTIGAGAGVAAAFRAPVGGVLFALESLSSWWRSALIWRSFFTTAVVAVVLRLFIELCASGRCGMFGRGGLIMYDVSTIFDDLMTYHLKDIPTVILIGVTGALLGGLYNFLMIKVLRVYNAINERGGAHKLLLAATVSMVTSCCVFGLPWLAPCRPCPTTGPLASPDGTCHALNRFRRFHCPAGHYNDLASLFLNINDDAIRNLYTTGTNDVYHPASMAIFFVASYALGVLSYGVVAPSGLFVPIILTGATYGRLVAMLLGGRSGLDHGLVAILGSASFLGGTLRMTVSVCVIILELTNNLLLLPLVMLVLLISKTVADSFNSSIYDLILRLKGLPHLDGHAEPYMRQLTVGDVVAGPLRSFGGVEKVGSVVHTLRTTGHHAFPVVDEPPFSPGPPVLYGLVLRAHLLVLLKKREFLAAPERCRKEYVAGRFQAEDFDKRGSGKQDAIADVVLSPEEMEMYVDLHPFTNTSPYTVVETMSLAKALVLFREVGLRHLLVVPKACDRSPVVGILTRHDFMPEHILGLHPVLLKSRWKRLRWQRGAVAKYLRSLIEWVANSG

SEQ ID NO: 325 - DNA, 1557 bp, Sorghum bicolor
atggcgccgcagccaccgcttgctcccgccgacggcatcgtcgatcgcgacgtctggctcgcctgcgccgtcccgctctcccgcctccccaccgtcggcgccgaggtctactacttcccgcacggccacgccgagcagtgccccgcgcacctcccggcgccgatccccgcgccgcacctcttcccctgcatcgtcaccaacctcaccctcggcgcggacgacaagaccaacgaggtgttcgccaaaatctccctcagtccaggcccccaccacgcccccgccgccgcttcgtctcttgttggtcccgaccccaccaccaccaccaaggagagcgagagcgacagccccccgcacccgcagccgcaggagctcagctacttcaccaaggagctcacgcagagcgacgccaacaacggcggcggcttctccgtcccgcgctactgcgccgaccacatcttccccacgctcgacttcgacgccgacccgcccgtgcagaacctcgtcatgcgcgacaccaggggcaatccctggcagttccgccacatctaccgcggcacgccgcgccgacacctgctcaccaccggatggagcaggttcgtcaacgccaagctgctcgtcgcgggggacatcgtcgtcttcatgcgccgcacaaacggcgacctcatcgtaggcctgcgacgaacgccaaggtacccgctcgtcttccccggggccgacgccaacgccaacgccaaccaggaccagcagcccccgccccgcaacgcgcgcgcgcgggtgccgccccaggacgtcatggaagccgcgcgcctcgccgccgagggcaggcccttcaccgtcacctacttccccagacaggccgcaggggagttcgtcgtcccgcgcgacgaggtggagcgcgcgctcgccacccgctgggagccaggcacggaggtgcgcatgcaggtcatggaggccgaggacacgcggcgcacagtgtgggccgacggccacgtcaaggcgctccaccaaaacatctggcgagcgctcgagatcgactgggatgactcctctccattatcactaaaactgagcagatttgtgaatgcttggcaagtccagcttgttgcataccctcctcttccaaatacagtgaggatttgcgacccaatcgcgcctctttgccctggagatgtctcttatccactgatcggacctgaaagccaggccatggctatgatattggggtcaccgattcctgctggcatgcagggagccaggcacaccggcccttgtgctgcaccctctgaatcctctgcaatgctcacgactcagttgctattccccctaaccaacacggactttcagatgccaccgcgtacaagccccagtgcttcctctgagattctggatcctgaaggtgcttctcctcccaacaactcagtaagcatgcgtccagcagagcttccagtccaagtgaagagcatacagctctttggcgccacaatcacaccccatgttgtgcagagtgctactaatggtgatggtatggctgatggcaatgttggaaaagatttctaa

SEQ ID NO: 326 - protein, 518 aa, Sorghum bicolor
MAPQPPLAPADGIVDRDVWLACAVPLSRLPTVGAEVYYFPHGHAEQCPAHLPAPIPAPHLFPCIVTNLTLGADDKTNEVFAKISLSPGPHHAPAAASSLVGPDPTTTTKESESDSPPHPQPQELSYFTKELTQSDANNGGGFSVPRYCADHIFPTLDFDADPPVQNLVMRDTRGNPWQFRHIYRGTPRRHLLTTGWSRFVNAKLLVAGDIVVFMRRTNGDLIVGLRRTPRYPLVFPGADANANANQDQQPPPRNARARVPPQDVMEAARLAAEGRPFTVTYFPRQAAGEFVVPRDEVERALATRWEPGTEVRMQVMEAEDTRRTVWADGHVKALHQNIWRALEIDWDDSSPLSLKLSRFVNAWQVQLVAYPPLPNTVRICDPIAPLCPGDVSYPLIGPESQAMAMILGSPIPAGMQGARHTGPCAAPSESSAMLTTQLLFPLTNTDFQMPPRTSPSASSEILDPEGASPPNNSVSMRPAELPVQVKSIQLFGATITPHVVQSATNGDGMADGNVGKDF

SEQ ID NO: 327 - DNA, 783 bp, Sorghum bicolor
atgcctccttgcgctctcaccgtcgactccctaaatccaaaggtgctggcgctcgcggatcacctcggcggcgacgccattgcccgccgcgcgcagtgcatccaaaatgagatagaaacaaaaccggggtcacaccctttcgacgagataatctattgcagcctcagcaatccacaatccatgggacagcagccaaacaagttcttccgagaggttcttgccttgtgcgactatccccatcttctagaacagagtgaaaccaattccttgttcagctccgatgcaatagcaagggcacgggagattctagacctctttcctgggagagcaacaggaggatatagtcactgtcagggtattgaaggtttgcgcaatataatcgctgctggaattgcctctcgagataatttcccatgtgatgcagaggacattttcctgacagatggagcagctccaccggttcacatgatgatgcacctactgatacgggatcaaaaagatggtatcctctgcccaattccatcacattccttgtacacaagttatatggttctccagggcgctactcttgtgccatattaccttgacgaatccagaggctggggagtgagcatatcagatctgaagaagcagctggatggtgcccgatcaatgggtgtcgttgtgaggggacttgtggttataaatccaggcaaccctactggacatgtacttatggaggaaaatcagtgtgaaattgtggatttctgtaggaatgaagaccttgttcttctagcagatgag

SEQ ID NO: 328 - protein, 484 aa, Sorghum bicolor
MPPCALTVDSLNPKVLALADHLGGDAIARRAQCIQNEIETKPGSHPFDEIIYCSLSNPQSMGQQPNKFFREVLALCDYPHLLEQSETNSLFSSDAIARAREILDLFPGRATGGYSHCQGIEGLRNIIAAGIASRDNFPCDAEDIFLTDGAAPPVHMMMHLLIRDQKDGILCPIPSHSLYTSYMVLQGATLVPYYLDESRGWGVSISDLKKQLDGARSMGVVVRGLVVINPGNPTGHVLMEENQCEIVDFCRNEDLVLLADEVYQENVYTDEKKFHSFKKIARSMGYGEGDISLVSFHSISNGYYGECGRRGGYMEVTGFNCEVKKQVYKVASLSSCSNITGQILMSLVMNPPQVGDESYTSYQAERDSILSSFARCAEAMVCTFNRLEGVTCSKAEGAMFVFPSVRLPKKAIAAAEECNTQPDAFYAVRLLETTGIVVVPGSVFGQIHGTWHFRCTVLPQEEKLPLIISRFMAFHEVFMEEFRD

SEQ ID NO: 329 - DNA, 1089 bp, Sorghum bicolor
atgctgtcgtcttccacctccaccctccgcctccaccaaccaacccgtccccaccgccaccacccgccggccccggccgccgggggcgccacccacctagcctccccgcggcggtggcgcggccacgccccgggggcgtcgtccccgccggcgctccgcgcacgggcccagcgcatccgcgcgctggacgccgcccagccgttcgacttcgagtcccgcgcggcggggctgctggaggagcgtcagcgcctgaagatcgccatcgtcgggttcggcaacttcgggcagttcctggcgcgcaccttcgcgcggcaggggcacacgctgctcgcccactcccgcaccgaccactccgcgctggcgtccacgctgggggcctccttcttcaccgacccgcacgacctgtgcgagtgccacccggacgtggtgctcctcgccacctccatcctctccgcggaggccgtgctccgctcgctgcccgtccaccgtctccgccgcaacacgctcttcgtcgacgtgctctccgtcaaggagttccccaggaacctgctgctcagctcgttaccgcccgacttcgacgtcatctgcacccaccccatgttcgggccggagtcggcgcgcgacggctgggacggccttcccttcgtgttcgacaaggtgcgcgtgggcgactgcccggcccgccgcgcccgcgccgaggcgttcctcaacatcttcgagcgggaagggtgccggatggtggagatgtcgtgcgccgagcacgacgcgcacgccgccgagacccagttcctgacgcacaccgtcgggaggatgctcgccatgctggagctccgctccacgcccatcaacaccaaggggtacgagacgctgctccgcctggtcgacaacacctgcagcgacagcttcgacctctacaacgggctcttcatgtacaacaagaactccaccgagctgctcaaccgcgtcgagtgggccatggactccgtcaagaagaagctcttcgacggcctccacgacgtgctccggaagcagctcttcgaggggtcgccgcacgcccccaatgtctcctcctccaacgtccgcaagtaa

SEQ ID NO: 330 - protein, 362 aa, Sorghum bicolor
MLSSSTSTLRLHQPTRPHRHHPPAPAAGGATHLASPRRWRGHAPGASSPPALRARAQRIRALDAAQPFDFESRAAGLLEERQRLKIAIVGFGNFGQFLARTFARQGHTLLAHSRTDHSALASTLGASFFTDPHDLCECHPDVVLLATSILSAEAVLRSLPVHRLRRNTLFVDVLSVKEFPRNLLLSSLPPDFDVICTHPMFGPESARDGWDGLPFVFDKVRVGDCPARRARAEAFLNIFEREGCRMVEMSCAEHDAHAAETQFLTHTVGRMLAMLELRSTPINTKGYETLLRLVDNTCSDSFDLYNGLFMYNKNSTELLNRVEWAMDSVKKKLFDGLHDVLRKQLFEGSPHAPNVSSSNVRK

SEQ ID NO: 331 - DNA, 1608 bp, Sorghum bicolor
atgagcgacgtctccgtccgctttgtggtggcggtggcggtggcggcggtggccgccatctcgctcgccgccgcggtgtccgccgcgtccgccgctcacgactacggcgacgcgctgcacaagagcctgctctacttcgaggcgcagcggtcggggcgtctaccgtacaaccagcgggtgcggtggcgtggccactcggggctcaccgacgggctggagcaaggcgtggacctggtgggcggctactacgacgccggcgaccacgtgaagttcggcctgcccatggcgttcacggtgacgctcctctcctggggcatgctcgagtacggcggcggcgtggcggacgccggggagctggcgcacgcgctgcaggccatcaagtggggcaccgactacttcgtcaaggcgcacacggcgcccaccgagctgtgggcgcaggtgggcgacggcgactccgaccactactgctggcagcggcccgaggacatgaccacgtcgcggcgggcgtacaaggtggacgcggaacacccgggctccgaggtcgccgccgagaccgccgccgccatggccgccgcgtccgccgtgttccgcgccgccggcgacgcgcactacgcgcacctgctgctccaccacgcgcagcagctgttcgacttcgccgacacctaccggggacgctacgacgacagcgtcgacgtggtcaagagctactacccgtcctccagcggctaccaggacgagctgctgtgggcggcgctctggctgcaccgcgtcaccggccgccgtgactacctccgctacgcgctcgacaacgccgaggcgttcggcggcaccggctgggccgtctccgagttcagctgggacatcaagtacgccggcctccaggttctcgcatcccagctgctggtggaggcgaaggagcagcggctgcggctgagcgcggaggaggtggcggtggtggagcagctgcggtccaaggcggagtactacgtgtgctcgtgcatgaaccggaaccccggcggcgcgaagcacaacgccggccgcaccccggcggggctgctcttcatccgcccctggaacaacctccagtacgcctccggcgcggccttcctcctcaccgtctactccgacgtcctctcctccctcgaccagcccctccgctgcggcggctctggcgacgacgacggcgagcccgccgccgccggcgacgccggcgaggtgctggcgttcgccaagtcccaggccgactacatcctgggcacgaacccgatgcgcaccagctacctggtcgggtacggcgcggcgtacccgcggcaggtgcaccaccgcgcggcgtcgagcgcgtcgtacagtcacgaccgggacttcatcggctgcctgcaggggttcgactcgtggtacagcgcgcggcgggagaacccaaacgacctcgtcggcgccgtcgtcggcgggcccaacggcgaggacgtcttcaacgaccagcgcggcgcgtacatgcagaccgaggcctgcacgtacaacacggcgcccatggtcggggtcttctccaagctcatgcagctggaggggcagtcgccgcgcccggcgccggcgccggcggaggatctttga

SEQ ID NO: 332 - protein, 535 aa, Sorghum bicolor
MSDVSVRFVVAVAVAAVAAISLAAAVSAASAAHDYGDALHKSLLYFEAQRSGRLPYNQRVRWRGHSGLTDGLEQGVDLVGGYYDAGDHVKFGLPMAFTVTLLSWGMLEYGGGVADAGELAHALQAIKWGTDYFVKAHTAPTELWAQVGDGDSDHYCWQRPEDMTTSRRAYKVDAEHPGSEVAAETAAAMAAASAVFRAAGDAHYAHLLLHHAQQLFDFADTYRGRYDDSVDVVKSYYPSSSGYQDELLWAALWLHRVTGRRDYLRYALDNAEAFGGTGWAVSEFSWDIKYAGLQVLASQLLVEAKEQRLRLSAEEVAVVEQLRSKAEYYVCSCMNRNPGGAKHNAGRTPAGLLFIRPWNNLQYASGAAFLLTVYSDVLSSLDQPLRCGGSGDDDGEPAAAGDAGEVLAFAKSQADYILGTNPMRTSYLVGYGAAYPRQVHHRAASSASYSHDRDFIGCLQGFDSWYSARRENPNDLVGAVVGGPNGEDVFNDQRGAYMQTEACTYNTAPMVGVFSKLMQLEGQSPRPAPAPAEDL

SEQ ID NO: 333 - DNA, 1998 bp, Sorghum bicolor
atggggtgcgcgcaggggaagccctcgcggggctcgcccgcccgcagcgacggccgcggcgtggaccgcctgaaacgcgacaacgcctacctccccggctccagcgtctcccgcctctccgacccgctcccggccaccgctgccgtggagcgcgctccggctctgcccggcaaagaacacgcccgccgagccgccgccgccgccgccgccgtcccaagggggaagaccccggacgccgacgccgacgccgacgccgcggcacagcagcaggcgtcgtcgtcgtcggcgaccccgtcgccgctcccgccacacccgccgcggcgcgacgacgagctggtggacgggtggccgacgtggctccttgccaacgtgccccgcgaggcgctgcagggcatcgtgcccaagagcgcggacgcctacgacaagatcgagaaggtcgggcagggcacgtacagcaacgtgtacaaggcgcgggagcgcgggacggggcggatcgtggcgctcaagaaggtgcggttcgacacgtccgagtcggagagcgtgcggttcatggcgagggagatccggttcctgcagcggctggaccaccccaacgtgatgaagctggagggcatcgccacctcccggatgcaccgcagcatctacctcgtcttcgacttcatgtactccgacctcgccaggctcgtcctccgctccggcaaccgcctcaccgagccgcagatcaagtgctacatgcagcagctgctcgcgggtctgcagcactgccacgagcgcggcatcctgcaccgggacatcaagggctccaacctgctcatcgaccgccacggcgtgctcaagatcggcgacttcggcctcgccaactactacggcgccagccgccggcatccgctcaccagccgagtcgtcacgctctggtaccgcgcgcccgagctgctgctaggctccaccagctacggcgtcggcatcgacctgtggagcgcgggttgcctcctcgccgagatgttcttcggcaagcccctcatgcccggcagtggcgaggtggatcagctgctgaagatcttcaggctgtgcgggtcgccgccggacgactactggcggaagatgaagctgtcgccgtcgttcaagccccccaagccgtacaaggccacgacggcggagcggttccgcgacctgccgccgtcgtcgctcggcctgctcgccacgctcctcgcgctcgacccggccgcgcgcggcaccgccggacaggccctgcagaacagcttcttcagcacgccgccgctgccgtgcgacctctcggcgctccccgtcgtgtacaaggaggaggacgaggtcgacgcgaggaagccgaggagagcgcgctcgcagagccacaggcggaaggacggcaagcagaaagccgaggaggagaagcagtcggagatcaacagcgggtctcctcctgagaaacaggcgcaggcgcagcccatgcggagtcggccgtcggacattaccatccgtgtaagtcctggccaagatccagtaactaacacaggaaatccaggccaagaatcagctgctgccaatgcttcctccagcgctcacgacgcatcatcagaaaaagccatcgtcggcgcctcatccagcacagtcgcgaaacggttttcgcctagccctgtcgttcaggacgcgagcccggttcagatggtagttcaagatcagaagcagctgccgacagcaaacgcctcccaccactcaggcagcgacgacgacgaggaccacgtcaaccaccacctggttgcggctccggaccacggcgacggagaggaggaggaggaggaggaggaggccggtggcgagccgccgtccggcatcggcagcggcggtggcagcgtgaagcgcgtcggcccggagagcaggtcggctgccttcgtgtcggacttcgaggcggccgccgcggtgctgcgcggatcggacgaattcccttcttccaagcagtacgttcttgtggatcacctgtag

SEQ ID NO: 334 - protein, 665 aa, Sorghum bicolor
MGCAQGKPSRGSPARSDGRGVDRLKRDNAYLPGSSVSRLSDPLPATAAVERAPALPGKEHARRAAAAAAAVPRGKTPDADADADAAAQQQASSSSATPSPLPPHPPRRDDELVDGWPTWLLANVPREALQGIVPKSADAYDKIEKVGQGTYSNVYKARERGTGRIVALKKVRFDTSESESVRFMAREIRFLQRLDHPNVMKLEGIATSRMHRSIYLVFDFMYSDLARLVLRSGNRLTEPQIKCYMQQLLAGLQHCHERGILHRDIKGSNLLIDRHGVLKIGDFGLANYYGASRRHPLTSRVVTLWYRAPELLLGSTSYGVGIDLWSAGCLLAEMFFGKPLMPGSGEVDQLLKIFRLCGSPPDDYWRKMKLSPSFKPPKPYKATTAERFRDLPPSSLGLLATLLALDPAARGTAGQALQNSFFSTPPLPCDLSALPVVYKEEDEVDARKPRRARSQSHRRKDGKQKAEEEKQSEINSGSPPEKQAQAQPMRSRPSDITIRVSPGQDPVTNTGNPGQESAAANASSSAHDASSEKAIVGASSSTVAKRFSPSPVVQDASPVQMVVQDQKQLPTANASHHSGSDDDEDHVNHHLVAAPDHGDGEEEEEEEEAGGEPPSGIGSGGGSVKRVGPESRSAAFVSDFEAAAAVLRGSDEFPSSKQYVLVDHL

SEQ ID NO: 335 - DNA, 2130 bp, Sorghum bicolor
atgattactttcgtggactcggcggccatggagcgggagcgggagagtgacaggtgcctggacccgcagctgtggcacgcctgcgccggcggcatggtccagatgccgccggtgcactccaaggtgtactacttcccgcagggccacgcggagcacgcgcagggccccgtcgtcgacctccccgccggccgtgtcccggccctcgtcctctgccgcgtcgccgccgtccgcttcatggccgatccggacaccgacgaggtcttcgccaagatccgcctcgccccggtccggcccaacgagccgggatacgctgctgacgccgacgacgccattggcgccgcggcggcgggcggcggcgcgcaagaggacaagcccgcgtccttcgccaagacgctgacgcagtctgacgccaacaacggcggcggtttctccgtgccacgctactgcgccgagaccatcttcccgcggctggactactccgccgacccgcccgtccagaccgtgctcgccaaggacgtgcacggcgtcgtctggaagttccgccacatctaccgcggcacgcctcggcgccacctgctcaccaccgggtggagcaccttcgtgaaccagaagaagctcgtggccggggactcgattgtcttcatgcggacggagaacggggacctctgcgtcggcatccggcgcgccaagaagggtggcatcggagggcccgagttcctgcaccaccaccagccgcccccgccgccgggcggcggcggctacgccgggttctccatgttcctgagaggaggagaagaggacggcagcaagatgatggccacgggcgcggccacgagggggaataaggtcagggtgcgggtgcggccggaggaggtcgtcgaggccgcgaacctcgccgtgagcgggcagccgttcgaggtggtctactacccgagggcgagcacgccggagttctgcgtcaaggctggcgcggtccgcgccgccatgcgcacccagtggtgcgccgggatgcggttcaagatggccttcgagacggaggactcgtccaggatcagctggttcatgggcactgtctccgccgtgcaggtcgctgaccccatcagatggcccaattcaccctggaggcttcttcaggtggcttgggatgaaccggacttgttacagaacgtgaagagagtgagcccatggctggtcgagcttgtctcaaacatgccggccatccaccacctcacgccgttctcgccgccgccgaggaagaagctgtgtgttccactgtacccggagcttccgctggagggccaccagttcccggcgccgatgttccatggaagccctctcggccgtggtgttggcccgatgtgctatttcccggatggcactcctgcaggcatacagggagccaggcatgctcaatttggcatatctttatcagatctccaccttgacaagctgcagtcgagtctgtcaccgcacgggcttcaccaccaccagctggacggccacggcgtgcagccgaggatcgccgctggcctcatcatcggccacccggcagcagctcgagatgacatctcgtgcttgctcaccattggcaccaccccacagaacaggaaaccatcatcagacgtcaagaaggcggcggcggcggcaccgcaactgatgctctttgggaaaccgattctcactgagcagcagatatctctaggcaatgtcgcgggcttcccggcgccgaagaagagcccttctgatgacgttgccgagaggacggtgagcaactcggacgtctcaagccccgggagcaaccatggtggctcgtccaggtccagtggaggagccccgtcgtgccaggacaacaaggtgcctgatctcgggctggagaccggccactgcaaggtgttcatgcagtcggaggatgttgggcgcacgctcgacctctctgctgttggctcgtacgaggagctctaccagaggctcgccgacatgtttggcatcgacaagactgagctgatgagccatgttttctaccgcgacgacgcttctggagcgctcaaacacaccggcgacaagcctttcagtgagttcacgaaaactgcccggaggctgaccatactaacggacgccgagcagcgataa

SEQ ID NO: 336 - protein, 709 aa, Sorghum bicolor
MITFVDSAAMERERESDRCLDPQLWHACAGGMVQMPPVHSKVYYFPQGHAEHAQGPVVDLPAGRVPALVLCRVAAVRFMADPDTDEVFAKIRLAPVRPNEPGYAADADDAIGAAAAGGGAQEDKPASFAKTLTQSDANNGGGFSVPRYCAETIFPRLDYSADPPVQTVLAKDVHGVVWKFRHIYRGTPRRHLLTTGWSTFVNQKKLVAGDSIVFMRTENGDLCVGIRRAKKGGIGGPEFLHHHQPPPPPGGGGYAGFSMFLRGGEEDGSKMMATGAATRGNKVRVRVRPEEVVEAANLAVSGQPFEVVYYPRASTPEFCVKAGAVRAAMRTQWCAGMRFKMAFETEDSSRISWFMGTVSAVQVADPIRWPNSPWRLLQVAWDEPDLLQNVKRVSPWLVELVSNMPAIHHLTPFSPPPRKKLCVPLYPELPLEGHQFPAPMFHGSPLGRGVGPMCYFPDGTPAGIQGARHAQFGISLSDLHLDKLQSSLSPHGLHHHQLDGHGVQPRIAAGLIIGHPAAARDDISCLLTIGTTPQNRKPSSDVKKAAAAAPQLMLFGKPILTEQQISLGNVAGFPAPKKSPSDDVAERTVSNSDVSSPGSNHGGSSRSSGGAPSCQDNKVPDLGLETGHCKVFMQSEDVGRTLDLSAVGSYEELYQRLADMFGIDKTELMSHVFYRDDASGALKHTGDKPFSEFTKTARRLTILTDAEQR

SEQ ID NO: 337 - DNA, 1380 bp, Sorghum bicolor
atggcctccgccgccttcgccgtctcctcgccggcggcctccgccgtcgccgcgcgatccaaggtgcttggacgtggagctaatctggggagaaatagaactggctgccgcgtcggtatcacgcggaagaactttggccgtgttatgatggcccttgcagtggatgtttctcgttttgaaggagtgccaatggctcctccagacccaattcttggggtttcagaggcttttaaagcggataaaaatgatctgaagctcaatcttggtgttggtgcctataggacagaagagttgcagccctatgtgctcaatgtagtcaagaaggctgaaaagcttatgttggagaaaggagataacaaagagtatcttcccattgaaggtttagccgcgtttaacaaagcaacagcagagctattgcttggagctgataaccctgttattaagcaagggctggttgctacaattcagtctctctcgggcactggatcactgcgtctcgctgcagcattcatacaaagatacttccctgaagctaaagtaatcatatcatcgcccacctggggtaaccacaagaatatcttcaatgatgctagggtaccttggtcagagtaccggtattatgaccccaagactgttgggttggattttgagggaatgatagctgacattgaggctgctcctgaaggatcttttgttctgctacatggttgtgctcacaacccaactggaatagacccaactcctgaacagtgggagaaaattgcagatgtcatccaagagaaaaaacatatgcccttctttgatgttgcatatcagggttttgccagtggaagccttgatgaagatgcattttctgtgaggctttttgttaaacgtggcatggaagtgtttgttgcacaatcttacagcaagaatcttggtctatattctgaaaggattggtgcaataaatgttgtgtgctcagcaccagacattgcagatagggtaaagagccagctgaaacgattggcacgacccatgtactcgaacccccctattcatggtgccaggatagttgccaatgttgttggtgatccgactatgtttggtgaatggaaacaagagatggaggaaatggctgggcggatcaagaatgtaagacagaagctctacgatagtttgtctgcgaaggaccagagtggcaaagactggtctttcattctgaggcagattggcatgttctcctacactgggttgaacaaagcacagagtgataacatgacagataaatggcatgtttacatgaccaaggatgggcggatctcattagctgggctgtccctagctaaatgcgattatcttgccgacgccatcatcgattccttccataacgtcaactag

SEQ ID NO: 338 - protein, 459 aa, Sorghum bicolor
MASAAFAVSSPAASAVAARSKVLGRGANLGRNRTGCRVGITRKNFGRVMMALAVDVSRFEGVPMAPPDPILGVSEAFKADKNDLKLNLGVGAYRTEELQPYVLNVVKKAEKLMLEKGDNKEYLPIEGLAAFNKATAELLLGADNPVIKQGLVATIQSLSGTGSLRLAAAFIQRYFPEAKVIISSPTWGNHKNIFNDARVPWSEYRYYDPKTVGLDFEGMIADIEAAPEGSFVLLHGCAHNPTGIDPTPEQWEKIADVIQEKKHMPFFDVAYQGFASGSLDEDAFSVRLFVKRGMEVFVAQSYSKNLGLYSERIGAINVVCSAPDIADRVKSQLKRLARPMYSNPPIHGARIVANVVGDPTMFGEWKQEMEEMAGRIKNVRQKLYDSLSAKDQSGKDWSFILRQIGMFSYTGLNKAQSDNMTDKWHVYMTKDGRISLAGLSLAKCDYLADAIIDSFHNVN

SEQ ID NO: 339 - DNA, 873 bp, Sorghum bicolor
atgtctgcacccatggtggacgccgattacatggccgagatcgagagggcgcggcgggacctccgcgccctcatctccagcaagaactgcgcgcccatcatactccgcctcgcatggcatgacgccggcacttacgacgccaagaccaacaccggaggccccaacgggtccataaggctcccacaggagtacagccactcttcaaatgcagggctcaagattgccattgacctgctagagccaataaaacagaagcacaccaagatcacatatgcagacctgtatcagctcaccggagttgtcgccgtcgaagttactggtggaccaaccattgatttcgttcctggcagaaaggattcgtcggcttgtccagaagaaggacgcttgccagatgctagaaaaggtgcttcgcatcttagagaagtcttctaccggatgggtttatctgacaaggacattgtggcactctccggcggtcatactctgggaagagcacatccagagaggacaggatttgatggcccatggaccaaggaacctctgaaatttgacaactcttattttgttgagcttctgaaaggcgattctgaagggctcttgaaactccctactgacaaggttcttgtggaagatcctgaattccgtcagtacgtcgaactatatgccaaggatgaagaagctttctttagggactacgcggagtcacacaagaaactctcagagctaggcttcacaccgcctcgctcttctttcacatgcaaatccggaaataaacaaaagtccctgctggtgcaagctgcagctggggtcgcagttgctgctgcagttgtcgcattggcgtacctgtgcgaatccaacaagaagttcatctaa

SEQ ID NO: 340 - protein, 290 aa, Sorghum bicolor
MSAPMVDADYMAEIERARRDLRALISSKNCAPIILRLAWHDAGTYDAKTNTGGPNGSIRLPQEYSHSSNAGLKIAIDLLEPIKQKHTKITYADLYQLTGVVAVEVTGGPTIDFVPGRKDSSACPEEGRLPDARKGASHLREVFYRMGLSDKDIVALSGGHTLGRAHPERTGFDGPWTKEPLKFDNSYFVELLKGDSEGLLKLPTDKVLVEDPEFRQYVELYAKDEEAFFRDYAESHKKLSELGFTPPRSSFTCKSGNKQKSLLVQAAAGVAVAAAVVALAYLCESNKKFI

SEQ ID NO: 341 - DNA, 1782 bp, Sorghum bicolor
atgcgcgtgggcggcgggcgggacgacgaggaggtgtcccggaagctcaagagcatggacgtcgacaagctggagaacggcggcggcggcggcgaggagagcccgcacccgccgcggcccgccgtcaagtaccatggctggaaggccatgcccttcatcatcgggaacgagacgttcgagaagctggggacgctgggcacgtcggcgaacctgctggtgtacctgacgcaggtgttccacatgcggagcgtggacgcggccacgctgctcaacgggctcaacggcaccaccagcctcgcccccatcatcggcgccttcctctccgacgcctacctcggccgctacctcgcgctcgccatcgcctccgtcgcctccctcatcggcatgttcctgctgacgctgacggccggcgcggacagcctgcacccgccggagtgcaacgtgggcgagacctgcgagaaggcgacgtcgtaccagttcgcggtgctcttcatcgccttcgcgttcctggtgctggggtcggcggggatccgcccctgcagcatgcccttcggcgccgaccagttcgaccccaccacggagtccggcaagcgcggcatcaacagcttcttcaactggtactacttcaccttcacggcggccatgatggtctccgccaccgtcatcatctacgtgcagagcaacgtgagctggcccatcgggctgggcatcccgacggcgctcatgttcctggcctgcgtgctcttcttcatgggcacgcgcctctacgtgcgtgtgacgcccgaggggagccccttcaccagcgtcgtccaggtgctgtcggccgcgctcaagaagcggtcgctgaagcagcccaaggacccgaagcaggacctcttcgacccgccgcacaccagcgccatcgtcaccaagctcgcgcacacggaccagttccgatgcctcgacaaggcggccatcgtggcgtcccaggacgaggtgcgccccggcggcgccgcgcctgccgacccatggaggctctgcagcgtacagcaggtggaggaggtcaagtgcctcatccgcatcgtgcccgtctggtccacggggatcatctactacgtcgccgtggtgcagcagtccacgtacgtggtgctctcggcgctgcagtccgaccgccacctcggccgcggcggcttccagatccccgccgcgtcgttcaccgtcttcgccatgctcgcgcagacgctgtggatcccattctacgaccgtctcctgctgcccaagctccgcaagataacgggcaaggaggaggggttcacgctgctccagcgccagggcatcggcatcgcgctctccaccgtggccatggtcatctcggcaatcgtcgaggaccggcgccgtgccatcgcactgagccagccgacgctgggaaccaccatcaccggcggggcgatctcggccatgtccagcctgtggatggtgccgcagctcatgatcctggggctgtcggaggcattcaacctcatcagccagatcgagttctactacaaggagatcccggagcacatgcgcagcgtggcaggggcgctcgccttctgcaacctggcgctcggcaactacctcagcggcttcctggtgaccatcgtgcaccggaccacggggtccgggcagaactggctggcgcaagacctcaacaagggccgcctcgacctcttctactggaccatcgccggcatcggcgtctttaacctcatctacttcgtcatctgcgccaggtggtacaggttcaagggggccagcaactaa

SEQ ID NO: 342 - protein, 593 aa, Sorghum bicolor
MRVGGGRDDEEVSRKLKSMDVDKLENGGGGGEESPHPPRPAVKYHGWKAMPFIIGNETFEKLGTLGTSANLLVYLTQVFHMRSVDAATLLNGLNGTTSLAPIIGAFLSDAYLGRYLALAIASVASLIGMFLLTLTAGADSLHPPECNVGETCEKATSYQFAVLFIAFAFLVLGSAGIRPCSMPFGADQFDPTTESGKRGINSFFNWYYFTFTAAMMVSATVIIYVQSNVSWPIGLGIPTALMFLACVLFFMGTRLYVRVTPEGSPFTSVVQVLSAALKKRSLKQPKDPKQDLFDPPHTSAIVTKLAHTDQFRCLDKAAIVASQDEVRPGGAAPADPWRLCSVQQVEEVKCLIRIVPVWSTGIIYYVAVVQQSTYVVLSALQSDRHLGRGGFQIPAASFTVFAMLAQTLWIPFYDRLLLPKLRKITGKEEGFTLLQRQGIGIALSTVAMVISAIVEDRRRAIALSQPTLGTTITGGAISAMSSLWMVPQLMILGLSEAFNLISQIEFYYKEIPEHMRSVAGALAFCNLALGNYLSGFLVTIVHRTTGSGQNWLAQDLNKGRLDLFYWTIAGIGVFNLIYFVICARWYRFKGASN

SEQ ID NO: 343 - DNA, 642 bp, Sorghum bicolor; identical to SEQ ID NO: 243

SEQ ID NO: 344 - protein, 213 aa, Sorghum bicolor; identical to SEQ ID NO: 244

SEQ ID NO: 345 - DNA, 810 bp, Sorghum bicolor
atggagcatatcgccaggttcttcttcggagtttctgggaatgtcattgcgctcttcctcttcctgtcgcctgttgtcaccttctggaggatcatcaggaagcggtcgacggaggacttctccggcgtgccctacaacatgacgctgctcaactgcctcctatcagcttggtacggcctgccgttcgtgtccccgaacaacatcctggtgtcgacgatcaacgggacggggtcggtgatcgaggccatctacgtggtgatcttcctcatcttcgcggtggaccggcgcgccaggctccgcatgctgggcctcctcagcatcgtcgtctccatcttcgccaccgtggtgctcgtctcgctgctggcactccatggcaacgcccgcaaggtcttctgcggcctcgccgccaccatcttctccatctgcatgtacgcatcgccgctctccatcatgaggttggtgatcaagacgaagagcgtggagtacatgccgttcttgctctccctggccgtgttcctgtgcggcacctcctggttcatctacggcctcctcggccgcgaccccttcatcattatcccgaatgggtgcgggagcttcctgggcctggtgcagctcatcctgtacttcatctaccgaaaaaacaagggccccgccgtgccggccggcaagggagaggccgctgcagccgcggacgtggaggacgcgaagaaggtggccgctgccgtggagatggccgacgccacgacgaccaacaaggccgccgccgacaccgtcgtcggcgacggcaaggtcgtcgccagccaggtgtag

SEQ ID NO: 346 - protein, 269 aa, Sorghum bicolor
MEHIARFFFGVSGNVIALFLFLSPVVTFWRIIRKRSTEDFSGVPYNMTLLNCLLSAWYGLPFVSPNNILVSTINGTGSVIEAIYVVIFLIFAVDRRARLRMLGLLSIVVSIFATVVLVSLLALHGNARKVFCGLAATIFSICMYASPLSIMRLVIKTKSVEYMPFLLSLAVFLCGTSWFIYGLLGRDPFIIIPNGCGSFLGLVQLILYFIYRKNKGPAVPAGKGEAAAAADVEDAKKVAAAVEMADATTTNKAAADTVVGDGKVVASQV

SEQ ID NO: 347 - DNA, 762 bp, Sorghum bicolor
atggctttgctgcagagccagagccgcctgcccggcattggctgcagcagcagcatcgtcttggcaagagcgagggtgcagcagtgtctggcagcggcgtcgcactcacgcgcgcccctcctgcgagctaatggcggcaggaggagcacgacgggcctccccacctcctcctcctcctcctttaaggctggcaatgcgatcagcctcagccggcggagaataagggacctgcgcgtcgtcgcggaggcggccaccgcgggggcggccaaggtggtcacgccggcgtcgtctggcggcgtcagcgtcagcgacgtgctctggccttccgccggagcgttcttggccatggcggtactgggaaaaatggaccagatggtggcgttcaagggagtatccttgacgattgcgccccttggagcagtctgctgcgtgctttttagcgctccaggctcccctgcagccaagaaatataatatgttcgtcgcccagattggttgtgcggcttttggcgtattagccctctcgttgtttgggcctggctggttagcaagaggcgcagctctttcagccagcatagcattcatgaccatcacgggtgcctcacatccaccagctgcaagcttgcccctcttgtttatcgatggcccgaagtttcacaatctgcaactttggtacgcgcttttccctggagctgcaggctgcatcgtcctttgcttgattcaagaggtggtgctttacctgaagaagaacttcaagttttga

SEQ ID NO: 348 - protein, 253 aa, Sorghum bicolor
MALLQSQSRLPGIGCSSSIVLARARVQQCLAAASHSRAPLLRANGGRRSTTGLPTSSSSSFKAGNAISLSRRRIRDLRVVAEAATAGAAKVVTPASSGGVSVSDVLWPSAGAFLAMAVLGKMDQMVAFKGVSLTIAPLGAVCCVLFSAPGSPAAKKYNMFVAQIGCAAFGVLALSLFGPGWLARGAALSASIAFMTITGASHPPAASLPLLFIDGPKFHNLQLWYALFPGAAGCIVLCLIQEVVLYLKKNFKF

SEQ ID NO: 349 - DNA, 1179 bp, Sorghum bicolor
atggcgctgagggcgtcccccgtgtcgcatggcgccgcggcagcgccgctgccgccgttcgcgcggaggaggatggcccgtggggtggtggtggccatggcgtccaccatcaacagggtcaaaactgtcaaagaaccctatactcctccacgagaggtacatcgccaaattacccattcactaccacctcagaagcgggagatttttgattcacttcaaccttgggccaaggataacctattgaacctactgaagccagttgaaaagtcatggcagccacaggacttcctaccagagccttcttctgatggattttatgatgaagttaaagaactgagggagcgggcaaatgaaatacctgatgagtactttgtttgcttagttggtgatatggttaccgaggaagccttacctacctatcaaacaatgcttaacacccttgatggagtccgggatgaaactggtgcaagtccaaccacgtgggcggtttggacaagggcatggacagctgaagagaatagacatggtgacctccttaataagtatatgtaccttactggacgggttgacatgaaacaaattgagaagaccatacagtatctgattggttccggaatggatcctggaactgagaacaacccatacttgggtttcctttacacatcatttcaagaaagagcaacatttgtatcgcatgggaatactgcaaggcatgccaaggagtatggtgatctcaagctggcccagatatgtggtacaatagcagctgatgaaaagcgccatgaaacagcctacaccaagatagtcgagaagctctttgagattgatcctgattacacagtgcttgcatttgctgacatgatgaggaagaagatcacaatgcctgctcatctcatgtacgatggcaaggatgacaacctgtttgagcacttcagtgcagtggcgcagaggctgggcgtctacactgctaaagattatgctgacatccttgagttcttggtccagaggtggaaagttgcagatctcactgggctgtctggagaagggagaagggcacaggatttcgtctgtaccttggcacctagaatcaggcgattggacgaaagagctcaagcaagggcgaagcaagcaccagttattcctttcagttggatttatgaccgcaaggtgcagctttaa

SEQ ID NO: 350 - protein, 392 aa, Sorghum bicolor
MALRASPVSHGAAAAPLPPFARRRMARGVVVAMASTINRVKTVKEPYTPPREVHRQITHSLPPQKREIFDSLQPWAKDNLLNLLKPVEKSWQPQDFLPEPSSDGFYDEVKELRERANEIPDEYFVCLVGDMVTEEALPTYQTMLNTLDGVRDETGASPTTWAVWTRAWTAEENRHGDLLNKYMYLTGRVDMKQIEKTIQYLIGSGMDPGTENNPYLGFLYTSFQERATFVSHGNTARHAKEYGDLKLAQICGTIAADEKRHETAYTKIVEKLFEIDPDYTVLAFADMMRKKITMPAHLMYDGKDDNLFEHFSAVAQRLGVYTAKDYADILEFLVQRWKVADLTGLSGEGRRAQDFVCTLAPRIRRLDERAQARAKQAPVIPFSWIYDRKVQL

SEQ ID NO: 351 - DNA, 1023 bp, Sorghum bicolor
atgaggccgtcgctgctaaagtcctcggccgagctgctccgccgcagccgcggctacgcgtccgcggccaacccggagcggaaggtggccatcctgggcgcggcgggaggcatcgggcagccgctctcgctcctcatgaagctcaacccgcttgtctcctccctctccctctacgatatcgccgggacccccggcgtcgccgccgacgtctcccacatcaactcccccgccctggtgaaggggttcatgggggacgaccagcttggggaggcgctggagggatccgacgtcgtcatcatccccgccggggtacccaggaagcccggcatgaccagggacgacctcttcaacatcaacgccggcatcgttaaggggctctgcactgccatcgccaagcactgccccaacgctcttgttaacatgatcagcaaccctgtcaactccactgtcccgattgcggcggaggttttcaagaaggctggtacttatgataagaagaagctgtttggtgtgactactcttgatgttgttcgtgctaaaactttttatgctggaaaggcgggcgtgcccgttactgaggtgaatgttcctgttgtggggggccatgcgggtattactattctgccactcttctcacaggccactcctgcaagcaattcattgtcccaagaagacattgaggccctcaccaagaggacacaagatggtgggacggaggttgttgaagcaaaggctggaaagggctctgcaacactgtccatggcatatgctggtgctgtttttgcagatgcatgcttgaagggtctgaatggagttccggacgttgtagagtgctcttttgtgcaatcaactgtgacagagttgccgttctttgcctccaaggtacggcttggcaagaatggagtggaggaagtgcttggtcttggtgagctcaacgacttcgagaagaaggggcttgaaaacctcaagggcgagctcatgtcttccattgagaagggtgtcaagttcgcccacagcaactag

SEQ ID NO: 352 - protein, 340 aa, Sorghum bicolor
MRPSLLKSSAELLRRSRGYASAANPERKVAILGAAGGIGQPLSLLMKLNPLVSSLSLYDIAGTPGVAADVSHINSPALVKGFMGDDQLGEALEGSDVVIIPAGVPRKPGMTRDDLFNINAGIVKGLCTAIAKHCPNALVNMISNPVNSTVPIAAEVFKKAGTYDKKKLFGVTTLDVVRAKTFYAGKAGVPVTEVNVPVVGGHAGITILPLFSQATPASNSLSQEDIEALTKRTQDGGTEVVEAKAGKGSATLSMAYAGAVFADACLKGLNGVPDVVECSFVQSTVTELPFFASKVRLGKNGVEEVLGLGELNDFEKKGLENLKGELMSSIEKGVKFAHSN

SEQ ID NO: 353 - DNA, 1002 bp, Sorghum bicolor
atggtgtcgacatggctggcaacagtcttggcggcgctcgtcgtcgccacggcggcacacgcggcggcggaactggaggtcggtttctacaagcactcgtgcccaaaggccgaggagatcgtgcgcaacgccgtccgccgcggtatcgcccgtgacgccggcgtcggcgccggactcatccggatgcagttccatgactgcttcgtccggggctgcgacgcctccatcctcatcaactccacgccgggcaacaaggccgagaaggactccgtcgccaacaaccccagcatgcgcggcttcgacgtcgtcgacgacgccaaggccgtcctcgaggcgcactgcccgcgcaccgtctcctgcgccgacatcatcgcgttcgccgcccgcgacggcgcctacctcgccggcggcctcgactacaaggtcccctcgggccgccgtgacggccgcgtgtccaaagaggacgaggtgctcgacaacaatgtccccgccccgtttgacgacgtcgccgagctcatcaagagcttcaagcgcaagggtctcaacgccgacgacatggtcacgctctccggcgcgcacaccattggccgctctcactgctcctccttcacgcagcgcctttacaacttcagcggccagctcgggcggactgacccgtcgcttgaccccacctacgctgagcacctcaagatgcgctgcccatggccgtccagcaacggccagatggacaccacggtggtgccgctcgacccggtcacgccggcgaccttcgacaaccagtactacaagaacgtgctggcgcacaaggtcctgttcgtctccgacaacacgctgctcgacaacccctggacggccggaatggtccacttcaacgccgcagtcgagaaagcatggcaggtcaagttcgccaaggccatggtgaagatgggcaaggtccaggtgctcaccggcgacgagggagagatcagggagaagtgcttcgtcgtcaacccacactactag

SEQ ID NO: 354 - protein, 333 aa, Sorghum bicolor
MVSTWLATVLAALVVATAAHAAAELEVGFYKHSCPKAEEIVRNAVRRGIARDAGVGAGLIRMQFHDCFVRGCDASILINSTPGNKAEKDSVANNPSMRGFDVVDDAKAVLEAHCPRTVSCADIIAFAARDGAYLAGGLDYKVPSGRRDGRVSKEDEVLDNNVPAPFDDVAELIKSFKRKGLNADDMVTLSGAHTIGRSHCSSFTQRLYNFSGQLGRTDPSLDPTYAEHLKMRCPWPSSNGQMDTTVVPLDPVTPATFDNQYYKNVLAHKVLFVSDNTLLDNPWTAGMVHFNAAVEKAWQVKFAKAMVKMGKVQVLTGDEGEIREKCFVVNPHY

SEQ ID NO: 355 - DNA, 1314 bp, Sorghum bicolor
atggaggtgttctactacgtcgtgttcggcgcgctagccgccgtcgtggcggggctagagctcggcaagagcggcaaggaccgcgtcgccaccacctccgccttcaactccttcaagaacaactacgtcctcgtctactccctcatgatgtccggggactggctgcagggcccctacgtgtactacctctacagccagtacggcttcgacaagggcgacatcggccgcctcttcatcgccggctttggatcctccatgctcttcggcaccatcgtcggctcgctcgccgacaaacagggccgcaagagggcctgcatcacctactgcatcagctacatcctcagctgcatcaccaagcactcccccgagtacagggtcctcatgatcggccgcattctcggcggcatcgccacctccctactcttctccgccttcgagtcctggctcgtcgccgagcacaacaagagaggctttgacccgcagtggctgtccataacattctccaaagccatcttccttgggaatggcttaattgccattgtatctgggctattcgcgaaccttcttgctgagaacttgggttttggtcctgtggctccatttgatgcggctgcatgctttctagcgattggcatggctatcataatgtcctcatggagtgaaaactatggagatccatctgaaagtaaggacctgatggcccagttcaaggttgcagctaaggcaattgcttcagatgagaagattgcattgctgggagcaatacagtcattgtttgagggctcgatgtacacatttgtcttcctatggactccagcattgagtccaaatgaagaagacattcctcatggttttatatttgctacattcatgttgtcatctatgttgggtagctccattgcgtcacgtctattagcccgaaagctcaaggttgaaggttatatgcagattgtgttctcaatatcggctgtcacccttgtcctccctgttgtcaccaacatcctagtgccgacatcttctgtgaaaggaggcagcatatcagttggaggttctcttcagcttcttggtttctgcacctttgaggcatgtgttggcatattctggccatcaatcatgaagatgagatctcagtacattcccgaggaagcaagaagcacaatcatgaatttcttccgcataccactcaacttatttgtttgtgtggtgctttacaatgtgaatgcattccctatcactgtcatgtttgggatgtgttctatcttcctcttcatggcagcgatcttgcagagacggctgatgaagcacaagaaatga

SEQ ID NO: 356 - protein, 457 aa, Sorghum bicolor
MEVFYYVVFGALAAVVAGLELGKSGKDRVATTSAFNSFKNNYVLVYSLMMSGDWLQGPYVYYLYSQYGFDKGDIGRLFIAGFGSSMLFGTIVGSLADKQGRKRACITYCISYILSCITKHSPEYRVLMIGRILGGIATSLLFSAFESWLVAEHNKRGFDPQWLSITFSKAIFLGNGLIAIVSGLFANLLAENLGFGPVAPFDAAACFLAIGMAIIMSSWSENYGDPSESKDLMAQFKVAAKAIASDEKIALLGAIQSLFEGSMYTFVFLWTPALSPNEEDIPHGFIFATFMLSSMLGSSIASRLLARKLKVEGYMQIVFSISAVTLVLPVVTNILVPTSSVKGGSISVGGSLQLLGFCTFEACVGIFWPSIMKMRSQYIPEEARSTIMNFFRIPLNLFVCVVLYNVNAFPITVMFGMCSIFLFMAAILQRRLMVVSDLHKSSTKAQEMIEEDEPLNP

SEQ ID NO: 357 - DNA, 2151 bp, Sorghum bicolor
atggtctggttgcaagatcaaattgaaatgcacaagctccactggtacaggagagcccctactccatcagagttctggataccacttgctgcttggttcactgttggcctagtcggtctttggacattttttcacttcttttcattgtggcggcgaaagatcagtttaagctggatgaaaataattgccagatcgaagaggaagaattttgaaagaaaccacaaggttcctactgctgaacatgtttggaacacagaatctttgattcgtgcaaaagggatgaagtgctgtgtatgcttggaatctctctcacctgctcagccccttgggcagatgatgacttcagaaaatatggttcaccgttgcaatgtttgtggtgcagctgcgcacataatatgctcttcgaattctcagaaagactgcaaatgcgtctcaatgttcgggtccaaacatgtggtccatcagtggactgtactctggacagacgtaaccgaccaatccgaagaaggtcagtactgttgttactgtgaggagatatgcagtgaatcttttctgggaggtcctcccatatactgctgcatgtggtgccaaagactggtgcatgctgattgccagtcggccatggttactgaaacaggtgacgtttgtgaccttggtcccttcaggcgccttattctgtcaccactttttgtccgggccattagcaaacctggtggcatcttgagttctataactcatggagcaaatgagtttgcatccactgtgcgggggcgtttaaaccgaactaaaaaggagaaacatcatagcagattgccatctgacagtaatgatgattcatcaagtgataccactttgaactcaaaccagagggctggggaattaaaagctactgggggcagtgttcaaaggagtcctgagaatgatcattatagcagtgagagtgatggtagagaattcatatcagagtccagaaggttcagcagcaatgagactggtgaagttaaacttgagtacgtattgtctgaattgcctgctgattccagacctcttttagtttttatcaacaagagaagtggggctcagcgtggagatcttctcaagcacaagctacattttcttttgaatccggtgcaggtttttgaattgagttcttcacaagggccagaaacaggattatttttgttcagaaaggtaccacatttcagaatacttgtgtgtggtggcgatggtactgttggttgggttcttgatgtgatagataagcaaaattatgaatcacctccacctattgcaattcttccagctggcactggcaatgatctttcgagagttttatcatggggaggtggcctaggtgctgttgagaagcaaggtggcctttgcacagttttacatgacatagagcatgcagcagtcactatcctggatagatggaaggtggcagtagaagataagaaatcaaagaatgtggttcttgtaaagtacatgaacaactatctaggtatcggttgtgatgcaaaagtcgcccttgacattcataatctccgtgaagaaaatcctgagaaattctacagtcagttcttaaataaggtgctatatgcgagggaaggggccaagagcatcattgacagggcgtttgtggacttaccatggcaagttcggttagaagttgatggcactgagattgagataccagaggactcagaaggtgtgctggtcgcaaacatcccgagctacatgggaggggttgacctgtggcaaaatgagggtgagaatcctgaaaattttgatccacagtcgatccatgacaagatgctcgaagtggttagcatcacaggagcatggcatctgggaacactccaggttggactttctcgggcacggaggatcgcccaaggtcagtcaatcaagatacaaacgtttgctcctttccctgtccaagtggatggcgaaccttgggtccagcagccctgcacgcttaagatatcccatcacggacaggcttttatgttgaggagggcaattgaagagccacttggtcatgctgccgctatgatcaccgacgtgcttgagcatgccgaatccagccgtgtaatcactgcttcgcagaagaaagccctcctccaagaaatggctctacggctgtcatga

SEQ ID NO: 358 - protein, 716 aa, Sorghum bicolor
MVWLQDQIEMHKLHWYRRAPTPSEFWIPLAAWFTVGLVGLWTFFHFFSLWRRKISLSWMKIIARSKRKNFERNHKVPTAEHVWNTESLIRAKGMKCCVCLESLSPAQPLGQMMTSENMVHRCNVCGAAAHIICSSNSQKDCKCVSMFGSKHVVHQWTVLWTDVTDQSEEGQYCCYCEEICSESFLGGPPIYCCMWCQRLVHADCQSAMVTETGDVCDLGPFRRLILSPLFVRAISKPGGILSSITHGANEFASTVRGRLNRTKKEKHHSRLPSDSNDDSSSDTTLNSNQRAGELKATGGSVQRSPENDHYSSESDGREFISESRRFSSNETGEVKLEYVLSELPADSRPLLVFINKRSGAQRGDLLKHKLHFLLNPVQVFELSSSQGPETGLFLFRKVPHFRILVCGGDGTVGWVLDVIDKQNYESPPPIAILPAGTGNDLSRVLSWGGGLGAVEKQGGLCTVLHDIEHAAVTILDRWKVAVEDKKSKNVVLVKYMNNYLGIGCDAKVALDIHNLREENPEKFYSQFLNKVLYAREGAKSIIDRAFVDLPWQVRLEVDGTEIEIPEDSEGVLVANIPSYMGGVDLWQNEGENPENFDPQSIHDKMLEVVSITGAWHLGTLQVGLSRARRIAQGQSIKIQTFAPFPVQVDGEPWVQQPCTLKISHHGQAFMLRRAIEEPLGHAAAMITDVLEHAESSRVITASQKKALLQEMALRLS

SEQ ID NO: 359 - DNA, 1806 bp, Sorghum bicolor
atggtcggactcctcccggagaccaatgccgcggcggagaccgacgtcctcctcgacgcctgggacttcaagggccgccccgccccgcgcgccaccaccggccgctggggcgccgccgccatgatcctagtggcggagctgaacgagcggctgacgacgctgggcatcgccgtgaacctggtgacgtacctgacggggaccatgcacctgggcaacgccgagtccgccaacgtcgtcaccaacttcatgggcacctccttcatgctctgcctcctcggcggcttcgtcgccgactccttcctcggacgctacctcaccatcgccatcttcaccgccatccaggcatcgggcgtgacgatcctgacgatctcgacggcggcgccgggtctacgtccggcggcgtgctccgccaacgccggcgacggggagtgcgcgcgcgcgtcgggcgcgcagctgggcgtgatgtacctggccctgtacctgacggcgctgggcacgggggggctcaagtccagcgtctccggcttcggctccgaccagttcgacgagtcggaccggggcgagaagcaccagatgatgcgcttcttcaactggttcttcttcttcatctcgctggggtctctgctggccgtcaccgtgctggtctacgtccaggacaacctgggccggcgctgggggtacggcgcctgcgcctgcgccatcgccgccgggctcgtcatcttcctcgccggcacgcgcaggtaccggttcaagaagctggtggggagcccgctcacgcagatcgccgcggtggtggtggcggcgtggcggaagagacggctcccgctacccgctgaccctgccatgctctatgacatcgacgtcggcaaggccgccgccgtggaggaaggctccggcaagaagagcaagcgcaaggagcgcctcccccacaccgaccagttccgcttcctggaccacgctgccatcaacgaggagccggcggcgcagccgagcaagtggcggctgtcgacgctgacggacgtggaggaggtgaagacggtggtgcggatgctgcccatctgggcgaccaccatcatgttctggacggtgtacgcgcagatgaccaccttctcggtgtcgcaggccaccaccatggaccgccacatcggctcctccttccagatcccggcgggctccctcaccgtcttcttcgtcggctccatcctgctcaccgtgcccgtctacgaccggatcgtggtgcccgtggcgcgccgcgtgagcggcaacccgcacggcctgaccccgctgcagcggatcggcgtcggcctcgcgctctcggtcatcgccatggcgggcgccgcgctcacggagatcaagcggctccacgtggcgcgcgacgccgccgtgccggccggcggcgtggtgcccatgtccgtgttctggctcatcccgcagttcttcctggtgggcgccggcgaggcgttcacgtacatcggccagctcgacttcttcctccgcgagtgccccaaggggatgaagaccatgagcacggggctgttcctcagcacgctgtcgctggggttcttcgtcagctccgcgctcgtcgccgccgtgcacaaggtcaccggcgaccgccacccatggatcgccgacgacctcaacaagggcaggctcgacaacttctactggctgctcgccgtcatctgcctcgccaacctcttggtctacctcgtcgccgccaggtggtacaagtacaaggccggacgacccggcgccgacggcagcgtcaacggcgtcgagatggccgacgagcccatgctccactga

SEQ ID NO: 360 - protein, 601 aa, Sorghum bicolor
MVGLLPETNAAAETDVLLDAWDFKGRPAPRATTGRWGAAAMILVAELNERLTTLGIAVNLVTYLTGTMHLGNAESANVVTNFMGTSFMLCLLGGFVADSFLGRYLTIAIFTAIQASGVTILTISTAAPGLRPAACSANAGDGECARASGAQLGVMYLALYLTALGTGGLKSSVSGFGSDQFDESDRGEKHQMMRFFNWFFFFISLGSLLAVTVLVYVQDNLGRRWGYGACACAIAAGLVIFLAGTRRYRFKKLVGSPLTQIAAVVVAAWRKRRLPLPADPAMLYDIDVGKAAAVEEGSGKKSKRKERLPHTDQFRFLDHAAINEEPAAQPSKWRLSTLTDVEEVKTVVRMLPIWATTIMFWTVYAQMTTFSVSQATTMDRHIGSSFQIPAGSLTVFFVGSILLTVPVYDRIVVPVARRVSGNPHGLTPLQRIGVGLALSVIAMAGAALTEIKRLHVARDAAVPAGGVVPMSVFWLIPQFFLVGAGEAFTYIGQLDFFLRECPKGMKTMSTGLFLSTLSLGFFVSSALVAAVHKVTGDRHPWIADDLNKGRLDNFYWLLAVICLANLLVYLVAARWYKYKAGRPGADGSVNGVEMADEPMLH

SEQ ID NO: 361 - DNA, 1479 bp, Sorghum bicolor
atggagcgggcgggggaggcgccggccgccaccgccgtcgtgcggagggctccctcgacggcgccgtcggcgcgtgtttcgatctgggagtcggtgcgcgcgtgcggggtgtggtcgaaggaggtggacaaggccgagctgcggaggcaggtcgtcatgccgctctacctgcgccgcgccgtcgcggccgccgtcaaggcaaaggacgaggccgccggcgtggcggcggcagccgcggatgaccaggcgggggaggacgcggacggccccgcggtggcgcccgtggtggtgttcgtcaactcgcggagcggcgggcggcacgggcccgagctcaaggtgcggctgcacgagctcatcaccgaggagcaggtctttgatctttctgttgtgaagccttcagattttgttcactatggtttgagttgtttggagaagttagctgaccaaggcgataaccgtgcgaaggccgttcgtgagagaatgagaattgtggttgctgggggtgacggcacagttggctgggtgcttggatgtctctcggatctttataagacgaaaagggaaccagttccacctacaggaatcattccacttggtacaggaaatgatcttgctagatcgtttggatggggtggctcttttccctttggctggcgctcagctgtaaagcgttatctcagcaaagcttccactgctcccatttgccgtcttgacagctggcaaactgtaattcagatgccagaaggagaaataaaagagttgccatatgcacttaagaaagtggaacctggagatccgttggagatcagccaggagaatggcacagagttatccgaaaaggcttctttctataaaggagtattctacaactaccttagcattgggatggatgctcaggttgcatatggcttccatcatcttcgtgatgaaaaaccgtatcttgcacaaggaccagttgcaaataagttgatttatgctggatatagctgcactcaggggtggttttgtacaccttgtacagcaagtcctcagctaagggggcttaagaacattttgcgactttccattaaaaaggccaattgttcagagtgggagcaagttcaaatgccttcaagcgttaggtccctagttgtcttaaatttatacaactatggcagtggaaggcatccatggggtgatcttaaacctgagtatcttgaaaagagaggctttgttgaagctcattcagatgatggcttacttgaaatatttggtctgaaggaaggttggcatgcttcatttgttatggccgagcttatcaaagcaaagcacattgcccaggctgcggctatcaaatttgaaatgaggggtggcgagtgggatcgagcatatattcaaatggatggagagccatggaaacaaccactcttacaggagcactcaaccattgtggaaataaacaaagttccctatcattctctcatgataaatggggagtaa

SEQ ID NO: 362 - protein, 492 aa, Sorghum bicolor
MERAGEAPAATAVVRRAPSTAPSARVSIWESVRACGVWSKEVDKAELRRQVVMPLYLRRAVAAAVKAKDEAAGVAAAAADDQAGEDADGPAVAPVVVFVNSRSGGRHGPELKVRLHELITEEQVFDLSVVKPSDFVHYGLSCLEKLADQGDNRAKAVRERMRIVVAGGDGTVGWVLGCLSDLYKTKREPVPPTGIIPLGTGNDLARSFGWGGSFPFGWRSAVKRYLSKASTAPICRLDSWQTVIQMPEGEIKELPYALKKVEPGDPLEISQENGTELSEKASFYKGVFYNYLSIGMDAQVAYGFHHLRDEKPYLAQGPVANKLIYAGYSCTQGWFCTPCTASPQLRGLKNILRLSIKKANCSEWEQVQMPSSVRSLVVLNLYNYGSGRHPWGDLKPEYLEKRGFVEAHSDDGLLEIFGLKEGWHASFVMAELIKAKHIAQAAAIKFEMRGGEWDRAYIQMDGEPWKQPLLQEHSTIVEINKVPYHSLMINGE

SEQ ID NO: 363 - DNA, 711 bp, Sorghum bicolor
atggccggaggagacgacctgaagctgctgggtatgtgggcgagcccgtacgtgctgcgggtgaaactcgctctcagcctcaagggcctgagctacgagtacgtcgaggaggatctcagggacaagagcgagctcctcctcaaatccaaccccgtccacagcaaggttcccgtgctcatccacaacggaaaacccgtctgtgagtcgcaggtcatcctgcagtacatcgacgaagctttcgccggcaccggcccgtccctcctccctgctgacccctacgaacgcgccatcgctcgcttctgggccgcctacatcgatgacaagatgacgcccgcttggaacaagtcgacgatgggcaagacggaggaggagaaggctgagggaaaaaagcagtcgctcgtcgcgctggagaccttggagggggcgctgagggactgcggcaaagggaagcccttcttcggcggcgacagcgtcgggttcgtggacgtcgtgctcggcggcatgctcgggtgggtgcgcgcggcagatgagatgcacggcgtcaagcccttcgaccctgaacggactccgcagctggcggcgtggtcggagcgctttggcgcgctggaagccgtggagccggtgatgccagacgtgagcaggctggttgagttcggcaagatgttgatggcacgtctagcggctgcggccgccggtgatgcaagcaactga

SEQ ID NO: 364 - protein, 236 aa, Sorghum bicolor
MAGGDDLKLLGMWASPYVLRVKLALSLKGLSYEYVEEDLRDKSELLLKSNPVHSKVPVLIHNGKPVCESQVILQYIDEAFAGTGPSLLPADPYERAIARFWAAYIDDKMTPAWNKSTMGKTEEEKAEGKKQSLVALETLEGALRDCGKGKPFFGGDSVGFVDVVLGGMLGWVRAADEMHGVKPFDPERTPQLAAWSERFGALEAVEPVMPDVSRLVEFGKMLMARLAAAAAGDASN

SEQ ID NO: 365 - DNA, 2607 bp, Sorghum bicolor
atgatcggaaagataatcggagacatcacgggcagcaacaagcatgcgcagctcaagggcaacgtggtgctcgtgcgcaagaccgtgctcggcttggacgtcaccagcatcgccggctccctcctcgacggcgttggcgagttcctcggacgcggcgtcacctgccagcttatcagctccaccgtcgtcgaccccaacaatggcaaccgcgggaaggtgggcgcggaggcgagcctggagaagtggctgctgaacccgccgccgcttctgtccggcgagaacaagttccacgtcaccttcgactgggaggtggagaagcagggcattccaggcgccatcatcgtcaagaacaaccacgcctccgagttcttcctcaagaccatcaccctcgacgacgtccccggccacggcaccgtcgtcttcgtcgccaactcatggatctacccgcagtccaagtaccgctacaaccgcgtcttcttctccaacgacacgtacctgcccagccagatgccggcggcgctcaagccttaccgcgacgacgagctccggaacctgaggggcgacgaccagcaaggcccgtacaaggagcatgaccgcgtctaccgctacgacgtctacaacgacctcggcctgcctgacagcggcaacccgcggcccgtcctcggcggcaacaaggagctcccctacccgcgccgctgccgcaccgggcggaaacccaccagaaccgaccccaacagcgagagaaggctgacggtggtcgagggcgacgtctacgtgccgcgcgacgagcgtttcggccacatcaagaagtcggacttctacggctacgcgatcaaggcgctcgtgaacgccgtcatcccggcgatccgcacctacgtcgacctgtcgcccggcgagttcaactccttcaaggacatcatcaagctctacgagggcggcatccagctgcccaaaataccagtccttgaagacctgcggaagcagttcccgctcgagctcgtcaaggacgtcctccccgtcggcggcgactacctcctcaagctccccatgccgcaaatcatcaaagaggacaagacaggttggatgaccgatgaggagtttggacgggagattctcgccggcgtcaaccccatgatcgtcaggcgtctcacggagttccctcccagaagcacccttgaccccagcaagtacggtgaccacacgagcaccatcacggaggcgcacctcgagaacaagctggagggcctcaccgtgcagcaggcgctggaaggcaaccggctctacatcctggaccaccacgacaacttcatgccgttcctgatcaggatcaacaacctggagggcaacttcatctacgccaccaggaccgtgctgttcctgcgcggcgacggcacgctggtgccggtggccatcgagctgagcctgccggagctccgggacggcctgaccaccgccaagagcaccgtgtacacgcccacgtcgaccaccggcgcggaggcctgggtgtggcacctcgccaaggccttcgctaacgtcaccgactactgctggcaccagctggtcagccactggctcaacacgcacgccgtcatggagccgttcatcatcgcgaccaaccggcagctcagcgtgacgcaccccgtccacaagctcctgctgccgcactaccgcgacaccatgaacatcaactccaacgcacgccagatgctcgtcaacgccggcggcctcttcgagacaaccgtcttcccgcgccagtacgcgttcgagatgtccgccgtcatctacaagaactggaacttcaccgagcaggctctccctgacgacctaatcaagaggggcatggcggttgccgatgcatcgagcccgtacaaggtgaagctgctggtggaggactacccatacgcgtcggacgggctggcaatctggcacgcgatcgagcagtgggtgacggagtacctgggcatctactaccccaacgacggcgtgctgcaggcggacgtggagctgcaggcatggtggaaggaggtgcgcgaggtcgggcacgccgacctcaaggacgagccatggtggcccaagatggagacggtggcggagctcgtcaaggcctgcaccaccatcatctggatcgcgtcggcgctccacgccgccgtcaacttcgggcagtacccgtacgccgggtacattcccaaccgtccgtcggtcagccggaagccgatgccggcgccgggcagcgaggagtacgcggagctggggaagaacccggagaaggtgttcgtgcgcaccatcacgagccagttccagacactcgtcggcatctcgctgctggagatcctgtccagccactcctccgacgaggtgtacctcggccagcgcgacacgccggagtggacgtcggacgccaaggcgcaggaggcgttccggcggttcggggcgcggctgaccgagatcgagagccgcgtgatgaccatgaacgccgacccaagtctcaagaaccgcaacgggccggccaagttcccctacacgctgctctaccccaacacctccgacaagaatggcgatgccgccggcatcaccgccaagggcattccaaacagcatctccatctga

SEQ ID NO: 366 - protein, 868 aa, Sorghum bicolor
MIGKIIGDITGSNKHAQLKGNVVLVRKTVLGLDVTSIAGSLLDGVGEFLGRGVTCQLISSTVVDPNNGNRGKVGAEASLEKWLLNPPPLLSGENKFHVTFDWEVEKQGIPGAIIVKNNHASEFFLKTITLDDVPGHGTVVFVANSWIYPQSKYRYNRVFFSNDTYLPSQMPAALKPYRDDELRNLRGDDQQGPYKEHDRVYRYDVYNDLGLPDSGNPRPVLGGNKELPYPRRCRTGRKPTRTDPNSERRLTVVEGDVYVPRDERFGHIKKSDFYGYAIKALVNAVIPAIRTYVDLSPGEFNSFKDIIKLYEGGIQLPKIPVLEDLRKQFPLELVKDVLPVGGDYLLKLPMPQIIKEDKTGWMTDEEFGREILAGVNPMIVRRLTEFPPRSTLDPSKYGDHTSTITEAHLENKLEGLTVQQALEGNRLYILDHHDNFMPFLIRINNLEGNFIYATRTVLFLRGDGTLVPVAIELSLPELRDGLTTAKSTVYTPTSTTGAEAWVWHLAKAFANVTDYCWHQLVSHWLNTHAVMEPFIIATNRQLSVTHPVHKLLLPHYRDTMNINSNARQMLVNAGGLFETTVFPRQYAFEMSAVIYKNWNFTEQALPDDLIKRGMAVADASSPYKVKLLVEDYPYASDGLAIWHAIEQWVTEYLGIYYPNDGVLQADVELQAWWKEVREVGHADLKDEPWWPKMETVAELVKACTTIIWIASALHAAVNFGQYPYAGYIPNRPSVSRKPMPAPGSEEYAELGKNPEKVFVRTITSQFQTLVGISLLEILSSHSSDEVYLGQRDTPEWTSDAKAQEAFRRFGARLTEIESRVMTMNADPSLKNRNGPAKFPYTLLYPNTSDKNGDAAGITAKGIPNSISI

SEQ ID NO: 367 - DNA, 2106 bp, Sorghum bicolor
atgcctgcgctcgccgtcgacgccacaacacccgtggcgcacgccatcgcatcatgcgacgcggcggctcgcttccctgccccgcccgtggtgggccccgccgctgccgcagccgctgaccccgtcccgtggtcggccgacctctccgcggcgctctacaacgtggacggctggggcgcgccctacttcttcgtcaacgacgacggcgacgtcgccgtgcgcccgcacggccccgcgacgctcccgggccaggagatcgacctggccaaggtcgtggccaaggccgcgggaccgcgcgagggcggtgggctcggcctgccgctgcccttgctcgtgcgcttccccgacgtcctgcgccaccgcgtcgagaccctcaacgccgccttcggctacgccgtccgctccaccggctacggctccaggtaccagggcgtgtacccggtcaagtgcaaccaggacaggtacgtcgtcgaggacattgtcgagttcggcgcgccctttgggttcggcctcgaggctggctccaagcccgagttgctgctcgccatgagctgcctcgccgcgcgcggcaacccggacgctctgctcatctgcaacggctacaaggacgacggctacgtctcgctcgcgctcatggcacgctccatgggcctcaacaccgtcatcgtgctcgagcaggaggaggagctcgacattgtcgtcgaagccagccgccgcctcggcgtgcgccccgtcgtcggcatgcgcgccaagctgcgcaccaagcacgccggccacttcggctccacgtccggggagaagggcaagttcggcctcaacgccgcgcagatactgtccgtggtcaccaagctcaaggccattgctatgctcgactgcctccagctgctgcacttccacattggctcccagatcccgaccaccgccctgctctccgacggcgtcggcgaggccgcgcagatctactgcgagctcgccaggctcggcgccgacatgcgcgtcatcgacgtcggcggcggcctcggcattgactacgacggaacccactcggcgcagaccgacatgtcggtggcgtacagcctggaggagtacgcgacggccgtggtggccgccgtcggccgcgtctgtgaccgcaaggtggtgcagcaccccatcatctgcagcgagagcggccgcgcgctggtgtcccaccactcggtcctggtgttcgaggccttctcggctacggcgccaggtcgcctggacgcggccacggcctacctcctcgacgagctcaccgacgactgccgcggcgactaccgcaacgtcatggccgccgccgtgcgcggtgactacgacacctgcgccctgtacgccgaccagctgaagcggcgctccgccgagcagttcaaggagggagttcttggcctggagcaccttgccgcggtggacgccttctgcgagctcgtcgcccgcggcatgggcgcgcccgagccgccgcgcacctaccacatcaacctgtccgtgttcacctccctgccggacatgtgggccatcgggcagcagttccccatcatcccgatccagcgcctgcaggagcgccccgccgtcgacggtgtcctctcggacctcacctgcgacagcgacggcaaggtcagcgagttcatcggcgggaggcacagcctgccgctgcacgagctccccacccacgccacccgcggctactacctgggcatgttcctcggtggcgcctaccaggaggccctcggcgggctgcacaacctcttcggcgggcccagcgtggtgcgcgtgtcgcagtgcgacggcccccactgcttcgccgtgacgcgcgctgccgcgggcccgtcctgcgccgacgtgctccgcgcgatgcagcacgagcccgaggtgatgtacgaggtgctgaagcagaggaccgacggcgccacggccgccgccctcgccagagccttcggcgcaatgccgtacctggtgttcgacccggaggccgcggtgttgtccagcggcgagagtagcggcatgagcagcgactcggaagggtcagccgccggcgccgccgaggaggaagacgatgaggagtgggagttcatgcgcggcctcaccgtctga

SEQ ID NO: 368 - protein, 701 aa, Sorghum bicolor
MPALAVDATTPVAHAIASCDAAARFPAPPVVGPAAAAAADPVPWSADLSAALYNVDGWGAPYFFVNDDGDVAVRPHGPATLPGQEIDLAKVVAKAAGPREGGGLGLPLPLLVRFPDVLRHRVETLNAAFGYAVRSTGYGSRYQGVYPVKCNQDRYVVEDIVEFGAPFGFGLEAGSKPELLLAMSCLAARGNPDALLICNGYKDDGYVSLALMARSMGLNTVIVLEQEEELDIVVEASRRLGVRPVVGMRAKLRTKHAGHFGSTSGEKGKFGLNAAQILSVVTKLKAIAMLDCLQLLHFHIGSQIPTTALLSDGVGEAAQIYCELARLGADMRVIDVGGGLGIDYDGTHSAQTDMSVAYSLEEYATAVVAAVGRVCDRKVVQHPIICSESGRALVSHHSVLVFEAFSATAPGRLDAATAYLLDELTDDCRGDYRNVMAAAVRGDYDTCALYADQLKRRSAEQFKEGVLGLEHLAAVDAFCELVARGMGAPEPPRTYHINLSVFTSLPDMWAIGQQFPIIPIQRLQERPAVDGVLSDLTCDSDGKVSEFIGGRHSLPLHELPTHATRGYYLGMFLGGAYQEALGGLHNLFGGPSVVRVSQCDGPHCFAVTRAAAGPSCADVLRAMQHEPEVMYEVLKQRTDGATAAALARAFGAMPYLVFDPEAAVLSSGESSGMSSDSEGSAAGAAEEEDDEEWEFMRGLTV

SEQ ID NO: 369 - DNA, 1380 bp, Sorghum bicolor
atgatgatgatcccccgctccttcagtcatctcctcctccccaagacacccaccaaccccgtccagccgccggctgtctcggccgccgccgccgccgccctctcccggtccctgaggcgcgccaggtcggccatggcgttcaacaagatccaggtcgccaaccccgtcgtcgagatggacggcgatgaaatgaccagggtgttctggaaatctatcaaggacaagcttatcttccctttcgtggacctggacatcaaatactttgacctcgggcttccatatcgtgatgaaaccgatgacaaagtcacagtcgaggctgcggaggccacactcaagtacaatgtggctatcaagtgtgccaccattacaccagacgaagcaagggtgaaggagtttggcttgaaggccatgtggaagagcccgaatggcacaatcaggaacattctgaatggcactgtgttcagagaaccaatcatctgcaaaaacatcccaaggcttgttccaggctggacaaagcccatttgcattgggaggcatgcattcggtgatcaataccgggcaactgatgcagttatcaagggacctggcaagctcaaattagtttttgagggaaaagaagagcaagttgaactggaggtgttcaacttcactggtgctggaggagttgccttatccatgtacaacactgacgagtccatccatgcctttgctgaggcttctatggccactgcttatgagaagaaatggccattgtaccttagcaccaagaacacaattctgaagaaatatgatggcaggttcaaggacattttccaggaggtgtacgaagctggttggaaaaccaaatttgaagctgccggcatatggtatgagcatcgtctcattgatgacatggtagcatatgcacttaagagtgaaggagggtatgtctgggcttgcaagaattatgatggagatgtgcagagcgatttcttagctcaaggttttggctcattgggtttgatgacatcggtactggtgtgccctgatggaaagacgatcgaagctgaagctgcccatggtactgttacccgtcattaccgtgttcatcagaaaggaggtgaaaccagtacaaacagtattgcctcaatctttgcttggacaagaggacttgcacacagggcaaagcttgatgacaatgctagactacttgacttcacccagaagcttgaggctgcctgcattggggctgttgagtctgggaagatgaccaaggatcttgcccttcttgttcacggatctgcaaatgtcacgaggagccattacctgaacaccgaggagttcatcgacgctgttgctgatgagctcagatcaaggctggcggccaactcaaacctatga

SEQ ID NO: 370 - protein, 459 aa, Sorghum bicolor
MMMIPRSFSHLLLPKTPTNPVQPPAVSAAAAAALSRSLRRARSAMAFNKIQVANPVVEMDGDEMTRVFWKSIKDKLIFPFVDLDIKYFDLGLPYRDETDDKVTVEAAEATLKYNVAIKCATITPDEARVKEFGLKAMWKSPNGTIRNILNGTVFREPIICKNIPRLVPGWTKPICIGRHAFGDQYRATDAVIKGPGKLKLVFEGKEEQVELEVFNFTGAGGVALSMYNTDESIHAFAEASMATAYEKKWPLYLSTKNTILKKYDGRFKDIFQEVYEAGWKTKFEAAGIWYEHRLIDDMVAYALKSEGGYVWACKNYDGDVQSDFLAQGFGSLGLMTSVLVCPDGKTIEAEAAHGTVTRHYRVHQKGGETSTNSIASIFAWTRGLAHRAKLDDNARLLDFTQKLEAACIGAVESGKMTKDLALLVHGSANVTRSHYLNTEEFIDAVADELRSRLAANSNL

SEQ ID NO: 371 - DNA, 405 bp, Sorghum bicolor
atgtcggaggagaagcaccaccacttcttccaccaccacaagaaggacggcgaggagcagcccaccggcgagtacgggtactccgagacggtggccgccgaggtggtgaccaccggcgaggacgagtacgagaagtacaagaaggaggagaaggagcacaagcacaagcagcacctcggcgaggccggcgccatcgccgccggcgccttcgcactttacgagaagcacgaggcgaagaaggaccccgagcacgcgcacaggcacaagatcacggaggaggtcgcggcggcggcggcggtgggcgccggcggctacgccttccacgagcaccacgagaagaagaaggaccacaaggacgccgacgaggccagcggcgagaagaagcaccaccacctcttcggctga

SEQ ID NO: 372 - protein, 134 aa, Sorghum bicolor
MSEEKHHHFFHHHKKDGEEQPTGEYGYSETVAAEVVTTGEDEYEKYKKEEKEHKHKQHLGEAGAIAAGAFALYEKHEAKKDPEHAHRHKITEEVAAAAAVGAGGYAFHEHHEKKKDHKDADEASGEKKHHHLFG

SEQ ID NO: 373 - DNA, 1143 bp, Sorghum bicolor
atggcgcccgctgctgctgcgtcccgggtggctgtctcgtcgccggtcttcggctccgatggcggcgccaggagctccgggatcaagggtaacaacaatgttagcttcggcaacaaatcctgggtcggcggcacattggcctgggagagcagctcggtgcggcccaggcacgtgaacaaggtgctctgcatgtcggtccagcaggcgagcaagagtaaagtctctgttgcgccactcgatcttgagagcgccaaggagccacctctcaacacatacaagcccaaggagcccttcacggccaccattgtctcggtggagaggctagtcggccccaaagctccaggggagacttgccacatcgtcattgaccatggtggcaatgtgccgtactgggagggccagagttatggtgtcattcctcctggagaaaaccccaaaaagcctggagccccacaaaatgtcaggctttattcaattgcatcaactaggtatggagattactttgatggaagaaccggaagcttgtgtgtccgccgtgcagtttattatgatcctgaaactggcaaggaggagccctcaaagaatggtgtctgcagtaatttcctgtgcaactcaaaacctggggacaagattcaattaacaggtccctctggcaaaataatgcttctaccggaggaggatccaaacgcaacccatatcatgattgctactggcaccggtgttgcccccttccgtgggtacctgcgtcgcatgttcatggaagatgttccaaactacagatttggtggcttggcctggctcttccttggtgttgccaattcagacagccttctgtatgacgaagaattcaccagctatcttaagcagtatccagacaatttcaggtacgacaaagccctcagtagggagcagaagaacaggagtggtggcaaaatgtacgtccaggacaagatcgaggagtacagcgatgagattttcaagcttctggatggcggagcgcacatctacttctgcggtttgaagggaatgatgcctggaattcaggacacccttaagaaggtggcagagcagagaggcgagagctgggaccagaagctctcccagctcaagaagaacaagcaatggcacgttgaggtctactag

SEQ ID NO: 374 - protein, 380 aa, Sorghum bicolor
MAPAAAASRVAVSSPVFGSDGGARSSGIKGNNNVSFGNKSWVGGTLAWESSSVRPRHVNKVLCMSVQQASKSKVSVAPLDLESAKEPPLNTYKPKEPFTATIVSVERLVGPKAPGETCHIVIDHGGNVPYWEGQSYGVIPPGENPKKPGAPQNVRLYSIASTRYGDYFDGRTGSLCVRRAVYYDPETGKEEPSKNGVCSNFLCNSKPGDKIQLTGPSGKIMLLPEEDPNATHIMIATGTGVAPFRGYLRRMFMEDVPNYRFGGLAWLFLGVANSDSLLYDEEFTSYLKQYPDNFRYDKALSREQKNRSGGKMYVQDKIEEYSDEIFKLLDGGAHIYFCGLKGMMPGIQDTLKKVAEQRGESWDQKLSQLKKNKQWHVEVY

SEQ ID NO: 375 - DNA, 1782 bp, Sorghum bicolor
atggcctcctcagcgtccctgcagcgcttcctcccgccctcttcgcacgcggcgacggcgtcgtcgtcccggcgccgcaccggccgcgcccgagcggccgtctccatgccaccatcgtctccgccggcgacaggggaggtccctgcggagcggctggagcccagggtcgaggagcgggagggaggctactgggttctcaaggagaagtaccggacggggctgaacccgcaggagaaggtgaagctggagaaggagcccatggggctgttcatggaggacggcatcaaggatctcgccaagatccccatggaggagatcgacgccgccaagctcaccaaggacgacgtcgacgtccggctcaagtggctcggcctcttccaccgccgcaagcaccagtacgggcggttcatgatgcggctgaagctgcccaacggcgtgacgacgagcgagcagacgcggtacctggcgagcgtcatcgaggcgtacggcgcggacgggtgcgcggacgtgacgacccggcagaactggcagatccgcggggtgacgctcccggacgttccggccatcctggacggcctccgcgccgtcggcctcaccagcctgcagagcggcatggacaacgtgcgcaaccccgtcggcaacccgctcgccggcgtcgacccccacgagatcgtcgacacgcgcccctacaccaacctgctctcctcctacatcaccaacaactcccaggggaacaccaccatcaccaacctgccgaggaaatggaacgtctgcgtgatcggctcgcacgacctgtacgagcacccgcacatcaacgacctcgcgtacatgccggccgtcaaggacggcaagttcggcttcaaccttctggtgggtgggttcatcagccccaagaggtgggctgaggccttgccgctcgacgcctgggtcgccggcgacgacgtcgtccccgtgtgcaaggccattctcgaggcgtacagggacctcggcttcaggggcaaccggcagaagacgcgcatgatgtggctcatcgacgaactcgggatggaggtgttccgatcggaggtggagaagaggatgcccaacggggtgctggagcgcgccgcggcggaggacctcgtcgacaagacgtgggagcggcgggactacctcggcgtgcacccgcagaagcaggaaggcctgtcgtacgtgggccttcacgtgcccgtggggcggctgcaggccgcggacatgttcgagctggcgcgcctcgccgacgagtacggcacgggcgagctccggctcacggtggagcagaacatcgtgctccccaacgtgagcaacgagagggtcgacgcgctgctcgcggagccgctgctgcggcagcggttctcgccggagccgtcgctgctgctcaaggggctggtggcgtgcacgggcaaccagttctgcgggcaggccatcatcgagaccaaggcgcgggcgctgcaggtgacgcgggaggtggagaagcgcgtgtccgtgccgcggcccgtgcggatgcactggaccggctgccccaacagctgcggccaggtgcaggtggcggacatcggcttcatgggctgcctcaccaaggacagcgacggcaagatcgtcgaggccgcggacatcttcgtgggcggccgcgtcggcagcgactcgcacctggcggacgtgtacaagaagtccgtgccgtgcaaggacctggtgcccatcgtggccgacctcctggtggagcggttcggggccgtgcccagggagagggaggaggatgaggagtag

SEQ ID NO: 376 - protein, 593 aa, Sorghum bicolor
MASSASLQRFLPPSSHAATASSSRRRTGRARAAVSMPPSSPPATGEVPAERLEPRVEEREGGYWVLKEKYRTGLNPQEKVKLEKEPMGLFMEDGIKDLAKIPMEEIDAAKLTKDDVDVRLKWLGLFHRRKHQYGRFMMRLKLPNGVTTSEQTRYLASVIEAYGADGCADVTTRQNWQIRGVTLPDVPAILDGLRAVGLTSLQSGMDNVRNPVGNPLAGVDPHEIVDTRPYTNLLSSYITNNSQGNTTITNLPRKWNVCVIGSHDLYEHPHINDLAYMPAVKDGKFGFNLLVGGFISPKRWAEALPLDAWVAGDDVVPVCKAILEAYRDLGFRGNRQKTRMMWLIDELGMEVFRSEVEKRMPNGVLERAAAEDLVDKTWERRDYLGVHPQKQEGLSYVGLHVPVGRLQAADMFELARLADEYGTGELRLTVEQNIVLPNVSNERVDALLAEPLLRQRFSPEPSLLLKGLVACTGNQFCGQAIIETKARALQVTREVEKRVSVPRPVRMHWTGCPNSCGQVQVADIGFMGCLTKDSDGKIVEAADIFVGGRVGSDSHLADVYKKSVPCKDLVPIVADLLVERFGAVPREREEDEE

SEQ ID NO: 377 - DNA, 1071 bp, Sorghum bicolor
atggcctccctcaccgacctcgtcaacctcagcctctcggacaccaccgagaagatcatcgccgagtacatatggatcggtggatctggcatggatctcaggagcaaagccaggaccctctccggcccggtgaccgatcccagcaagctgcccaagtggaactacgacggctccagcaccggccaggcccccggcgaggacagtgaggtcatcctgtacccgcaggctatcttcaaggacccattccggaggggcaacaacatccttgtcatgtgcgattgctacaccccagctggcgagccaattcccaccaacaagaggcacaacgccgccaagatcttcagcaaccctgaggtcgctgctgaggagccctggtacggtattgagcaggagtacaccctccttcagaaggacaccaactggccccttgggtggcctcttggtggcttccctggccctcagggtccttactactgtggaatcggtgcggacaagtcattcgggcgtgacatagttgatgcccactacaaggcttgcatttatgcaggcatcaacatcagtggcatcaacggagaggtcatgccagggcagtgggaattccaagttggaccgtccgtcggcatttcttcaggtgatcaggtctgggttgctcgctacattcttgagaggatcaccgagatcgccggtgtggtgttgacattcgacccaaagcccatccctggtgactggaacggtgccggcgcacacaccaactacagcaccaagtccatgaggaacgagggcgggtacgaggtgatcaaggccgccattgagaagctgaagttgcggcacaaggagcacatcgcggcctacggcgagggcaacgagcgccgcctcaccggcaggcacgagaccgccgacatcaacaccttcagctggggagtggcaaaccgtggcgcgtcagtgcgcgtgggccgggagacggagcagaacggcaagggctacttcgaggaccgccggccggcgtccaacatggacccatacgtggtgacctccatgatcgccgacaccaccatcctctggaagccctga

SEQ ID NO: 378 - protein, 356 aa, Sorghum bicolor
MASLTDLVNLSLSDTTEKIIAEYIWIGGSGMDLRSKARTLSGPVTDPSKLPKWNYDGSSTGQAPGEDSEVILYPQAIFKDPFRRGNNILVMCDCYTPAGEPIPTNKRHNAAKIFSNPEVAAEEPWYGIEQEYTLLQKDTNWPLGWPLGGFPGPQGPYYCGIGADKSFGRDIVDAHYKACIYAGINISGINGEVMPGQWEFQVGPSVGISSGDQVWVARYILERITEIAGVVLTFDPKPIPGDWNGAGAHTNYSTKSMRNEGGYEVIKAAIEKLKLRHKEHIAAYGEGNERRLTGRHETADINTFSWGVANRGASVRVGRETEQNGKGYFEDRRPASNMDPYVVTSMIADTTILWKP

SEQ ID NO: 379 - DNA, 2679 bp, Sorghum bicolor
atggcggcctctgttgatcgtcacctggctccccacccatggccaggcaatgcgcctcccaagagcttcgacatgttccgctccggcggcccaggcggcggaggcaagcgccgcgccggctccgactccgactccgaggacgaagacaccatccccccggactggcggtcgctgtacctcccgcgcctcgaggtggagccgcccgtccacgacccgcgcgacgaggccacctcggacgcgtgggtgcgtcgccacccggcgctggtccggctcacgggcaagcaccctttcaactcggagcctccggtgccccggctgatggcgcacgggttcatcaccccggcgccgctccactacgtgcgcaaccacgggcccgttcccagggcggactggtcgacctggaccgtggaggtgacggggctcgtgaggcgccccgctaggctcaccatggagcagctggtgacggagttcgaggccgtggagctccccgtgacgctggtgtgcgcgggcaaccggcgcaaggagcagaacatggtgcgccagaccgtcggcttcaactggggccccggggccatctccacgtccgtgtggcgcggcgcgcggctccgcgacgtgctccgccggtgcggcgtcatgggcgccgcggacggcgccgccaacgtgtgcttcgagggcgccgaggacctcccgggaggcggcggctccaagtacggcaccagcctgcggcgcggggtggccatggaccccgcgcgcgacgtcatcctcgcctacatgcagaacggggagccgctggcgcctgaccacggcttccccgtgcgcgtcatcgtgccgggcttcatcggcggccgcatggtcaagtggctcaagcggatcgtcgtcgcgtccagcgagtccgagagctactaccactaccgggacaaccgggtgctgccgtcccatgtcgacgccgagctcgccaatgccgaagcgtggtggtacaagccggagtacatgataaacgagctgaacatcaactcggtgatcaccacgccgggacacgacgaggtgctgcccatcaacgccctgacgacgcagcggccgtatacgatcaagggatatgcatactccggtggcggccggaaagttacacgggttgaggtgaccctggacggcggcgagacgtggcaggtgtgctcgctcgaccacccggagcgcccaaccaagtacggcaagtactggtgctggtgcttctggtccgtcgacgtcgaggtgctcgacgtgctcggggccaaggaaatcgccgtccgcgcctgggacgaggccatgaacacccagccggagaagctcatctggaacctcatgggcatgatgaacaactgctggttccgggtgaagatcaacgcgtgccggccgcacaagggcgagatcggcatggtgttcgagcacccggcacagccgggcaaccagccgggcggctggatggcgcggcagaagcacctcgagacgtcggagagcgcgcagggcacgctgaagaagagcacgtccacacccttcatgaacacggccaccacgcagtacaccatgtccgaggtgcgccgccacacgtccccggactccgcctggatcatcgtgcacggccacatctacgactgcacgggattcctcaaggaccaccccggcggcgccgacagcatcctcatcaacgccggcactgactgcaccgaggagttcgacgccatccactcggacaaggcccgcggcctccttgatttgtaccgcgtcggcgagctcgtcgtcaccggcagcgactactccccacagaacagccacgccgacctcagggccatcgacgaggcccctgctgcagccgcgccggcggcgcagtcggtgtcgaccgtcgcgctctccaacccgcgggagaaggtcaggtgccggctcgttgacaagaagagcctgtcctacaacgtgcgcctcttccggttcgcgctgccgtcgccggaccagaagctcggccttcccgtcggcaggcatgtgtacgtgtgcgcgtcgatagacggcaagctctgcatgcgcgcgtacacgcccacgagccccgtcgacgaggtcggccacatcgagctcctgatcaagatatacttcaaggacgaggaccccaaataccccaacggcgggctcatgtcgcagtacctggactccctgccgctcggcgcgaccattgacatcaagggccctattgggcacatcgagtacgccggccgcggcggcttcgtggtgaacggcgagcgccggttcgcgcgcaggctcgccatgatcgccggcgggacgggcatcacgccggtgtaccaggtgatccaggctgtgctgagggaccagcccgacgacgacacggagatgcacctcgtgtatgcgaaccggacggaggacgacatgctcctgcgggaggagatcgaccgctgggccgccgcgcacccggcgcggctcaaggtgtggtacgtggtgagcaaggtggcgcgaccggaggacgggtgggcgtacggcgtggggagagtggacgagcaggtcttgagggagcacctgcctcttggagacagcgagacgcttgcgctcgtgtgcgggccgccggcgatgatcgagtgcacggtgcgcccgggcctggagaagatggggtacgacctcgacaaggcttgccttgtcttctga

SEQ ID NO: 380 - protein, 892 aa, Sorghum bicolor
MAASVDRHLAPHPWPGNAPPKSFDMFRSGGPGGGGKRRAGSDSDSEDEDTIPPDWRSLYLPRLEVEPPVHDPRDEATSDAWVRRHPALVRLTGKHPFNSEPPVPRLMAHGFITPAPLHYVRNHGPVPRADWSTWTVEVTGLVRRPARLTMEQLVTEFEAVELPVTLVCAGNRRKEQNMVRQTVGFNWGPGAISTSVWRGARLRDVLRRCGVMGAADGAANVCFEGAEDLPGGGGSKYGTSLRRGVAMDPARDVILAYMQNGEPLAPDHGFPVRVIVPGFIGGRMVKWLKRIVVASSESESYYHYRDNRVLPSHVDAELANAEAWWYKPEYMINELNINSVITTPGHDEVLPINALTTQRPYTIKGYAYSGGGRKVTRVEVTLDGGETWQVCSLDHPERPTKYGKYWCWCFWSVDVEVLDVLGAKEIAVRAWDEAMNTQPEKLIWNLMGMMNNCWFRVKINACRPHKGEIGMVFEHPAQPGNQPGGWMARQKHLETSESAQGTLKKSTSTPFMNTATTQYTMSEVRRHTSPDSAWIIVHGHIYDCTGFLKDHPGGADSILINAGTDCTEEFDAIHSDKARGLLDLYRVGELVVTGSDYSPQNSHADLRAIDEAPAAAAPAAQSVSTVALSNPREKVRCRLVDKKSLSYNVRLFRFALPSPDQKLGLPVGRHVYVCASIDGKLCMRAYTPTSPVDEVGHIELLIKIYFKDEDPKYPNGGLMSQYLDSLPLGATIDIKGPIGHIEYAGRGGFVVNGERRFARRLAMIAGGTGITPVYQVIQAVLRDQPDDDTEMHLVYANRTEDDMLLREEIDRWAAAHPARLKVWYVVSKVARPEDGWAYGVGRVDEQVLREHLPLGDSETLALVCGPPAMIECTVRPGLEKMGYDLDKACLVF

SEQ ID NO: 381 - DNA, 825 bp, Sorghum bicolor
atgtctctactttcaaagttacgcttgatcaccgtggatgttactggtacactgattgcttacaaaggacaccttggggattactactgtatggcagctaagtctgctgggatgccatgccctgactataaccgtatgcatgagggcttcaagcttgcatacactgagatggccagacagtacccttgctttggatttgcggctaagatgccgaacattgaatggtggaggacatgtgttaagaattcatttgttaaggctggctatgattatgatgaggagacatttgagaaaatcttcaggcgcatttattctgcttttggctcctctgcaccatactcggcatttcctgatgcacagcccttcatgcggtgggcgcgggaaaagggactcattgttggtgttgtcagcaatgcagagtatcgctacaaagatgtaatcttaccagctttagggttgaatcagggctccgaatgggacttcggggtgttctcaggcatggtaggtgttgagaagccagacccaagaatttacaagatagcgttggagatggcaggaaacgtagctccagaagaagcgctccacataggtgacagcatgcggaaggactacaccccagctaggagcatcgggatgcatgcgctgctcctggaccggttcaagactgccgacgccgagagctggaggcagtcaggcgcgacggtgctccctgatctggttgccactcaagagtggctcaccaagaatcagaatgaggaacaggagaaaacagtggcatcacgagtgctgaacagaatgtctgaaaagctaaagatgggggcttga

SEQ ID NO: 382 - protein, 274 aa, Sorghum bicolor
MSLLSKLRLITVDVTGTLIAYKGHLGDYYCMAAKSAGMPCPDYNRMHEGFKLAYTEMARQYPCFGFAAKMPNIEWWRTCVKNSFVKAGYDYDEETFEKIFRRIYSAFGSSAPYSAFPDAQPFMRWAREKGLIVGVVSNAEYRYKDVILPALGLNQGSEWDFGVFSGMVGVEKPDPRIYKIALEMAGNVAPEEALHIGDSMRKDYTPARSIGMHALLLDRFKTADAESWRQSGATVLPDLVATQEWLTKNQNEEQEKTVASRVLNRMSEKLKMGA

SEQ ID NO: 383 - DNA, 2766 bp, Sorghum bicolor
atgacgcgccgggtgcggcggcggacgtgcagggaacgggagggtagaggggtgaggggcgcgtcgcgtgttgtttcggcggggccggaaggcgaggaggatgcggcggcggtggaggttgactggagggcgctgccggacgacacggtgctgcagctcttcgcgcggctgaactaccgcgaccgcgccaacatggcgtcagcgtgccgggcttggcgagcgctgggctcgtcaccctgcctgtggagcacgctcgacctccgcgcgcaccgctacgaccgggaggtggcgtcgtcgcttgcctcgcggtgcgggagcctgcgtcggctacgcctgcggggccacgaggcggcagaggccgtcccgggcctccgcgcgcgtggtctccgcgaggtggtggccgatggctgccgcggcctcacagatgctacgctcgctgtcctcgccgcgcggcacgaggacctccagagcctccagatcgggcccgatcctctcgagcacatctccagcgatgccctccgccacgtcgctctttgttgctcgcaactccgccgccttcgcctctcgggtctccgtgaagctgacgcagatgccgtcggagcgctcgcccgctgctgccccctcctcgaggacgtggctttcctcgattgcggcaccgtggatgaggccgcccttgctggtatccactctctccggttcctctctgtagcaggatgccggagcctgaaatgggctactgcatccacctcctggacccagcttccctcccttattgcccttgacgtctcccgcactgatgttccgccaagtgctgtttcacgcctcatttcccatgccaaaaccctcaagcttatatgcacgctgaactgcatttctgttgaggaggaacagcttcacaatcctgctgtatttagtaactctaagggcaaggtcgtgctaacaatcaacagcgacttcaaaacttttgagaccatgtttccagttgtggatgtgaaagcgcacgaggttttcaatcaatgtagctggagtcacaaagacaagatagctggtgatacaatgacatggctcgagtggatcctgtcacagtcacttctccgaattgcagagtccaacccacaaggcatggatagtttctggctacagaagggcactgcactgctgcttagactattgaagagtttgcaggaggatgtgcaggagcgggcagctactgcacttgctacgtttgtagttatggatgacgagagtgcaaatgtggatcctgcaaggtcggaggcggtgatgcagaatgggggcatccgaatgttgctggaccttgcaaggtgctctagggagagcgcacaatctgaagcagcaaaagctattgccaacttgtcagtgaataccaaggttgccaaggcagttgcagaggaaggcggcattacaatactcactaatttagccaagtcgatgaataggcttgttgctgaagaggctgctggtggcctttggaatctctctgtaggcgaggaccataaggcggctattgcagtatctggtggtatcaaggccctggtcgatctaatatttcgttggcctgctggaactgatggagttcttgaacgtgctgctggcgcgcttgcaaacctggctgctgatgacaagtgtagcttggaagttgcaaaggctggtggtgtccatgctttggttacacttgctcgatcatgtaaacttgatggtgtcctagaacaggctgcaagaggtctggctaacttagctgcacatggggacaacaacgacaacaatgctgctgtaggtcaggaagcaggggctctggaggcactagtgcaactaacaggttctcaaaacgagggtgtaagacaagaagctgctggtgctttgtggaacctgtcatttgatgacagaaaccgtgaagccattgctgcagtgggtggtgttgaagctttggttgctctagtgcaacaatgtttgaatgcttcagaaggccttcaggagagagctgctggtgcattatggggattatctgtttcagaagctaatagcattgcaattgggcagggtggtggggttgcacctttgctcacattggcacgctcagaggttgaagatgttcacgagacagctgcaggggcactatggaatcttgctttttattatggtaatgctctccgcatagtcgaagaaggtggggtgcctgttcttgtaaaaatttgctcatcatcagggtccaagatggcacgcttcatgtctgcactagcactagcatatatgtttgacggaagaatggatgaagttgctttggttggagcatcctcggatagcagttccaagagtgttaatgttgagggagctagaagaatagcatttaagcatatagaaacctttgtgcttactttctcagatccacaaatgttctctatggctgctgcctcatcagccccggcagcgctgtctcatgttgctgaagcagtgtttatacacgaagctgggcacctgagatgcagtcgatctgagattggtagatttgttgccatgcttcggaatccttcaccaattctgcgtgcttgtgctgcctttgcccttcttcagttcacaatcccaggaggtcggcatgcggtgcatcacgcaggtctcttgcaggaagcaggagcaggtcgagtgttgcgtgcagcggcggcagcgacaacagcttctattgaagccaaaatttttgccaggattgtcctcaggaacttggagcaccatcagtcagggacgtcaacatga

SEQ ID NO: 384 - protein, 921 aa, Sorghum bicolor
MTRRVRRRTCREREGRGVRGASRVVSAGPEGEEDAAAVEVDWRALPDDTVLQLFARLNYRDRANMASACRAWRALGSSPCLWSTLDLRAHRYDREVASSLASRCGSLRRLRLRGHEAAEAVPGLRARGLREVVADGCRGLTDATLAVLAARHEDLQSLQIGPDPLEHISSDALRHVALCCSQLRRLRLSGLREADADAVGALARCCPLLEDVAFLDCGTVDEAALAGIHSLRFLSVAGCRSLKWATASTSWTQLPSLIALDVSRTDVPPSAVSRLISHAKTLKLICTLNCISVEEEQLHNPAVFSNSKGKVVLTINSDFKTFETMFPVVDVKAHEVFNQCSWSHKDKIAGDTMTWLEWILSQSLLRIAESNPQGMDSFWLQKGTALLLRLLKSLQEDVQERAATALATFVVMDDESANVDPARSEAVMQNGGIRMLLDLARCSRESAQSEAAKAIANLSVNTKVAKAVAEEGGITILTNLAKSMNRLVAEEAAGGLWNLSVGEDHKAAIAVSGGIKALVDLIFRWPAGTDGVLERAAGALANLAADDKCSLEVAKAGGVHALVTLARSCKLDGVLEQAARGLANLAAHGDNNDNNAAVGQEAGALEALVQLTGSQNEGVRQEAAGALWNLSFDDRNREAIAAVGGVEALVALVQQCLNASEGLQERAAGALWGLSVSEANSIAIGQGGGVAPLLTLARSEVEDVHETAAGALWNLAFYYGNALRIVEEGGVPVLVKICSSSGSKMARFMSALALAYMFDGRMDEVALVGASSDSSSKSVNVEGARRIAFKHIETFVLTFSDPQMFSMAAASSAPAALSHVAEAVFIHEAGHLRCSRSEIGRFVAMLRNPSPILRACAAFALLQFTIPGGRHAVHHAGLLQEAGAGRVLRAAAAATTASIEAKIFARIVLRNLEHHQSGTST

SEQ ID NO: 385 - DNA, 894 bp, Sorghum bicolor
atgtcgaccaactcgaggtcgaactccagggccaacttcaacaacgagatccatgacatcggcacggtgcagaactccaccatgatgccccccacgtactacgaccgatcgctggcggacatcttccctccccacctcctcaagaaggtggtctcggaggtggtgtccacgttcttgctggtgttcgtgacgtgcggggcggcggggatctacggcagcgacaaggaccgcatatcgcagctgggacagtcggtcgccggcgggctcatcgtcacggtgatgatctacgccgtcggccacatctccggcgcgcacatgaaccccgccgtcacgctcgcgttcgccgtgttccgccatttcccctggattcaggtcccgttctactgggcggcgcagttcacgggcgccatctgcgcgtcgttcgtgctcaaggccgtgctgcaccccatctccgtgctgggctgcaccacgccgacggggccgcactggcactcgctcatcatcgagatcatcgtcaccttcaacatgatgttcgtcaccctcgccgtcgccacggacacgagagcggtgggtgagttggcggggttggcagttggttccgcggtttgcattacgtccatcttcgcaggggcagtgtctggcggatcgatgaacccggcgaggacgctggggccggcgctggcgagcaacctctacaccggactctggatctacttcttgggccccgtcctcggcacgctctcgggggcctggacctacacctacatccgcttcgaggaagcgcccagcacccacaaggacatgtcgcagaagctctcctccttcaagctccgccgcctgcagagccagtccgtcgccgcggaagacgacgagctcgaccacatccaagtgtga

SEQ ID NO: 386 - protein, 297 aa, Sorghum bicolor
MSTNSRSNSRANFNNEIHDIGTVQNSTMMPPTYYDRSLADIFPPHLLKKVVSEVVSTFLLVFVTCGAAGIYGSDKDRISQLGQSVAGGLIVTVMIYAVGHISGAHMNPAVTLAFAVFRHFPWIQVPFYWAAQFTGAICASFVLKAVLHPISVLGCTTPTGPHWHSLIIEIIVTFNMMFVTLAVATDTRAVGELAGLAVGSAVCITSIFAGAVSGGSMNPARTLGPALASNLYTGLWIYFLGPVLGTLSGAWTYTYIRFEEAPSTHKDMSQKLSSFKLRRLQSQSVAAEDDELDHIQV

SEQ ID NO: 387 - DNA, 1818 bp, Sorghum bicolor
atggcggatcatgatgcgtcgtcggttccgcagaccgcggcggagggcaagctgacgacgacgacgacgatgatggacgcgtgggactacaaggggcgccccgccgtccgcggctcctccggcgggtggtcgtccgccgccatgatcctggtggtggagctgaacgagcgtctgacgacgctgggcgtgggcgtgaacctggtgacgtacctgatggacaccatgcacctgggcggcgccgcgtctgccaacgctgtgaccaacttcctgggcgcgtccttcatgctctgcctcctgggtggcttcgtcgccgacacctacctcgggaggtacctcaccatcgccatcttcacggcagtccaagccgtgggcatgtgcgtcctcaccgtgtccacggcggcaccagggctccggccgccggcgtgcgctgaccccactggccccaaccactgcgtggagcccagcgggacgcagctgggcgtgctgtacctggccctctacctcacggcgctgggcaccggcggtctcaagtccagcgtctccgggttcggctccgaccagttcgacgagtcggacggcggcgagcggcggagcatggcgcgcttcttcagctggttcttcttcttcatcagcatcggctcgctgctggccgtgacggtgctggtgtacgtgcaggaccacctgggccgccgctggggctacggcgcctgcgtcgtcgccatcctggtcggcctgctgctcttcctggccggcacacccaggtaccggttcaagaagctggtggggagcccgctgacgcagatcgcggcggtgacggcggcggcgtggaggaagcgagcgatgccgctgccgtcggacccggcaatgctgtacgacgtggatgacgcggtggccgccggagaggacgtcaagggaaagcacaagatgccgcgcaccaagcagtgcaggttccttgagaaggcggcgatcgtggagttggaggtggaggtgcagggttccggcaacggcaaggggaaggggaagaagtgggcggcgtgcacgctgacggacgtggaggaggtgaagcaggtggtgcggatgctgccgacgtgggccaccaccatccccttctggaccgtctacgcccagatgaccaccttctccgtctcccaggcgcaggccatggaccgccgccttggctcctcattcgagatccccgccggctccctcaccgtcttcttcgtcggctccatcctcctcaccgtccccgtctacgaccgccttgtcgtgcccctcgcccgccgcctcaccgccaacccgcagggcctctccccgctgcagcgcatctccgtcggcctcctcctctccgtgctcgccatggtcgccgcggcgctgaccgagcgcgcgcgccgctcggcctccctcgccggcggcgccacgccctccgtcttccttctggtgccgcagttcttcctcgtcggcgccggggaggccttcacctacgtcggccagctcgacttcttcctgcgcgagtgccccaggggaatgaagaccatgagcacgggcctcttcctcagcacgctctcgctcggcttcttcttcagcaccgccatcgtcagcgccgtgcacgccgtcaccacctcaggcgggcggaggccctggctcaccgacgacctcgaccagggcagcctccacaaattctactggctgctggccgccatcagcgccgtcgacctgctggccttcgtggccgtggccaggggatacgtctacaaggagaagcgcctggcggaggccggcatccaactcgtcgcccacgatgcatcagcatcagcatga

SEQ ID NO: 388 - protein, 605 aa, Sorghum bicolor
MADHDASSVPQTAAEGKLTTTTTMMDAWDYKGRPAVRGSSGGWSSAAMILVVELNERLTTLGVGVNLVTYLMDTMHLGGAASANAVTNFLGASFMLCLLGGFVADTYLGRYLTIAIFTAVQAVGMCVLTVSTAAPGLRPPACADPTGPNHCVEPSGTQLGVLYLALYLTALGTGGLKSSVSGFGSDQFDESDGGERRSMARFFSWFFFFISIGSLLAVTVLVYVQDHLGRRWGYGACVVAILVGLLLFLAGTPRYRFKKLVGSPLTQIAAVTAAAWRKRAMPLPSDPAMLYDVDDAVAAGEDVKGKHKMPRTKQCRFLEKAAIVELEVEVQGSGNGKGKGKKWAACTLTDVEEVKQVVRMLPTWATTIPFWTVYAQMTTFSVSQAQAMDRRLGSSFEIPAGSLTVFFVGSILLTVPVYDRLVVPLARRLTANPQGLSPLQRISVGLLLSVLAMVAAALTERARRSASLAGGATPSVFLLVPQFFLVGAGEAFTYVGQLDFFLRECPRGMKTMSTGLFLSTLSLGFFFSTAIVSAVHAVTTSGGRRPWLTDDLDQGSLHKFYWLLAAISAVDLLAFVAVARGYVYKEKRLAEAGIQLVAHDASASA

SEQ ID NO: 389 - DNA, 1071 bp, Sorghum bicolor
atggagcaggagctgcaccggcccatggagctgcccccgggcttccgcttccacccgacggacgaggagctcatcacgcactacctcgcccgcaaggtcgccgacgcccgcttcgccgcgctcgccgtcggcgaggctgacctcaacaagtgcgagccctgggacctgccatcgctggcgaagatgggggagaaggagtggtacttcttctgcctcaaggaccgcaagtacccgacggggctgaggacgaacagggccacggaggccgggtactggaaggccacgggcaaggacaaggatatcttcaggggcaacggcggcaaggtgctcgtcggctccaagaagacgctcgtcttctacacggggagggcgcccaagggcgagaagtccggctgggtcatgcacgagtaccgcctccacggcaagctccatggcgccatcgtcccccccaaggccgccgccggctccaagaacgagtgggtgctgtgcagggtgttcaagaagagccttgtcgtaggcggtgcagcagcagcagcaccagccgcaggcaaaaggggcgccatggagatgtccaagatgaacgacgacatggcggccatctctcacctccctccgctgatggacgtgtccggcgccggcgccaacgtcaaccccgcggcggcggcacacgtgacctgcttctccgacgcactggagggccaccagttcttcaaccagcagcagacgccgccagaagccgacgccacggaccacctcggcctcgccgcctcctcgccgttcctgctgtccggcttcgcgcattacgggccgctgcaccacggcgcgacgagcctggtgcagctcctggagggcagcgtcgtgtacgctgccgccggcggtggcggcctcccggacatgtccaacaagcagcaacagcagcccgtgccggcgccgccgtgcaaggtgggcggcgagcgggagcggctgagcttgtcgcaggacacggggctcacctccgacgtgaaccccgagatctcctcctcctccggcgcccaacggttcgaccacgaccacctctgctggggctactga

SEQ ID NO: 390 - protein, 356 aa, Sorghum bicolor
MEQELHRPMELPPGFRFHPTDEELITHYLARKVADARFAALAVGEADLNKCEPWDLPSLAKMGEKEWYFFCLKDRKYPTGLRTNRATEAGYWKATGKDKDIFRGNGGKVLVGSKKTLVFYTGRAPKGEKSGWVMHEYRLHGKLHGAIVPPKAAAGSKNEWVLCRVFKKSLVVGGAAAAAPAAGKRGAMEMSKMNDDMAAISHLPPLMDVSGAGANVNPAAAAHVTCFSDALEGHQFFNQQQTPPEADATDHLGLAASSPFLLSGFAHYGPLHHGATSLVQLLEGSVVYAAAGGGGLPDMSNKQQQQPVPAPPCKVGGERERLSLSQDTGLTSDVNPEISSSSGAQRFDHDHLCWGY

SEQ ID NO: 391 - DNA, 867 bp, Sorghum bicolor
atggaggggaaggaggaggacgtgcgcctgggcgccaacaagtactcggagcgccagcccatcggcacggcggcgcagggcaccgacgacaaggactacaaggagcccccgccggcgccgctcttcgagcccggtgagctcaagtcgtggtccttctaccgcgcgggcatcgccgagttcgtcgccaccttcctcttcctctacatctccatcctcaccgtcatgggcgtctccaagtccacctcaaagtgcgccaccgtcggcatccagggcatcgcctggtcctttggcggcatgatcttcgccctcgtctactgcaccgccggcatctccggcgggcacatcaacccggcggtgaccttcgggctgttcctggcgaggaagctgtcgctcaccagggcggtcttctacatcatcatgcagtgcctgggcgccatctgcggcgcgggcgtcgtcaaggggttccagcaggggctgtacatgggcaacggcggcggcgccaacgtcgtcgcgccaggctacaccaagggcgacggcctcggcgctgagatcgtcggcaccttcgtcctcgtctacaccgtcttctccgccaccgacgccaagaggaacgccagggactcccatgtgccgatccttgctccgctcccaatcgggttcgcggtgttcctggtccacctggccaccatccccatcaccggcaccggcatcaacccggcgcggagccttggcgccgccgtcgtttacaaccagaaccatgcctggtctgaccactggatcttctgggtcggccccttcatcggcgctgccctggctgccatctaccaccaggtgatcatcagggccatcccgttcaagagcaggtcttaa

SEQ ID NO: 392 - protein, 288 aa, Sorghum bicolor
MEGKEEDVRLGANKYSERQPIGTAAQGTDDKDYKEPPPAPLFEPGELKSWSFYRAGIAEFVATFLFLYISILTVMGVSKSTSKCATVGIQGIAWSFGGMIFALVYCTAGISGGHINPAVTFGLFLARKLSLTRAVFYIIMQCLGAICGAGVVKGFQQGLYMGNGGGANVVAPGYTKGDGLGAEIVGTFVLVYTVFSATDAKRNARDSHVPILAPLPIGFAVFLVHLATIPITGTGINPARSLGAAVVYNQNHAWSDHWIFWVGPFIGAALAAIYHQVIIRAIPFKSRS

SEQ ID NO: 393 - DNA, 405 bp, Sorghum bicolor; identical to SEQ ID NO: 371

SEQ ID NO: 394 - protein, 134 aa, Sorghum bicolor; identical to SEQ ID NO: 372

SEQ ID NO: 395 - DNA, 2136 bp, Sorghum bicolor; identical to SEQ ID NO: 203

SEQ ID NO: 396 - protein, 711 aa, Sorghum bicolor; identical to SEQ ID NO: 204

SEQ ID NO: 397 - DNA, 1461 bp, Sorghum bicolor
atggagaacaacgttgagaaaaataacatgttgaaagagttctatatcccaacttatattttcataccggagtcgccggtggagcatgcatctcagatacctacttgtccagtggttgtttttatcaacaccaaaagtggaggtcaactgggacgtgagttaattgtcacataccggaagcttctcaaccatgcccaggtatttgatctgcttgatgaagctcctgacaaggtcttgcacagactatacagcaacctggaaaggctcaagcatggtggtgacactcttgcttctgaagtctataggagactaaggctaatagttgctggaggtgacggaacggcaggttggttgcttggagttgtatctgatcttaagttagtacgtccaccgcctgttgctacagttccgctgggaactggaaataacttgccatattcttttggatggggaaagaaaaatcctggaacagatcatgattcggtcatatcatttcttcaatcagtaagggaatcaagagagatgaacattgacagctggcacattgtcatgagaatggagggcccaaaagattctccttgtgatccaatcgcacctcctgacttgcctcattctttgcatgcatttcgccgtgtgcccaagacagatccacaagatatggagtattcttacacatttcgtgggggattttggaattacttcagtatgggaatggatgcccaagtgtcttatgcgtttcattctgagaggaaactgcatccagagaagttcaagaatcagttgtccaatcagaaaacatatttgaagctggcatgcacacaaggatggttttgtacctctctgtttcatccaatgtcacggaacattgcttgccttgcgaaagtgaagataatgaagaaatctggaaaatgggaaaccatggaaattccacaaagtattcggtccattgtttgtctcaatttgcctagcttctctggtggactaaacccttggggaacaccaagtaagaggaagcaaagaaaaagagacttggtaatgcctccacttgtggatgatggtcttctggagattgtgggtttcaaagatgcttggcatggccttgtcttgctatctccaaaaggccatggaactcgccttgctcaggctcaccgtgttcgatttgagttcctcagaggcacaactgatcatgcttacatgagaatggatggggagccctggaagcagcctcttcccacggatgacggcaaagtcgtggtagagatctcccatgctgggcaggtgaagatgctcgccactaaagactgcatagccaaaggcatccatgaatcgtgcccagctatttcaacggttcatccagagtccagctccagcgacgacatgaacgatgactttgaggaggagcggaggaactttggtgctgccttgtcttttagatacttgggtgacgtgaacaaagaataa

SEQ ID NO: 398 - protein, 486 aa, Sorghum bicolor
MENNVEKNNMLKEFYIPTYIFIPESPVEHASQIPTCPVVVFINTKSGGQLGRELIVTYRKLLNHAQVFDLLDEAPDKVLHRLYSNLERLKHGGDTLASEVYRRLRLIVAGGDGTAGWLLGVVSDLKLVRPPPVATVPLGTGNNLPYSFGWGKKNPGTDHDSVISFLQSVRESREMNIDSWHIVMRMEGPKDSPCDPIAPPDLPHSLHAFRRVPKTDPQDMEYSYTFRGGFWNYFSMGMDAQVSYAFHSERKLHPEKFKNQLSNQKTYLKLACTQGWFCTSLFHPMSRNIACLAKVKIMKKSGKWETMEIPQSIRSIVCLNLPSFSGGLNPWGTPSKRKQRKRDLVMPPLVDDGLLEIVGFKDAWHGLVLLSPKGHGTRLAQAHRVRFEFLRGTTDHAYMRMDGEPWKQPLPTDDGKVVVEISHAGQVKMLATKDCIAKGIHESCPAISTVHPESSSSDDMNDDFEEERRNFGAALSFRYLGDVNKE

SEQ ID NO: 399 - DNA, 1125 bp, Sorghum bicolor
atgagcggaggaggcatggacggagctccggtcgccgagttccggccgacggtgacgcacaacggccggttcctgcagtacaacatcttcggcaacctgttcgagatcacgcacaagtaccagcctcccatcatgcccatcggccgtggcgcctacgggatcgtctgctcggtgatgaactttgagacaagggagatggtggccatcaagaagatcgccaacgccttcgacaaccacatggacgccaagcgcacgctccgggagatcaagctgctgaggcacctcgaccacgagaacatcataggcatcagggacgtgatcccgccgccgatcccgcaggcgttcaacgacgtgtacatcggcacggagctcatggacacggacctccaccacatcatccgctccaaccaggagctctcggaggagcactgccagtacttcctgtaccagatccttcgcgggctcaagtacatccactccgccaacgtgatccaccgggacctcaagcccagcaacctgctgctgaacgccaactgcgacctcaagatctgcgacttcgggctggcgcgcccctcctccgagagcgacatgatgacggagtacgtggtgacacggtggtaccgcgccccggagctgctgctcaactccaccgactactccgccgccatcgacgtctggtccgtcggctgcatcttcatggagctcaccaaccgccagccgctcttccccggacgcgaccacatgcaccagatgcgcctcatcaccgaggtgatcgggacgccgacggacgatgagctcggcttcatccggaacgaggacgcgcgcaagtacatgcgccacctcccgcagttcccgcggcggccgttcgcgagcctgttcccgaaggtgcagcccgtcgcgctggacctcatcgagcggatgctcaccttcaacccgctgcagaggatcacagttgaagaggcgctggagcacccgtacctggagcggctacacgacatcgccgacgagcccatctgcacggagccattctcgttcgacttcgagcagcaggctctgacagaagaccaaatgaagcagctcatattcaacgaggccatcgaaatgaacccgaatttccgatattag

SEQ ID NO: 400 - protein, 374 aa, Sorghum bicolor
MSGGGMDGAPVAEFRPTVTHNGRFLQYNIFGNLFEITHKYQPPIMPIGRGAYGIVCSVMNFETREMVAIKKIANAFDNHMDAKRTLREIKLLRHLDHENIIGIRDVIPPPIPQAFNDVYIGTELMDTDLHHIIRSNQELSEEHCQYFLYQILRGLKYIHSANVIHRDLKPSNLLLNANCDLKICDFGLARPSSESDMMTEYVVTRWYRAPELLLNSTDYSAAIDVWSVGCIFMELTNRQPLFPGRDHMHQMRLITEVIGTPTDDELGFIRNEDARKYMRHLPQFPRRPFASLFPKVQPVALDLIERMLTFNPLQRITVEEALEHPYLERLHDIADEPICTEPFSFDFEQQALTEDQMKQLIFNEAIEMNPNFRY

SEQ ID NO: 401 - DNA, 750 bp, Sorghum bicolor
atggcggccggaggcgagctgcagctgctgggctcgtggtacagcccctacgtggtccgcgccaaggtggcgctggggctcaaggggctcagcagctacgactacgagtacgtcgaggaggacctcttcggcaagagcgacctcctgctccggtccaacccggtgcacaagaaggtgccggtcctcatccacggcggccgcccggtgtgcgagtcgctcgtcatcgtgcagtacgtcgacgagacctgggcatcaagcaccggcggcactcctcctctcctccccgccgacgcccacgaccgcgccacggctcgcttctgggcagcctacatcgacgacaagtttatcctggcgtggaggcagctgttctggtcgacgacggcggagaagatagccgaggcgttcgccggcgtcgtccccgtgatggagacgttggagcgagcgttcggggagtgctccaaggggagacccttcttcggcggcgacgccgtcgggctggtggacatagcgctcgggagcttcgtgctgtggatgaaagtggtgggcgaggtggccggtgtgaacctgctggacgaggccaagttcccggccctggcggcgtgggcggagcggttcctggcggtggacgccgtgaaggaggcgatgccggacgccgggaggctactggagcactacaaggcgtttcgggctaaatgggcttcacctgctgaacttgctgcttacagatcactgcaacagcaagctaattga

SEQ ID NO: 402 - protein, 249 aa, Sorghum bicolor
MAAGGELQLLGSWYSPYVVRAKVALGLKGLSSYDYEYVEEDLFGKSDLLLRSNPVHKKVPVLIHGGRPVCESLVIVQYVDETWASSTGGTPPLLPADAHDRATARFWAAYIDDKFILAWRQLFWSTTAEKIAEAFAGVVPVMETLERAFGECSKGRPFFGGDAVGLVDIALGSFVLWMKVVGEVAGVNLLDEAKFPALAAWAERFLAVDAVKEAMPDAGRLLEHYKAFRAKWASPAELAAYRSLQQQAN

SEQ ID NO: 403 - DNA, 1698 bp, Sorghum bicolor
atggccaactccatcatcccgagtacaaacagcagcggggagcgcgctgcggtgtcggcatcggccacgacgaagctgggccagctcaacgccgcggtggagcggtcatgggtcggccgacggttccgcctcgctgcgcgtgggaccacgttcaccacggagctgcgcgccggcacggccacgttcctcaccatggcttacatcctcgccgtcaacgcgtccatcctctccgactccggcgccacgtgcaccgtggacgactgcgacgcgccgtccccaaggtgcaagttcccgcccgttgaccccgggtacgccgcctgcgtggcgcgcgcccgccgggacctgatcgtggccaccgcggcgtcgtcggtgatcggctccttcatcatgggcgccttcgccaacctccccatcgcgctcgcaccagggatgggcaccaacgcctacttcgcctacacggttgtcggcttccacggctccggcacgctctcctaccgcaaggcgcttgcagcggtcttcctcgagggcctcatcttcctccttatctccatcgtgggcttgcggtccaagctcgcccagttcatccccgaacctgtgcggatctcggcgtccgcagggatcgggctgttcctggccttcatcgggctgcagagcaacgagggcgtggggctcgtgggcttcagctcgtcgacgctggtcacgcttggcgcgtgcccggcgtcgcagcgcgcgtccgtggcgccagtgctgacattccccaatggtacggtggcactcatgccgggcggcaccgtctccggcggcgtactctgcctgtcggggcgaatgacctccccgacgttctggctcgccgtcgtggggttcctcatcattgccttctgcctcatcaagagcgtcaagggcgctctcatctacggcatcctgttcgtgaccttcgtgtcctggccgcgccacacggccgtcaccgcgttcccggacacgcccaccggcgacgacagcttccactacttcaagaaggtgttcgacgtgcaccggatccggtccacggccggcgcgctcgacttcagcggcatcggccacggctacttctgggaggcgctcatcacctttctctacgtcgacatcctcgacacgactggcagcctctacaccatggcgcggttcgccggattcgttgacgatgtgacgggggagttcgagggccagtacttcgccttcatgtccgacgcgacggccatcgtgtttggctcgctcctgggcacgtccccagttacggcgttcatcgagtcgtccacggggatccgggagggcggccggacggggctggcggcgctcacgacggcggcctacttcgcggcggcgctgttcatcacgccggtgctcgcgtcgataccgtcttgggcggtcgggccgccgctggtgctggtgggcgtcatgatgatgcgcgcggtggcggaggtcgactgggacgacatgcggcaggccgtgccggcgttcctaacactagcgctcatgccgctcacctactccatcgcctacggactcgtcggcggtatcgcctcctacatgctcctccactcgtgggactgggcgtgccatgcgaccaagaggctcggctgccgcaagaagatcggaggcggcgccgagaggactaattgcggcggggaagagcagaggaaggatatggaatccgcataa

SEQ ID NO: 404 - protein, 565 aa, Sorghum bicolor
MANSIIPSTNSSGERAAVSASATTKLGQLNAAVERSWVGRRFRLAARGTTFTTELRAGTATFLTMAYILAVNASILSDSGATCTVDDCDAPSPRCKFPPVDPGYAACVARARRDLIVATAASSVIGSFIMGAFANLPIALAPGMGTNAYFAYTVVGFHGSGTLSYRKALAAVFLEGLIFLLISIVGLRSKLAQFIPEPVRISASAGIGLFLAFIGLQSNEGVGLVGFSSSTLVTLGACPASQRASVAPVLTFPNGTVALMPGGTVSGGVLCLSGRMTSPTFWLAVVGFLIIAFCLIKSVKGALIYGILFVTFVSWPRHTAVTAFPDTPTGDDSFHYFKKVFDVHRIRSTAGALDFSGIGHGYFWEALITFLYVDILDTTGSLYTMARFAGFVDDVTGEFEGQYFAFMSDATAIVFGSLLGTSPVTAFIESSTGIREGGRTGLAALTTAAYFAAALFITPVLASIPSWAVGPPLVLVGVMMMRAVAEVDWDDMRQAVPAFLTLALMPLTYSIAYGLVGGIASYMLLHSWDWACHATKRLGCRKKIGGGAERTNCGGEEQRKDMESA

SEQ ID NO: 405 - DNA, 1977 bp, Sorghum bicolor
atgccgcgaacggtgtctgatgggggagaagacgaccatggcgccgacgttgctagcaggacgtcgtcgcaccgccgcatggagcacggacatgggtataaggtcggtgtcccaccgaagaagaacttcctcaccgagttctctgacgcggtgaaggagacgttcttcgctgacgacccactgcggcagtacaaggatcagcccaagtccaagcagatctggctcggcctgcagcaggtcttcccggtgctcgactggagcagatactactctctcagcaagttcaagggtgacttcatcgctgggctcaccattgccagcctctgcataccccaggacattggctattctaagcttgctaacttgccagcagaggtgggactatacagtagctttgtgccgcctctgatatacgccgtgatgggcagctccagggatatagccatcggcccagtggccgtggtgtcgctgttgctcggtactctccttcagaatgagattgaccccaagacacacccgcttgagtacaagcggttagcgttcaccgcgacctttttcgcaggggtcactcaggcagcgctcggattcttcaggctagggtttatcatagagttcttgtctcatgctgccattgtcggattcatgtccggtgctgccatcaccattgctcttcagcagctgaaaggatttcttggaattgcaaacttcaccaagaaatctgatattgtatctgtcatgaaatcagtttggggaaatgttcaccatgggtggaattggcagacaatactgataggagcgtccttcctggcattccttctggttgccaagtacattgggaaaaggaataaaaagctcttctgggtgtctgcaatcgcacctctcacttcggtgatcatatccacattttttgtgtacatcactcgtgcagataagcatggtgttgcaattgtcaaggacataaggaaaggcatcaacccaccttcatctagtctcatatacttcactggcccatacctggcaacaggattcaaaattggggtagtagctggaatgataggactaacggaagcaattgcaattggaagaacatttgctgccctcaaggattaccagatagatgggaataaagaaatggtggctctaggaaccatgaacattgttggttcattgacttcttgctacatagccacaggttctttctcacggtcagcagttaattacatggctggctgcaaaacagcagtgtcaaatgttgttatgtcaattgtcgtaatgcttacgttgctgttgatcaccccactgttcaaatacacaccaaatgcaatcctttcctcaatcatcatatcagcagtgcttggtttaattgactacgagtcagcttaccttatctggaaagttgacaaactggactttctagcatgcatgggagcattctttggagtcatattttcatcagtggagtatggcttgctcattgcggttgtgatatctcttgctaaaattcttctccaagtaacacggccaagaacagttttacttggaaaccttccaaggacaactatatacaggaatgtagaacaatatcctgatgctactaaggttccagggatgctaattgttagagtggactcagctatatacttcacaaactccaactatgttaaagagagaatcctgaggtggctaagagatgaggaggaggagcaacaggaccagaagttaccaaaaactgagtttctaattgttgatctgtctcctgtaattgatatcgacacaagcggaatccacgctttggaggagttgttgaaagctcttgaaaaacgcaaaattcagctggttcttgccaatcccgggccagccgtgatccagaagctccgctcagctaaattcatggacatgattggtgaagacaagatattcctctcggttggcgacgctgtgaagaaatttgctcccaaggtggtggataatgtctga

SEQ ID NO: 406 - protein, 658 aa, Sorghum bicolor
MPRTVSDGGEDDHGADVASRTSSHRRMEHGHGYKVGVPPKKNFLTEFSDAVKETFFADDPLRQYKDQPKSKQIWLGLQQVFPVLDWSRYYSLSKFKGDFIAGLTIASLCIPQDIGYSKLANLPAEVGLYSSFVPPLIYAVMGSSRDIAIGPVAVVSLLLGTLLQNEIDPKTHPLEYKRLAFTATFFAGVTQAALGFFRLGFIIEFLSHAAIVGFMSGAAITIALQQLKGFLGIANFTKKSDIVSVMKSVWGNVHHGWNWQTILIGASFLAFLLVAKYIGKRNKKLFWVSAIAPLTSVIISTFFVYITRADKHGVAIVKDIRKGINPPSSSLIYFTGPYLATGFKIGVVAGMIGLTEAIAIGRTFAALKDYQIDGNKEMVALGTMNIVGSLTSCYIATGSFSRSAVNYMAGCKTAVSNVVMSIVVMLTLLLITPLFKYTPNAILSSIIISAVLGLIDYESAYLIWKVDKLDFLACMGAFFGVIFSSVEYGLLIAVVISLAKILLQVTRPRTVLLGNLPRTTIYRNVEQYPDATKVPGMLIVRVDSAIYFTNSNYVKERILRWLRDEEEEQQDQKLPKTEFLIVDLSPVIDIDTSGIHALEELLKALEKRKIQLVLANPGPAVIQKLRSAKFMDMIGEDKIFLSVGDAVKKFAPKVVDNV

SEQ ID NO: 407 - DNA, 2754 bp, Sorghum bicolor
atgcagggcctcgcggtagcaagcccgcttcctcccgccgcggccgcagctcggcggcggccgcgcgcgtcctcctctaccagggaagcagtttcacaatgctggaagtacgaattaagtcgagatcaatatctaggaggcttcctaaggataagtcagtctcaaggaagcttgcacagacatcgctcaacaaatttgctcagaccagctgctgcagctatttcagttgaacaagatgaactcaatacttatcttccaaaaggtgatatgtggtctgtgcacaagttcggtggaacctgtatgggaacaccccaaagaatccagagtgtcgctgatatagttctcggtgattcttctgagaggaagctgataattgtttcagcaatgtccaaagtaaccgacatgatgtacaaccttgtacagaaggctcagtcaagggatgattcatatacaatagcattggaagaagtttttgagaagcatatggctgcagcaaaggatctccttgatggagaagatcttgcaagtttcttgtctcagctgcactcagacgtcagcaacttgcgagccatgctccgtgctatctatatagctgggcatgcgacagaatctttctctgactttgttgttgggcatggagaattgtggtcttcgcagatgctttcatatgcaataaagaagtctggggcaccctgcagttggatggatacaagagaagttcttgttgtaaaacccagtggttctaatcaagtagaccctgattgtttggaatctgagaagcgacttcagaaatggttttctcggcaaccagctgacataatagttgctacagggtttattgcaagtacagctgaaaacattcctacaactctaaaaagggatggaagtgatttctcagcagccataattggttctcttgtcagggcacgccaggtcactatttggactgatgttgacggggtatttagcgctgatccaagaaaagttagtgaggctgtgatcttaagaactttgtcttaccaggaggcctgggaaatgtcatattttggggcaaatgttttgcatccgcgcaccattatacctgtgatgaaagacaacattcccattgttattaagaacatgttcaatctctgtgcccctggaaccatgatttgcaagcagcctgccaatgaaaatggtgatttagacgcatgtgtgaaatcatttgctactatcgataatttagctcttgttaatgttgaaggaactggaatggctggtgttccaggtacagcaagtgctatatttagtgctgttaaagatgttggagctaatgttatcatgatatctcaggctagcagtgaacattcagtatgctttgctgttccagaaaaggaagttgctgcggtttctgctgcattacatgttaggtttcgtgaggcattagcagcagggaggttatctaaggttgaagttattaaaggttgcagcattctggctgctgttggactgaggatggctagcactcctggagtcagtgcaatactttttgatgcattagccaaggcaaacattaatgttcgagcaatagctcaaggttgcagtgaatacaatattactgttgtattgaagcaagaagattgtgtaagggctctgagagctgctcactcaaggttcttcctctccaaaaccacacttgctgttgggatcataggacctggtttaattggtggaacactccttaaccagctgaaggatcaggctgctgttcttaaggaaaatatgaacattgatctacgtgtcattggaataactggttcaagtacaatgcttttgagcgacacgggaatagacttaacccagtggaaacagcttctacaaaaggaagcagaaccagctaatattgatagttttgttcatcatttatctgataatcatatatttccaaacaaagttttggtggactgcacagcggatacaagtgtggcatcccattattacgattggttaaagaagggtattcatgtcatcacgccgaataagaaagcaaattctgggccacttgatcggtacctgaaattacggactctgcagcgtgcctcatacactcattacttttatgaagcaactgttggtgctggcctcccaatcattagcaccctgcgaggtcttctggagacgggtgataagatactgcgtattgagggcattttcagtggaactttgagttatatatttaacaatttcgaaggaacaaggccttttagtgatgttgttgctgaagcaaaagaggcaggatacactgaacctgatccaagagatgatctatctggaactgatgttgcccgaaaggtcattatccttgcaagggaatctggtttgaggctcgaacttcctgatattcctgtgaagagccttgtgccagaaacacttgcatcatgctcgtcagcagatgaattcatgcaaaagctaccaacctttgatgaggactgggccaggcaacgcagtgatgctgaagctgcagacgaagtcctgcgttacgttggagtggtggacacggtgaacaagaaaggacaggtggagctacgtagatacaagagggatcacccgttcgcgcagctctccggctccgacaacatcatcgccttcaccacctctaggtacaaggagcagccactgatcgtgcggggtccaggcgcgggcgcggaggtgactgcgggtggcgtcttctgcgaccttctgcggctggcgtcttacctcggcgctccttcgtag

SEQ ID NO: 408 - protein, 917 aa, Sorghum bicolor
MQGLAVASPLPPAAAAARRRPRASSSTREAVSQCWKYELSRDQYLGGFLRISQSQGSLHRHRSTNLLRPAAAAISVEQDELNTYLPKGDMWSVHKFGGTCMGTPQRIQSVADIVLGDSSERKLIIVSAMSKVTDMMYNLVQKAQSRDDSYTIALEEVFEKHMAAAKDLLDGEDLASFLSQLHSDVSNLRAMLRAIYIAGHATESFSDFVVGHGELWSSQMLSYAIKKSGAPCSWMDTREVLVVKPSGSNQVDPDCLESEKRLQKWFSRQPADIIVATGFIASTAENIPTTLKRDGSDFSAAIIGSLVRARQVTIWTDVDGVFSADPRKVSEAVILRTLSYQEAWEMSYFGANVLHPRTIIPVMKDNIPIVIKNMFNLCAPGTMICKQPANENGDLDACVKSFATIDNLALVNVEGTGMAGVPGTASAIFSAVKDVGANVIMISQASSEHSVCFAVPEKEVAAVSAALHVRFREALAAGRLSKVEVIKGCSILAAVGLRMASTPGVSAILFDALAKANINVRAIAQGCSEYNITVVLKQEDCVRALRAAHSRFFLSKTTLAVGIIGPGLIGGTLLNQLKDQAAVLKENMNIDLRVIGITGSSTMLLSDTGIDLTQWKQLLQKEAEPANIDSFVHHLSDNHIFPNKVLVDCTADTSVASHYYDWLKKGIHVITPNKKANSGPLDRYLKLRTLQRASYTHYFYEATVGAGLPIISTLRGLLETGDKILRIEGIFSGTLSYIFNNFEGTRPFSDVVAEAKEAGYTEPDPRDDLSGTDVARKVIILARESGLRLELPDIPVKSLVPETLASCSSADEFMQKLPTFDEDWARQRSDAEAADEVLRYVGVVDTVNKKGQVELRRYKRDHPFAQLSGSDNIIAFTTSRYKEQPLIVRGPGAGAEVTAGGVFCDLLRLASYLGAPS

SEQ ID NO: 409 - DNA, 618 bp, Sorghum bicolor
atgaagaggtttgcagtgcaggagagcgagatggcgcgcgtgctgatgctcatgtcacactcgcacggccaggaccagtcgctgccgctgccggtgatcgccgccgggcgcggcgacggggcggcgccggagcgggtgttcgtgtgcaagacgtgcaaccgcgtgttcccgtcgttccaggcgctgggcggccaccgcgccagccacaagaagccgcggctggacggggacggcgaccccgcgctcgccaagcccaagctgcacggctgctccatctgcggcctcgagttcgccatcggccaggccctcggcggccacatgaggcgccaccgcgccatgacgggcggcatgcccatgccaccgccggcgacgacgaggatcgtcgtcgacaagaagccggacggcgacgtcgtcggcatcatccaccacgaccacggccacggcggcgtcaagcccggcgggctgtggctcgacctcaaccacccgccctgcgacgacgacggctgcgacgccgaggtggagtgcggccacattaatgccgccgccgccgccggtgggatcacgttccatcagttcctcgacactggcaccatggccgtcgactgccttggctactag

SEQ ID NO: 410 - protein, 205 aa, Sorghum bicolor
MKRFAVQESEMARVLMLMSHSHGQDQSLPLPVIAAGRGDGAAPERVFVCKTCNRVFPSFQALGGHRASHKKPRLDGDGDPALAKPKLHGCSICGLEFAIGQALGGHMRRHRAMTGGMPMPPPATTRIVVDKKPDGDVVGIIHHDHGHGGVKPGGLWLDLNHPPCDDDGCDAEVECGHINAAAAAGGITFHQFLDTGTMAVDCLGY

SEQ ID NO: 411 - DNA, 1191 bp, Sorghum bicolor
atggccgcagtcgacaccttcctcttcacctcggagtctgtgaatgagggacacccagacaagctctgcgaccaggtctcagatgctgttcttgacgcttgccttgctgaggaccctgacagcaaggttgcttgcgagacctgcaccaagaccaacatggtcatggtctttggtgagatcaccaccaaggccaatgtcgactacgagaagattgtcagggagacctgccgcaacattggtttcgtgtcagctgatgtcgggcttgacgctgaccactgcaaggtgcttgtgaacattgagcagcagtctcctgatattgctcagggtgtgcacggccacttcaccaagcgccccgaggagattggagctggtgaccagggacacatgtttgggtatgccactgatgagacccctgagctgatgcccctcagccatgtccttgccaccaagcttggtgcaaaactcaccgaggtccgcaagaatggaacctgcgcctggctcaggcctgatgggaagacccaggtgacagttgagtaccgcaatgagggtggtgccatggtccccatccgtgtccacactgtcctcatctctacccagcacgacgagacagtcaccaatgatgagattgctgctgacctgaaggagcatgtcatcaagcctgtcatccctgagcagtaccttgatgagaagaccatcttccaccttaacccatctggtcgctttgtcattggtggacctcacggtgatgctggtcttactggccggaagatcatcattgacacctatggtggctggggagcccacggtggtggcgctttctccggcaaggacccaaccaaggtcgaccgcagtggagcctacatcgcaaggcaggctgccaagagcattgttgccaacggccttgctcgccgcgccatcgtccaggtctcctacgccatcggtgtgcctgagcctctctccgtctttgttgacacgtatggcaccggcacgattcctgacaaggagatcctcaagattgtgaaggagaactttgacttcaggcctggcatgatcatcatcaacctcgacctcaagaaaggtggcaacgggcgctacctcaagacggcggcctacggccactttggaagggacgaccctgacttcacctgggaggtggtgaagcccctcaaggcggagaagccttctgcctaa

SEQ ID NO: 412 - protein, 396 aa, Sorghum bicolor
MAAVDTFLFTSESVNEGHPDKLCDQVSDAVLDACLAEDPDSKVACETCTKTNMVMVFGEITTKANVDYEKIVRETCRNIGFVSADVGLDADHCKVLVNIEQQSPDIAQGVHGHFTKRPEEIGAGDQGHMFGYATDETPELMPLSHVLATKLGAKLTEVRKNGTCAWLRPDGKTQVTVEYRNEGGAMVPIRVHTVLISTQHDETVTNDEIAADLKEHVIKPVIPEQYLDEKTIFHLNPSGRFVIGGPHGDAGLTGRKIIIDTYGGWGAHGGGAFSGKDPTKVDRSGAYIARQAAKSIVANGLARRAIVQVSYAIGVPEPLSVFVDTYGTGTIPDKEILKIVKENFDFRPGMIIINLDLKKGGNGRYLKTAAYGHFGRDDPDFTWEVVKPLKAEKPSA

SEQ ID NO: 413 - DNA, 1074 bp, Sorghum bicolor
atggccagcctcaccgatctcgttaacctcgacctgagtgattgcaccgacaagatcattgccgagtacatctggattggaggatccggcatagacctcaggagcaaagcaaggacggtgaaaggccccatcaccgatccgagccagctgccaaaatggaactacgacggctccagcaccgggcaggctcccggagaggacagcgaagtcatcctctaccctcaagccattttcaaggacccgttcaggaagggcgacaacatccttgtgatgtgtgactgctacacgccacaaggcgagccaatccctactaacaagaggtacaatgctgccaaggttttcagccaccccgacgttgcagctgaggtgccatggtacggtattgagcaggagtacactctccttcagaaggatgtgaactggccccttggctggcctgttggtggataccctggtccccagggaccatactactgcgctgccggtgccgataaggcctttgggcgcgatgtggtcgacgcccactacaaagcctgcctctacgccggcatcaacatcagcggcatcaacggcgaagtcatgcctggccagtgggagttccaagttggcccgtccgttgggatatctgccggtgacgaaatatgggttgcccgctacattctcgagaggatcactgagattgccggaattgttctctccttggacccgaagccaatccagggtgactggaacggcgccggtgcccacaccaactacagcaccaagtcgatgagggaggccggtggctacgaggtgatcaagaaggcgatcgagaagctggggaagaggcacacggagcacatcgccgcgtacggcgagggcaacgagcgccgcctcacgggccgacacgagaccgccgacatcaacaccttcaaatggggcgtggcgaaccgcggcgcgtccatccgcgtgggccgcgacacggagagggagggcaagggatacttcgaggaccgcaggccggcatccaacatggacccctacgtcgtcaccggcatgatcgccgagaccaccatcctgtggaacggaaactga

SEQ ID NO: 414 - protein, 357 aa, Sorghum bicolor
MASLTDLVNLDLSDCTDKIIAEYIWIGGSGIDLRSKARTVKGPITDPSQLPKWNYDGSSTGQAPGEDSEVILYPQAIFKDPFRKGDNILVMCDCYTPQGEPIPTNKRYNAAKVFSHPDVAAEVPWYGIEQEYTLLQKDVNWPLGWPVGGYPGPQGPYYCAAGADKAFGRDVVDAHYKACLYAGINISGINGEVMPGQWEFQVGPSVGISAGDEIWVARYILERITEIAGIVLSLDPKPIQGDWNGAGAHTNYSTKSMREAGGYEVIKKAIEKLGKRHTEHIAAYGEGNERRLTGRHETADINTFKWGVANRGASIRVGRDTEREGKGYFEDRRPASNMDPYVVTGMIAETTILWNGN

SEQ ID NO: 415 - DNA, 1539 bp, Sorghum bicolor
atggcgtcagtgagaattcgcggtgccgccgccgcggcgccacccgcgtccgtagagcccgagcggagagccggaggcacactaccactccaacttgcccacctcgacggacggttctaccaccagtccaccaccctcaccctgtggttcattgaacctggcccttcaacactcgccaaggccagccaaccaactagccaaagccgccagggggcgtctgtgctctgcgcagcagccctttcgtcccgccctccctccacctccaccccttcgcggacagaaaaaagaagtgtcagtgtcagctgcccccgtataaagcgcgcaccaccagcggcggcctgcccgcccgcccgcccgcatcgccatggctctcgccgtccgcacgccccgcttccagcctcgacggacctccatttctgcgcccgcaccacccgcctcgacatccctcgccgccgcgaacgcgagggcccgtgcctgcgcacgcgccgccgtccgagcctcgcccttcaccgagggcacctcctcctcgcgctaccgccgagacgcctggtcctacgccgccgccgatggctcctccagctccgcatccccgtcctcttccgatgctgccgctgccgccgccgctgcggcggcggcggcggcccgccgggagacgagatcgcgctgcagctgccggagctgcggaggctcctggacgcgctgagggcgtccagggggaaaggcgccgagggggcagacggcggcggcgggcccgggagggtggcgctggtggggacagggcccggggaccccgagctgctcacgctcaaggcggtccgggccatcgaagcggcggacctggtgctctacgacaggctggtgtctaacgacgtgttggacttggtcggggagggcgccaggctgctctacgtcggcaagacggcgggataccacagccgcacccaggaggagattcacgagctgctgctgagctttgccgaggctggtgccaatgttgtccgcttgaaaggtggcgatcctctggtttttggaaggggcggagaagagatggatttcttacagcaacagggaatcaaagtcgaagttatcccaggaattacttctgcttcaggaattgcagcagaactaggcattccgctaacccatagaggtgttgctaccagtgtcagatttttaaccggacactccagaaatggtgggacagatccactacatgtagctggaagtgcagctgatccagacactactttggttgtgtacatgggtttgtcaacacttccatcactcgctccaaagttaatgaagcacggcctgccgccagatacccctgctgttgcagtagagcgcgggactacacctcaacaacgaacggtgttctccttgttaaaggatcttgtggatgaagtcaagtcagctgatctagtttctccaactctaataattatcgggaaagtggtatccttgtcgcccttctgggtggagtcatctgaacattatgcactgaaaattgagagctcttatacaaatgaaaccagatga

SEQ ID NO: 416 - protein, 512 aa, Sorghum bicolor
MASVRIRGAAAAAPPASVEPERRAGGTLPLQLAHLDGRFYHQSTTLTLWFIEPGPSTLAKASQPTSQSRQGASVLCAAALSSRPPSTSTPSRTEKRSVSVSCPRIKRAPPAAACPPARPHRHGSRRPHAPLPASTDLHFCARTTRLDIPRRREREGPCLRTRRRPSLALHRGHLLLALPPRRLVLRRRRWLLQLRIPVLFRCCRCRRRCGGGGGPPGDEIALQLPELRRLLDALRASRGKGAEGADGGGGPGRVALVGTGPGDPELLTLKAVRAIEAADLVLYDRLVSNDVLDLVGEGARLLYVGKTAGYHSRTQEEIHELLLSFAEAGANVVRLKGGDPLVFGRGGEEMDFLQQQGIKVEVIPGITSASGIAAELGIPLTHRGVATSVRFLTGHSRNGGTDPLHVAGSAADPDTTLVVYMGLSTLPSLAPKLMKHGLPPDTPAVAVERGTTPQQRTVFSLLKDLVDEVKSADLVSPTLIIIGKVVSLSPFWVESSEHYALKIESSYTNETR

SEQ ID NO: 417 - DNA, 1488 bp, Sorghum bicolor
atggcccagatgatctccaccatgcctatgctggacgccgccccggccgcgtccgccattatggcgcccaaactgcaggccgccgccgccgcctgcctggacgcgccgccctcgggcatcaccgtcgtgtcgaggcagcacgttcgcccggacgccgcgtccgcgatcggcgacctcacgctgtccgtctccgacctgcccatgctgtcgtgccactacatccagaaggggctcttcttcccggcgcccgacctgcccatgccctcgctcgtgtcgctgctcctgtcgtcgctgtcccgagcgctcgccgtcgtcccggccctcgccggccgcctcgtcacgctgcccgacgaccgcatcgtcatccgctgcaacgacgcgggcgtggacttcctccacgccgtcgcgcccggcctgtcgcttgacgactttctcgtccctgacgccgacgtgcccaccaagttgacaaaggacttgttccccatggaccggaccgtgagctacgaaggccaccgtcgcccgctcacgtcgttccaggtcaccgtgctcggtgacggcgccgtctttatcggcatcgtcgccaaccacgccgtcgtggacggcacctccttttggcaattcttcaacacctgggcggccatctgccgcggcgagtcacccaagatgccggacttccgccgaaacttctttggcgagtccaccgccgtcctccgcttccccggcggcgtcggcccgtcggtgaccttcgacgtggacgcgcctctccgtgagcgcgtctttcacttcagcgccgacgcgattcgcgagctgaaaacaatcgccaaccgtcgtccgagcggtggccaagacgccgaggtttacggcaagatggcgcatgaccccaagaatccccaagtgctgcgcggggagatctcgtcgttccagtcgctgtgcgcgcagatatggctcgcggtgacgcgtgcccggaaacgcctggcgcccgacgcgacgacgacgttccgaatggcggtgaactgccggcaccggctgcagccggccatctcccctgtctactttggcaacgccatccagagcgctgtaacgctggcgacggtgtcggagctggctcgcagcgatcttaggtgggcggcgggcaagctgaatgagagcctcgcggcgtacggcgacggcactatccggcgcgcggcggcggcgtggcaggccgcgccccggtgcttcccgctgggcaaccccgacggcgcggtgatcacgatggggagctcgaaccggttcccgatgtacgagggcaacgacttcgggtggggacggcccctcgccgtacggagcgggcgcgccaacaagttcgacggcaagatgtcggcgttcccgggacgcgccggggacggcagcgtggacatcgaggtgtgcctgccaccggagaccatggcggcgctgctccgcgacgccgagttcatgcagtacgtgtcgtgcccgtcgcatctgttgtga

SEQ ID NO: 418 - protein, 495 aa, Sorghum bicolor
MAQMISTMPMLDAAPAASAIMAPKLQAAAAACLDAPPSGITVVSRQHVRPDAASAIGDLTLSVSDLPMLSCHYIQKGLFFPAPDLPMPSLVSLLLSSLSRALAVVPALAGRLVTLPDDRIVIRCNDAGVDFLHAVAPGLSLDDFLVPDADVPTKLTKDLFPMDRTVSYEGHRRPLTSFQVTVLGDGAVFIGIVANHAVVDGTSFWQFFNTWAAICRGESPKMPDFRRNFFGESTAVLRFPGGVGPSVTFDVDAPLRERVFHFSADAIRELKTIANRRPSGGQDAEVYGKMAHDPKNPQVLRGEISSFQSLCAQIWLAVTRARKRLAPDATTTFRMAVNCRHRLQPAISPVYFGNAIQSAVTLATVSELARSDLRWAAGKLNESLAAYGDGTIRRAAAAWQAAPRCFPLGNPDGAVITMGSSNRFPMYEGNDFGWGRPLAVRSGRANKFDGKMSAFPGRAGDGSVDIEVCLPPETMAALLRDAEFMQYVSCPSHLL

SEQ ID NO: 419 - DNA, 927 bp, Sorghum bicolor
atggcggacgcgaagcagcagccccagcagacggcggcggcggccgcggccaccaccggcgtctggaagacggtcaagcccttcgttaacggcggggcctccgggatgctcgccacctgcgtcatccagcctatcgacatggtcaaggtgaggatccagttgggtgagggctctgctggtcaggtcacaaggaacatgcttgcaaatgagggtgtccgttccttctacaagggtttgtctgccggtttgctaaggcaagcgacgtacacgactgctcgtcttggatcattcagggttctaactaacaaagcagttgaaaagaatgaagggaagccgttgcctctaattcagaaagcttttattggtctgactgctggagcaattggtgcttgtgttggtagtcctgctgatttggcactcattagaatgcaagctgattcgaccctgccagctgcacaacggcgcaactataagaatgcttttcatgcactctaccgtatcactgctgatgagggagtccttgcgctttggaagggtgcaggtccaactgttgtgagagctatggcactcaatatgggtatgcttgcttcctatgaccagagtgtcgagctatttagggacaaacttggtgcaggagaaatttctactgttgttggagccagtgctatttctggattcttcgcctcagcttgcagtttgccctttgactatgtgaagacacagattcagaagatgcaacctgatgcgaatggcaagtacccatacacagggtctttggactgtgccatgaagaccttcaagagcggtggtccattcaagttctacactggtttcccagtgtactgtgtcaggattgcaccccatgtcatgatgacctggatattcttgaatcagatccagaagcttgagaagaagattggcatatag

SEQ ID NO: 420 - protein, 308 aa, Sorghum bicolor
MADAKQQPQQTAAAAAATTGVWKTVKPFVNGGASGMLATCVIQPIDMVKVRIQLGEGSAGQVTRNMLANEGVRSFYKGLSAGLLRQATYTTARLGSFRVLTNKAVEKNEGKPLPLIQKAFIGLTAGAIGACVGSPADLALIRMQADSTLPAAQRRNYKNAFHALYRITADEGVLALWKGAGPTVVRAMALNMGMLASYDQSVELFRDKLGAGEISTVVGASAISGFFASACSLPFDYVKTQIQKMQPDANGKYPYTGSLDCAMKTFKSGGPFKFYTGFPVYCVRIAPHVMMTWIFLNQIQKLEKKIGI

SEQ ID NO: 421 - DNA, 1848 bp, Sorghum bicolor
atggaccagacggggtcggggctggacaagcggatggaggcgctgtcgctgcaggcgagcgctctgcgggaggccctgcagcggagcgaggagaacacggacagcgcggtcgccgccctcgactcgttcgaccgccacatctccgcgatcgacgcctccttccgccccgcgcaggtgagggcgcaggccagcacgatggcgaacgagaacatcgacaggaccatcgaggccgccgaggccatcctcgcgcagttcgagatcgtccgtcggatgtatactcagtatcttcacaccgttagattactagaggatctatccatagggcttggtgtagtcgcaaagtggcggttggctgaagctgtgatattgaggggtccacatgaggatctgaagagcttccaggaagctgtggatctgctgaaaggcgtcttccacttcttttcctccaacaagaactttaagagctgtgaaggagtattgagtcaagttaacaacctcttaaccaagtctaagcttaagatcgaggaggaattcaggcagttaatgagtacttacagcaaagctagtgagcccgcacttctatttgattgccttccaaagtccctatcggcattagaagggacctctcaatcagttggagagcaactatccaaaagctttgaaagtgctacatacaggactccaatactaattcccccaagaatatttccacttctgcatgatatagctcatcagttagttcaggatggaaatcaacagtcgtgctatagaatttacagagatgctcgcagctcagcgttagaactgagtcttcaaaaactgggcatagaaaagctaactgaagataagatccagcagttggagccctcaaatatgaaaattggaacctggactcatattatgcacattacagttaaagtattactggctggagaaagaaaaatctgtgatcatattttcgatggtatcactttcaacaaggatcaatgttttgctgaagtggcaggaagcagtgttatgactcttctcagctttggtgatgttgttgctaaaagtaaaagatctcatgaaaatttgtttctactgctggagatgtatggattaatgcacggacttcagtcagacgttgaagtgacttttcaaggaaatttttgctctgggatgcgggaggctgcattaaacctgactaagagcttggcgcaggctgcccaagaaactctgcttgatttggagcaacctgaaagtggcagtgagactgaatctcaacttgcgattacaaccatgaagattatgcaggcttttctgaataacttgaatgggaaatctaagctgtacaaggatcctgcattgtctcacatatttcttatgaacaaccttcactatatagttacgtttgttcgcagatcagaatccaatgatatacttggtggtgactggattcagaggcaccgtaagattgtgcagcaaaatgctaaccagtacaagagggtagcatgggcaaagattttccaggtactctctgtccaagtcacaggtggcaatagttcttcatcgccatctgatgttagcagcactggagtttcaaggactatgatcaaagaacggttcaagtccttcaatatgcaattcgaagagcttcatgcaaagcagtctcaatggactattcctgatcaggaattgcgggatgaactgaggcttgccatggctgaagttctgttgccagcatataggtctttcattagccgttttgggtatcttattcaacgtgggaagaaccctcataagtacatcaaatactcaccagaagaattggatcaaatgttgggtcagttcttcctaggacagtaa

SEQ ID NO: 422 - protein, 615 aa, Sorghum bicolor
MDQTGSGLDKRMEALSLQASALREALQRSEENTDSAVAALDSFDRHISAIDASFRPAQVRAQASTMANENIDRTIEAAEAILAQFEIVRRMYTQYLHTVRLLEDLSIGLGVVAKWRLAEAVILRGPHEDLKSFQEAVDLLKGVFHFFSSNKNFKSCEGVLSQVNNLLTKSKLKIEEEFRQLMSTYSKASEPALLFDCLPKSLSALEGTSQSVGEQLSKSFESATYRTPILIPPRIFPLLHDIAHQLVQDGNQQSCYRIYRDARSSALELSLQKLGIEKLTEDKIQQLEPSNMKIGTWTHIMHITVKVLLAGERKICDHIFDGITFNKDQCFAEVAGSSVMTLLSFGDVVAKSKRSHENLFLLLEMYGLMHGLQSDVEVTFQGNFCSGMREAALNLTKSLAQAAQETLLDLEQPESGSETESQLAITTMKIMQAFLNNLNGKSKLYKDPALSHIFLMNNLHYIVTFVRRSESNDILGGDWIQRHRKIVQQNANQYKRVAWAKIFQVLSVQVTGGNSSSSPSDVSSTGVSRTMIKERFKSFNMQFEELHAKQSQWTIPDQELRDELRLAMAEVLLPAYRSFISRFGYLIQRGKNPHKYIKYSPEELDQMLGQFFLGQ

SEQ ID NO: 423 - DNA, 6492 bp, Sorghum bicolor
atgtcgacggcgcaagggacagcgttgaagtcggcgccgatggggccaggtcgtcgggcccggcgcggccgccccgtggcggcgccgtaccgttcgggctggcaagcctacggtggcgtttccctcgagggcggcgggttcctcggtggcgtgcagcgcaccgaggagcgcgtcgctccgcgggcgccccgcgcggcggcacgcgacgccgaggtggtgaggccgctctcgaagctcccgaacagcagcattgggctctacaatccctcgttcgagcgcgacgcgtgcggcgttgggtttgtcgctgagctttctggcgattacaagcgcgagactgttaatgatgctattgagatgcttgagagaatggcacaccgtggtgcctgtggctgtgagaagaacacaggagacggtgcgggcatcatggtcgctctaccacatgacttcttcaaagaggtcacaaaggatgctggctttgagctaccgccaccaggcgagtatgctgttggaatgttttttatgccaaccgatgaaaagcgtcgtgagaagggcaaagctgagtttaagaaggtcgcggaatcactgggacatgtaatactcgggtggcgtccggttccaactgataactcagacctgggtgaatctgcactggagactgagccagtcattgagcaggttttcattaccaagagttcaagatcagaggctgagtttgagcaacagctatatatccttaggagactctcaatcatctccgtccgagcagctctgaacattaagcgtggaggagagagggatttctacatgtgttctctgtcttcaaggactattgtttacaagggtcagcttaaaccatgccagcttaaggggtactactatgccgacctaggtcatgaaaacttcacgagttatatggctctggttcactcaaggttctccacaaacacctttcccagctgggaccgtgcacaaccaatgcgcgttttaggtcataatggagagatcaatacccttagaggaaacaagaattggataacagcacgtgagggtctcttagaggctgagaagcttggattatcaaaggagcagctctcaagaattctgccaattgttgatgctacctcttctgattctggcgcattcgataatgttcttgagcttcttgtccgaggtgggcgaagcctgccagaagctgtgatgatgatgatccctgaggcatggcagaatgatggaaacatggatcctgagaagaaagctctctacgagttcctgtcagcacttatggagccttgggatggacctgcactaatatcttttactgatggccgttaccttggagctaccctggaccgtaacggtttgaggcctggtcggttttatgtgacgcacagtgggcgtgtgatcatgggtagtgaggtcggtgttgttgatgttcctcctgaagatgtgctgagaaaaggcaggctaaaccctggaatgatgctattggttgattttgagaatcacactgtagtggacgatgaagctctgaaaacacaatactctaaagctcacccgtatggggaatggcttaaaagacaaaagatacacctcaaggatattgtagaatcagtgccagaaaccgatagagttgctccaagcatttctagctcacttccacaaaagaatgagaacaaggatgatgttggtatcaatgggattttaaccccactgaaggcctttggctacacggtggaagccctggagatgttgctactgccaatggctaaggatggagtggaagctctcggttccatgggaaatgatacaccgcttgcggtgatgtcaaacagggagaaattgacttttgagtacttcaagcagatgtttgcacaagttacaaaccctccgattgaccctattagagagaagattgttacatctatggagtgtatgattggcccagaaggtgacttgttggaaacaactgaaaaacaatgcaaccgccttgcacttaaaggtcccttggtatctattgatgaaatggaggctattaaaaagatggattatcgaggttggcgaagcaaagtgctcgacataacttatccaaaaaagtctggaaggaagggcttggaagaagctttggacagaatttgtgccgaggctcgtgaagccataagcaagggttacactattttggttctctcagatagaggattttcctcggaccgtgttgctaccagttctctcttagcagtgggagcagtgcatcagcaccttgttgcaaatcatgagaggacacgcataggattgttggttgagtcagctgaacctcgtgaagtgcaccatttctgcaccctggttggatttggtgctgatgctatctgcccttatttggctattgaagcaatttggtgcttgcagaatgatggaaagattcctcctaatggtgatggacaactctactcaaaggaagagctggtgaggaagtatttctatgcttctaactatggaatgatgaaagttcttgcgaagatgggaatatccacccttgcatcctacaaaggtgcgcagatttttgaagctcttggtctttcttctgaagtgattggcaagtgttttgaaggcacacctagcagaattgagggtgcaacatttgaaatgcttgcacgggatgctctccgtcttcatgagttagctttcccatcaagaacccctccagctggcagtgcagatgcaaaggcccttcccaacccaggggattaccactggaggaaaaatggtgaaattcatctcaacgacccacttgcaatgggaaaattacaagaagcagctagagtcaacagccgggcagcatacaaagaatattcgaaacgaattcaggagctcaacaaagcgtgcaatctacgtggtatgctgaaatttaaagatatttctgacaagatatctttggatgaggttgaacctgcaagtgagatagtgaaacgcttttgtactggagcgatgagttatggttctatttcattggaagcgcatactgcccttgctattgccatgaacaaacttggaggaaaatctaatacgggtgagggaggggaacagccctctcggatggaaccacttcctgatggctcaatgaacccaagacgaagtgcgatcaagcaagttgctagtggacgttttggagtttccagctattacctgactaatgcagatgagctgcagataaaaatggctcagggtgccaaacctggtgaaggtggtgagcttccaggccacaaggttattggtgacattgctgtcacaagacattccacagctggtgtaggactgattagtccacctccgcatcatgatatctattcgattgaggatcttgcacagcttatacatgatcttaagaattcaaatcctggagcccgtatcagtgtgaaactagtttctgaggctggtgtgggggttgttgctagtggtgttgtaaaaggacacgcagatcatgttcttatttctggccatgatggaggcacaggagcttcaagatggactggtatcaagaatgcgggacttccatgggaactcgggttggctgagacacatcaaactctagtagcaaatgggcttcgtggtcgagcagttctgcaaacagatggacagttgaagactggtagagatgttgctgttgcttgcttgcttggtgcagaggaatttggtttcagcactgcaccactgatcacacttggctgtattatgatgcgaaaatgtcacatgaacacttgtcctgttggtatagctactcaagacccagtgcttcgagaaaagtttgctggagaaccagagcatgtcattaactttttcttcatgcttgctgaggagctaagagaaatcatggcaaaccttgggttccgcaccattactgaaatggttggacgttctgatatgcttgaggttgatccagaagtagtgaagagcaatgagaaacttgagaacattgatctctcactaatcttgaaaccagcttcagagattcgtccaggtgttgctcagtactgtgttgagaagcaagaccacggcctagatatggcgttagataacaaactaatagatttgtcaagaactgctattgaaaagcaagtccgtgttttcattgagactccaatccagaacacgaaccgagcagttggaactatgctcagtcatgaagtcacaaaacgttatcacatgagtggattgcctgctggtacaattcatgtgaagtttactggaagtgctggtcaaagttttggtgcttttctttgtcctggaatcactcttgaactggaaggagacagcaatgattatgtcggtaagggcttatctggtggaaaaattgttgtgtacccaccaaggaacagttcttttgttccagaggataatattgtcattggtaatgtggctctatatggtgctaccaagggagaggcatatttcaatggtatggcagcagaaaggttttgtgttcgcaactcaggtgctcaagcagtggttgaaggaattggagatcatggatgtgagtacatgactggaggtgctgtggttatcctcggaaaaacagggcggaactttgctgctggcatgagtggaggcattgcctatgtttatgatgttgatgggaaattcagtgctcgctgcaacaatgagttagttgacctatatcatgtggaggaagaggatgacatcatcacattgaaaatgatgattgagcaacatcgtcgcaacactgagagtgttttggctagagacatactctccgattttgataatcttcttccaaaatttgtaaaagtatatccaagggattataagagggttttagaaaacatgaaggcggaaaaggctgttgctaagcatgcaaaggagcctaaggtggcaaatggaatttctgtgacaactaagaaagtacaacctgatcagtcagcaagccgaccaacacgtgttgccaatgccaaaaagtatcgaggttttattacatatgagcgagagagtatttcttacagagatccaaaagagcgtgttaaagattggaaggaagttgcaattgaatcaacacctggcccactattaaatacacaatctgctcgttgcatggactgtggcactcctttctgtcatcaggaaagctcaggtgctggttgccctcttggaaataaaatcccagaattcaatgaattagttcaccagaacagatggcgcgaagcattggatcgattacttgagacaaacaacttccctgaatttactggacgagtttgccctgctccttgtgaggggtcatgtgttcttgggatcattgagaatccggtgtctatcaaaagtatagaatgtgcaatcatagacaaaggtttcgaagagggatggatggttccacgacctccacttcaaagaacaggaaggaaggtggccattgttggcagtggaccagctggtttggctgctgcagatcaactaaataaaatgggccatttcgtaactgtgtttgaacgtgcagaccgaattggaggtttaatgatgtatggtgtgcctaacatgaagacagacaagattggcattgtccagcgccgtgttaatttaatggctgaagagggtgtcacatttgtggtgaatgccagtgttggtagtgatcctttgtactcaattgaacgtctacgttctgagaatgatgcagttattttggcttgtggagcaacaaaaccaagagacctcactatccctggacgtgagctatctggagttcattttgcaatggaatttctccatgcaaataccaaaagtttactcgacagcaacctggaggatggtaaatatatatccgcccgtggaaaaaaggtggtggttatcggtggaggtgatacaggcacagattgcattggcacatctattaggcatggttgcaccaaccttgtaaatcttgaactcctgtcaaaaccaccaagcaatagagctgctgacaacccatggccgcagtggccaagaattttccgtgttgactatggtcatcaagaagctgctaccaagtttgggaaggatccaagaacttatgaagtcttgacaaagcgttttattggcgatgaaaatggcaaggtgaaggcccttgaggtagtgcgtgtgaagtgggagaaggtagatggaagatttcaactcaaggagatcgaaggatcagaagagattattgaggctgatctcgtcctcctggctatgggattcttgggtcctgaagcgactatcgctgagaaactgggtttggagaaggacaacagatcaaacttcaaagcgcagtttggagactttgcgaccagtgttgatggtgtgtttgcagccggggactgtagacgtggacaatcactggtggtttgggccatcacggaggggcggcaggctgctgcagcggtagacaagtacttatcaaggtatgatcagaatgctgcaggcgacatcactccctccggggcagggctcgttcagcctgttgcggcataa

SEQ ID NO: 424 - protein, 2163 aa, Sorghum bicolor
MSTAQGTALKSAPMGPGRRARRGRPVAAPYRSGWQAYGGVSLEGGGFLGGVQRTEERVAPRAPRAAARDAEVVRPLSKLPNSSIGLYNPSFERDACGVGFVAELSGDYKRETVNDAIEMLERMAHRGACGCEKNTGDGAGIMVALPHDFFKEVTKDAGFELPPPGEYAVGMFFMPTDEKRREKGKAEFKKVAESLGHVILGWRPVPTDNSDLGESALETEPVIEQVFITKSSRSEAEFEQQLYILRRLSIISVRAALNIKRGGERDFYMCSLSSRTIVYKGQLKPCQLKGYYYADLGHENFTSYMALVHSRFSTNTFPSWDRAQPMRVLGHNGEINTLRGNKNWITAREGLLEAEKLGLSKEQLSRILPIVDATSSDSGAFDNVLELLVRGGRSLPEAVMMMIPEAWQNDGNMDPEKKALYEFLSALMEPWDGPALISFTDGRYLGATLDRNGLRPGRFYVTHSGRVIMGSEVGVVDVPPEDVLRKGRLNPGMMLLVDFENHTVVDDEALKTQYSKAHPYGEWLKRQKIHLKDIVESVPETDRVAPSISSSLPQKNENKDDVGINGILTPLKAFGYTVEALEMLLLPMAKDGVEALGSMGNDTPLAVMSNREKLTFEYFKQMFAQVTNPPIDPIREKIVTSMECMIGPEGDLLETTEKQCNRLALKGPLVSIDEMEAIKKMDYRGWRSKVLDITYPKKSGRKGLEEALDRICAEAREAISKGYTILVLSDRGFSSDRVATSSLLAVGAVHQHLVANHERTRIGLLVESAEPREVHHFCTLVGFGADAICPYLAIEAIWCLQNDGKIPPNGDGQLYSKEELVRKYFYASNYGMMKVLAKMGISTLASYKGAQIFEALGLSSEVIGKCFEGTPSRIEGATFEMLARDALRLHELAFPSRTPPAGSADAKALPNPGDYHWRKNGEIHLNDPLAMGKLQEAARVNSRAAYKEYSKRIQELNKACNLRGMLKFKDISDKISLDEVEPASEIVKRFCTGAMSYGSISLEAHTALAIAMNKLGGKSNTGEGGEQPSRMEPLPDGSMNPRRSAIKQVASGRFGVSSYYLTNADELQIKMAQGAKPGEGGELPGHKVIGDIAVTRHSTAGVGLISPPPHHDIYSIEDLAQLIHDLKNSNPGARISVKLVSEAGVGVVASGVVKGHADHVLISGHDGGTGASRWTGIKNAGLPWELGLAETHQTLVANGLRGRAVLQTDGQLKTGRDVAVACLLGAEEFGFSTAPLITLGCIMMRKCHMNTCPVGIATQDPVLREKFAGEPEHVINFFFMLAEELREIMANLGFRTITEMVGRSDMLEVDPEVVKSNEKLENIDLSLILKPASEIRPGVAQYCVEKQDHGLDMALDNKLIDLSRTAIEKQVRVFIETPIQNTNRAVGTMLSHEVTKRYHMSGLPAGTIHVKFTGSAGQSFGAFLCPGITLELEGDSNDYVGKGLSGGKIVVYPPRNSSFVPEDNIVIGNVALYGATKGEAYFNGMAAERFCVRNSGAQAVVEGIGDHGCEYMTGGAVVILGKTGRNFAAGMSGGIAYVYDVDGKFSARCNNELVDLYHVEEEDDIITLKMMIEQHRRNTESVLARDILSDFDNLLPKFVKVYPRDYKRVLENMKAEKAVAKHAKEPKVANGISVTTKKVQPDQSASRPTRVANAKKYRGFITYERESISYRDPKERVKDWKEVAIESTPGPLLNTQSARCMDCGTPFCHQESSGAGCPLGNKIPEFNELVHQNRWREALDRLLETNNFPEFTGRVCPAPCEGSCVLGIIENPVSIKSIECAIIDKGFEEGWMVPRPPLQRTGRKVAIVGSGPAGLAAADQLNKMGHFVTVFERADRIGGLMMYGVPNMKTDKIGIVQRRVNLMAEEGVTFVVNASVGSDPLYSIERLRSENDAVILACGATKPRDLTIPGRELSGVHFAMEFLHANTKSLLDSNLEDGKYISARGKKVVVIGGGDTGTDCIGTSIRHGCTNLVNLELLSKPPSNRAADNPWPQWPRIFRVDYGHQEAATKFGKDPRTYEVLTKRFIGDENGKVKALEVVRVKWEKVDGRFQLKEIEGSEEIIEADLVLLAMGFLGPEATIAEKLGLEKDNRSNFKAQFGDFATSVDGVFAAGDCRRGQSLVVWAITEGRQAAAAVDKYLSRYDQNAAGDITPSGAGLVQPVAA

SEQ ID NO: 425 - DNA, 1620 bp, Sorghum bicolor
atggagtccggcggcggtgagattctgcccggacctgggttgctcgtcacctccaaacccggcggtggccgtggcggttggcgtgccgccctcttcatcctcggtaatcatgctgattgcaagtcttcaaaaatgcctagtccgaccgcagcgatgggattctttgagcgtattgggttcgtcggcgtgtcggccaacttgatcatgtacctcaccgggccgcttggcatgtccacggctgccgcggccgcgggcgtgaacgcgtggttcggaaccgtacaggtgctgccgatcgtcggcgcgctcgtcgctgattcacggcttggccgatatcgagcgatcctggccgcctgtgtactctatcttctgggcttcggaatgctaacggcctcatccatgctgccaaccgcgaactcgccgccgtcggcgtctcctacccggctcatcatcttctacgtcgggctctacctgctggctctggcgcaaggcttcttcgggccatgcggggaagccttcggcgccgaccagttcacgcctagcgacagcgacaaccccaccgcgcccgcgttccggagctcctacttcaactggttccacttctccatgtcctggggctacgccatcgccaccgccggcctgagctacgtcgaggacaacgccggctggaccatcggtttcggcgcgtgctggaccgcgatggtgctatgccttaccgtcttcttacttggcacgccgacgtaccatgccaaccaacccgtcgacggaggcacgatcactgctgagacagtgcagaagtgggccgcgaggttcttccgtcgaaaggacactactccaactgatgaaaggctgcttctagctccacaacgacctgaggaggagcgcggactcatagctaagctgctcccgatatggctgacgagcttagtcttcgcggtcatctactcgcaaacgtacactctgttcaccaagcaggccagcacattggacagccaccttggcacggcgacgggcctcgtcgtgccgcccgctgcgctccagtgcttcatcgacgtcaccttcatcgttatgatccccttatacgaccgcgtcatcgtgcccttcgcgaggcgcctgaccgggcacgccgcgggcatcacgatgctccagcgcatcggcgcaagcatggccacgtcctgcgtcgccatggccgtcgcggcgctcgtcgaagtcaggcggctccgcgtggccagagacgcgggcctggtcgaccagccggaggtagctctgccgatgagcctgtggtggatgattccgcagtacgttctgatgggcctcgccgcagtgctgggtatggttggtctggaggagttcttctacgaccaggtgcccggcactctccgcagcgtcgggctcgcgctgtgcctgagcatctttggcgtgggaagctacgccagcagcttgcttgtgtccctgatcgactgggcgacgagaagcaaaggcgagagctggttctccgacaatctcaaccgagggcacctcgactacttctacgggctcctggcagggctcgcggctgtagaggtagccgtgttcatgtattttgcaaatcgatacgtctacacaaacaaagccgagctgtga

SEQ ID NO: 426 - protein, 539 aa, Sorghum bicolor
MESGGGEILPGPGLLVTSKPGGGRGGWRAALFILGNHADCKSSKMPSPTAAMGFFERIGFVGVSANLIMYLTGPLGMSTAAAAAGVNAWFGTVQVLPIVGALVADSRLGRYRAILAACVLYLLGFGMLTASSMLPTANSPPSASPTRLIIFYVGLYLLALAQGFFGPCGEAFGADQFTPSDSDNPTAPAFRSSYFNWFHFSMSWGYAIATAGLSYVEDNAGWTIGFGACWTAMVLCLTVFLLGTPTYHANQPVDGGTITAETVQKWAARFFRRKDTTPTDERLLLAPQRPEEERGLIAKLLPIWLTSLVFAVIYSQTYTLFTKQASTLDSHLGTATGLVVPPAALQCFIDVTFIVMIPLYDRVIVPFARRLTGHAAGITMLQRIGASMATSCVAMAVAALVEVRRLRVARDAGLVDQPEVALPMSLWWMIPQYVLMGLAAVLGMVGLEEFFYDQVPGTLRSVGLALCLSIFGVGSYASSLLVSLIDWATRSKGESWFSDNLNRGHLDYFYGLLAGLAAVEVAVFMYFANRYVYTNKAEL

SEQ ID NO: 427 - DNA, 1839 bp, Sorghum bicolor
atggagttcatggcaagtaagtcatacatacccaaaagggcagattttgcagagctggtgctgcaaggtccagagcctccaagcctgtggtatgttctcattggcatgttaagaaaaacagttcattaccaaagcgcagataagcatttcgcactctctgtgtgtgcaatgtcaattctgcatggcctgtttccaatacttgaatggtggaaaagctacagcctgaagtccttccgtagtgacctcatggctggtctcactctcgcgagccttagcattccacagagcattggatatgcaaatcttgctaaactggatcctcagtatggtctttatacaagtgttgtgccacctcttgtctatgctgtaatggggacctctagggagatagccattggaccggttgccattgtgtcactcttgctttcatcaatggctcaaaagatagctgacccagtcatcgatccagctttctatcgaaaaacggttttcactgtgacatgctttactggtatcttccagtttgcatttggtcttttcaggttgggattccttgttgattttctctcgcatgccgcaatcactggatttatgggaggagctgccattgttattggactgcagcagttgaagggcctactggggcttagtcatttcacaagtagcactgacgttgtatctgtcatcagagcagtctgggtttctgttcatgaaccatggcatcccgagaacttctacattggatgttctttcttcttgttcattctcggcatgaggttcataggtagaaagaataagaagcttttctgggtttcagcgattgcacctgtgctctcagttgcattgtctactctcatggtctatatgacaagagctgataagcatggtgtaaagatcatacaaaaagtggatgccggcatcaatgcgagctcaatcaagcagataaatttcaatggatcctatgtttctgaatgtgcaaagatagctcttatttgtgctgttattgctctaacggaagctatcgctgttggccgctctttttcagtcataaatggttataaattggatggaaataaggaaatgcttgcaatgggcttcatgaatgtagcaggatccatgtcgtcttgctatgtggcaactgggtctttctcccgcacagctgtgaacttcaccgctggctgtaagacaacaatgtcaaatgttgtcatggctgtcactgttatggttgccttggagctgctcaccaagctcctgtactatacgccagtgtctatacttgcatcaatcattctatcagccctcccagggctaatcaatttccaggaagtctgcatcctttggaaagtcgacaaattagatttcctcacatgcatgggatccttccttggtgttatattcggatcagtggagattgggctttcagttgcaattgttatctcctttgcgaagattgttgtgcactcagtctggcctcaagtcgagatccttggtagacttcaggggacgaacatattctgcaacatggaacagtatccaatggtttgtcaaacacctgctgttctggccatacggatcagcacctcgttcctttgcttcatcaacggcaattccatcagagagaagattactgggtgggtaatcgataagcgtgacgcaatctgcttggtcgtccttgacatgtcaaatgttgtgaacatcgacacagcaggacttgcggcgctggaagaactgcgccaggagctggtgtcttgtggcatacaggtgcatgccctgacactcgcacacttaagtttgcacaagagagggaatacaaccattcgaagtttcttggtaaaataa

SEQ ID NO: 428 - protein, 612 aa, Sorghum bicolor
MEFMASKSYIPKRADFAELVLQGPEPPSLWYVLIGMLRKTVHYQSADKHFALSVCAMSILHGLFPILEWWKSYSLKSFRSDLMAGLTLASLSIPQSIGYANLAKLDPQYGLYTSVVPPLVYAVMGTSREIAIGPVAIVSLLLSSMAQKIADPVIDPAFYRKTVFTVTCFTGIFQFAFGLFRLGFLVDFLSHAAITGFMGGAAIVIGLQQLKGLLGLSHFTSSTDVVSVIRAVWVSVHEPWHPENFYIGCSFFLFILGMRFIGRKNKKLFWVSAIAPVLSVALSTLMVYMTRADKHGVKIIQKVDAGINASSIKQINFNGSYVSECAKIALICAVIALTEAIAVGRSFSVINGYKLDGNKEMLAMGFMNVAGSMSSCYVATGSFSRTAVNFTAGCKTTMSNVVMAVTVMVALELLTKLLYYTPVSILASIILSALPGLINFQEVCILWKVDKLDFLTCMGSFLGVIFGSVEIGLSVAIVISFAKIVVHSVWPQVEILGRLQGTNIFCNMEQYPMVCQTPAVLAIRISTSFLCFINGNSIREKITGWVIDKRDAICLVVLDMSNVVNIDTAGLAALEELRQELVSCGIQVHALTLAHLSLHKRGNTTIRSFLVK

SEQ ID NO: 429 - DNA, 840 bp, Sorghum bicolor
atgtcggggctctacggccaggggttctcccctgcgcgaaacctctcccctcagattagaagcaatccggatgttgatagtcagtacttggccgagctgctggccgaacaccagaagctggggcctttcatgcaggtgctgcccatatgcaacaagctgctgagccaagagattatgcgggtatcaagcattgtccacaaccatggatttggcgatttcgacaggcatcggtttagaagtcctagtccgatgtcttctccaaaccctagagctaatctccctggcaatgggtttagtccttggagtggactacaagagagattaggttttcctcaaggaactagcatggactggcaaggagcaccaccaagtcctagctcccatgttgtaaagaagattcttcgtctggaggttccagttgattcttatccgaatttcaattttgtgggacgcattttaggacctagaggtaattctctaaagcgcgtagaagcatccactgggtgtcgtgttttcattagaggaaagggttccatcaaagatccagggaaggaggacaaactacgagggaaaccaggctatgagcacctgagtgatccgctgcatatcttgatagaggctgagttccctgccagtatcatcgatgcaagattgagacatgcacaggagattatagaagaattgcttaaaccagtggatgagtctcaagatttctacaaaaggcaacagctcagggagctggcaatgctaaactcaaccctgagagaggacagccctcatcctgggagtgtctctccattcagtaatggtgggatgaaacgtgcgaagacaggccagtag

SEQ ID NO: 430 - protein, 279 aa, Sorghum bicolor
MSGLYGQGFSPARNLSPQIRSNPDVDSQYLAELLAEHQKLGPFMQVLPICNKLLSQEIMRVSSIVHNHGFGDFDRHRFRSPSPMSSPNPRANLPGNGFSPWSGLQERLGFPQGTSMDWQGAPPSPSSHVVKKILRLEVPVDSYPNFNFVGRILGPRGNSLKRVEASTGCRVFIRGKGSIKDPGKEDKLRGKPGYEHLSDPLHILIEAEFPASIIDARLRHAQEIIEELLKPVDESQDFYKRQQLRELAMLNSTLREDSPHPGSVSPFSNGGMKRAKTGQ

SEQ ID NO: 431 - DNA, 1698 bp, Sorghum bicolor
atggaggacaacggtgccgctgccgccaacgctgctccagcgacgagcatgctgccagctgccgagaagcacgtggcgatccctgatgacgccgcggcggcggcggcagctacgaacgctaccgccggcgaggagaacaaggtggaggaggaggacgcgccggagcccgcattattggcctgcgggccgaggaagacggggctccatcttttcgtcatgaacatcaggagcgtcttcaagctcgacgacctcggatcggaggtgctccgcattgcagtgcccgcctcgctcgctttggcggccgatccgctcgcctccttggtggacacggcgttcatcggccgtttaggttcggtggagattgccgctgttggtgtttcaatcgccatatttaaccaggtctcgaaagtctgtatctaccctcttgttagcgttacaacatcatttgtcgcggaggaagacgctatcatcagtaaagctatcgaagaaaagagcagtcaagacctggagaaagcttcccatgtggattcagaaaccaacaatttgcctgcatctggtcctgatttggcagaatgcgtgaactcatgcatccccacagagtgtacagatctccccaaccaagggtgcaagaagaggtacataccatcggtcacgtcagcactaatagttggttcaattctcggactgcttcaggctgtcttcctggttttttcagcgaaatttgtactaaacatcatgggtgttaaatctggatccccaatgcaaaaacctgcagttcgctacctaacaataagatctcttggtgcccctgctgtgctattgtctctggccatgcaaggggttttccggggattcaaggacacgaagacaccattatatgctactgtggtcggggacgcggcgaacatcatactagacccaattttgatgtttgtttgccatatgggcgtcactggtgcagctattgctcatgttgtttctcagtacctgataacattgatattgttgtgccggctcgtccagcaagttgatgttatcccacctagcattaaatctctgaaatttgggcgatttcttggatgtggattcctactgcttgcaagggttgttgcggtgacgttctgcgtcacgttggcggcgtccctggctgctcgccatggaccaaccatcatggcaggcttccaaatctgctgtcagctctggctggccacatctctccttgccgatggattggccgtggcaggacaggcagtgcttgcaagtgcgtttgccaagaatgacaagaagaaggttgttgccgcgacgtcccgtgtgttgcagctgagcattgtcctgggcatgggtctcactgtcgtgctgggacttgctatgaggttcggggctggcattttcacaagcgacctgcccgtgatcgaagtcattcacaaaggcatcccgtttgttgccggcacacagaccatcaattccctggccttcgtgtttgatggcatcaactttggagcatcagactacacatactctgcttactccatggttgctgttgcgtccgtgtcgataccatgcttggtgtacctttctgtgcataacggattcatcggtatatggatcgcattgacgatctacatgagcctgaggaccatagctagcacctggaggatgggggcagccaggggaccatggaagtttctccggaagtga

SEQ ID NO: 432 - protein, 565 aa, Sorghum bicolor
MEDNGAAAANAAPATSMLPAAEKHVAIPDDAAAAAAATNATAGEENKVEEEDAPEPALLACGPRKTGLHLFVMNIRSVFKLDDLGSEVLRIAVPASLALAADPLASLVDTAFIGRLGSVEIAAVGVSIAIFNQVSKVCIYPLVSVTTSFVAEEDAIISKAIEEKSSQDLEKASHVDSETNNLPASGPDLAECVNSCIPTECTDLPNQGCKKRYIPSVTSALIVGSILGLLQAVFLVFSAKFVLNIMGVKSGSPMQKPAVRYLTIRSLGAPAVLLSLAMQGVFRGFKDTKTPLYATVVGDAANIILDPILMFVCHMGVTGAAIAHVVSQYLITLILLCRLVQQVDVIPPSIKSLKFGRFLGCGFLLLARVVAVTFCVTLAASLAARHGPTIMAGFQICCQLWLATSLLADGLAVAGQAVLASAFAKNDKKKVVAATSRVLQLSIVLGMGLTVVLGLAMRFGAGIFTSDLPVIEVIHKGIPFVAGTQTINSLAFVFDGINFGASDYTYSAYSMVAVASVSIPCLVYLSVHNGFIGIWIALTIYMSLRTIASTWRMGAARGPWKFLRK

SEQ ID NO: 433 - DNA, 1191 bp, Sorghum bicolor; identical to SEQ ID NO: 411

SEQ ID NO: 434 - protein, 396 aa, Sorghum bicolor; identical to SEQ ID NO: 412

SEQ ID NO: 435 - DNA, 960 bp, Sorghum bicolor
atgggattgccggtgatgaggagggagagggacgcggaggcggagctgaacctgccgccggggttccggttccaccccacagacgacgagctggtggagcactacctgtgccggaaagcggcggggcagcgcctcccggtgcccatcatcgcggaggtggacctatacaagttcgacccctgggacctgccggagcgcgcgctgttcggggtcagggagtggtacttcttcacgcccagggaccgcaagtacccaaacgggtcccgccccaaccgcgccgccggcaacgggtactggaaggccaccggcgccgacaagcccgtcgcgccgcggggccgcacgctcgggatcaagaaggcgctcgtcttctacgccgggaaggcgccgcgtggggtcaagacggactggatcatgcacgagtacaggctcgcggacgccggccgcgcagccgcctccaagaagggatcgctcaggctggatgactgggtgctgtgccgcctgtacaataagaagaacgagtgggagaagatgcagctggggaaggagtccgccgccggcgtcggcaccgccaaggaggaggcgatggacatgaccacctcgcactcgcactcccactcgcagtcgcactcgcactcgtggggcgagacgcgcacgccggagtcggagatcgtggacaacgacccgttcccggagctggactcgttcccggcgttccaggacccggcggcggcgatgatgatggtgcccaagaaggagcaggtggacgacggcagcgccgccgccaacgccgccaagagcagcgacctgttcgtggaccttagctacgacgacatccagggcatgtacagcggcctcgacatgctgcccccgccaggggaggacttcttctcctcgctcttcgcgtcgcccagggtcaaggggaaccagcccgccggagccgccgggttggggccattctga

SEQ ID NO: 436 - protein, 319 aa, Sorghum bicolor
MGLPVMRRERDAEAELNLPPGFRFHPTDDELVEHYLCRKAAGQRLPVPIIAEVDLYKFDPWDLPERALFGVREWYFFTPRDRKYPNGSRPNRAAGNGYWKATGADKPVAPRGRTLGIKKALVFYAGKAPRGVKTDWIMHEYRLADAGRAAASKKGSLRLDDWVLCRLYNKKNEWEKMQLGKESAAGVGTAKEEAMDMTTSHSHSHSQSHSHSWGETRTPESEIVDNDPFPELDSFPAFQDPAAAMMMVPKKEQVDDGSAAANAAKSSDLFVDLSYDDIQGMYSGLDMLPPPGEDFFSSLFASPRVKGNQPAGAAGLGPF

SEQ ID NO: 437 - DNA, 1776 bp, Sorghum bicolor
atgtgcggcatcctcgccgtcctcggcgtcgccgaggtctccctcgccaagcgctcccgcatcattgagctctcgcgcaggttacggcaccgagggcctgattggagcggtttgcactgtcatcaggattgctaccttgcacaccagcggttggctattattgatcctacatctggagaccagccattgtacaatgaggacaaaacagttgttgtaacggtgaatggagaaatatataaccatgaagaactgaaagctaagttgaaaactcatgaatttcaaactggcagtgactgtgaagttatagctcatctttacgaagaatatggggaagaatttgtggatatgttggatggaatgttctccttcgttcttcttgatacacgtgataaaagcttcatggcagctcgtgatgctattggcatctgccctttatacatgggatggggtcttgatggatcagtctggtttgcttcagagatgaaggcattgagcgatgattgtgaacgcttcataaccttcccccctgggcatctctactccagcaaaacaggtggtctaaggagatggtacaacccaccatggttttcagagacgatcccttcaaccccttacaatgctctcttcctccgggagatgtttgagaaggctgttattaagaggctgatgactgatgtgccatttggtgtgcttttatctggtggacttgactcttctttggttgcatctgttgcttcacggcacttaaacgaaacaaaggttgccaggcagtggggaaataaattgcatacattctgtataggcttgaagggttctcctgatcttaaagctgctaaggaagttgctgattacctcggcactgtacatcatgagttccacttcacagtgcaggaggggatagatgccttggaggaagtcatctatcatgttgagacatatgatgttacaacaatcagagcgagtaccccaatgtttttgatgtcacgcaaaatcaaatctttgggggtgaagatggttatttctggagaaggttcagatgaaatttttggcggttacctttattttcacaaggcaccaaacaagaaagaattccatgaggaaacatgtcggaagataaaagcactacatctgtatgattgcttgagagctaacaaatcaacttctgcctggggtgttgaggctcgtgttccattccttgacaaaagtttcatcaatgtagcaatggacattgatccggaatggaagatgataaaacgtgatctcggtcgaattgagaaatgggttatccgtaatgcatttgatgacgaggagcggccctatttacctaagcacattctttacaggcaaaaggaacagttcagtgatggtgtcggctatagttggatcgatggattgaaagaccatgccaaccaacatgtcacggattccatgatgatgaatgctagctttgtttacccagagaacacacccacaacaaaagaagggtattactacagaacaatattcgagaaattcttccccaagcctgcagcaaggtctactgttcctggaggtcctagcgtggcatgcagcaccgccaaagctgttgaatgggacgcatcctggtccaagaaccttgatccatctggtcgtgctgctctgggtgttcacgatgctgcgtatgaagatactccaggggaagctcctgcctctgctgatccggtctcagacaagggccttcgtccagctattggcgaaagtttagtgacaccagttgcttcagccacagctgtctaa

SEQ ID NO: 438 - protein, 591 aa, Sorghum bicolor
MCGILAVLGVAEVSLAKRSRIIELSRRLRHRGPDWSGLHCHQDCYLAHQRLAIIDPTSGDQPLYNEDKTVVVTVNGEIYNHEELKAKLKTHEFQTGSDCEVIAHLYEEYGEEFVDMLDGMFSFVLLDTRDKSFMAARDAIGICPLYMGWGLDGSVWFASEMKALSDDCERFITFPPGHLYSSKTGGLRRWYNPPWFSETIPSTPYNALFLREMFEKAVIKRLMTDVPFGVLLSGGLDSSLVASVASRHLNETKVARQWGNKLHTFCIGLKGSPDLKAAKEVADYLGTVHHEFHFTVQEGIDALEEVIYHVETYDVTTIRASTPMFLMSRKIKSLGVKMVISGEGSDEIFGGYLYFHKAPNKKEFHEETCRKIKALHLYDCLRANKSTSAWGVEARVPFLDKSFINVAMDIDPEWKMIKRDLGRIEKWVIRNAFDDEERPYLPKHILYRQKEQFSDGVGYSWIDGLKDHANQHVTDSMMMNASFVYPENTPTTKEGYYYRTIFEKFFPKPAARSTVPGGPSVACSTAKAVEWDASWSKNLDPSGRAALGVHDAAYEDTPGEAPASADPVSDKGLRPAIGESLVTPVASATAV

SEQ ID NO: 439 - DNA, 888 bp, Sorghum bicolor
atgacctacatgttcaagtatgacacggtgcacggccactggaagcacagtgacatcaccctcaaggactccaagacccttctcttcggtcagaagccggtcaccgtctttggcatcaggaaccctgaggagatcccgtggggcgaggctggtgctgactatgtcgtggagtccactggtgtcttcactgacaaggataaggctgcggctcacttgaagggtggtgccaagaaagttgttatctctgccccaagcaaagatgcgcccatgttcgttgttggtgtcaacgaggacaagtacacctcagatattaacattgtttccaatgctagctgcacaacaaactgcctggctccccttgccaaggtcatccatgacaactttggtatcatcgagggtctgatgacaactgttcatgccatcactgccacccagaagactgttgatggaccctcagccaaggactggagaggtggcagggctgctagctttaacatcatccccagcagcactggagctgccaaggctgttggtaaggttcttcctgatttgaatggcaagctcactggtatgtccttccgggttcccaccgtggatgtgtcagttgttgaccttactgtcagaatcgagaagggtgcctcctatgaggatatcaagaaagctattaaggctgcttctgagggcccactcaagggtatcatgggctacgtggaggaggatttggtttccacagacttcgttggtgacagcaggtcgagcatctttgatgccaaggctggtattgccctgaacgacaacttcatcaagcttgtctcgtggtacgacaacgagtggggctacagcaaccgtgttgtcgacctgatccgccacatgttcaagacccagtag

SEQ ID NO: 440 - protein, 337 aa, Sorghum bicolor
MGKIKIGINGFGRIGRLVARVALQSEDVELVAVNDPFITTDYMTYMFKYDTVHGHWKHSDITLKDSKTLLFGQKPVTVFGIRNPEEIPWGEAGADYVVESTGVFTDKDKAAAHLKGGAKKVVISAPSKDAPMFVVGVNEDKYTSDINIVSNASCTTNCLAPLAKVIHDNFGIIEGLMTTVHAITATQKTVDGPSAKDWRGGRAASFNIIPSSTGAAKAVGKVLPDLNGKLTGMSFRVPTVDVSVVDLTVRIEKGASYEDIKKAIKAASEGPLKGIMGYVEEDLVSTDFVGDSRSSIFDAKAGIALNDNFIKLVSWYDNEWGYSNRVVDLIRHMFKTQ

SEQ ID NO: 441 - DNA, 1473 bp, Sorghum bicolor
atgagcaccgcctccggcgacggcgcggacgccggcggcgacggggcctcctctgcagcggccggcgcgtcggcgcccgcggggaggcggatcccgcccgcctcgtccatgccgtgggtccgcaacctccgccgcttcgtcggcacgggcgccggcctcggatccgaggccctcatggaactggagactaaaaggatattgcttgagattttcaaggagcggcagcggaagagtgccgaagctggttccatcccaagtttttacaagaagaaacctgaagaaggatccattagctctagagttcagaggttggccaagtacaggtttctaaagaaacaatcagagcttctgctgaatgctgatgatcttgatgccatgtgggtttgtcttagagaaaattgtgttattgatgatgctactggtgctgaaaagatgaattatgaagatttctgccatattgccacagtctgcacggagcagattggtcagaaatgcaaacgtttcttcagcccttcaaactttatgaagtttgagaaggatgattctgggaggattgctatcctaccattttatctttatgtcatgcgaacagtttctcttactcaagcaagaattgatatgagtgagcttgatgaggattctgatggtttccttcagcctcatgaaatggaagcatatattagaggactcatccccaatttggcacaattgcgtgacatgcccactgcatttgtccagatgtactgccgtatagctgcacgcaagttctttttcttctgtgatccacacagacgggggaaagcatgtataaagaaagtgttgctgagcaattgtcttcaagagctaatggaactacatcaggagagcgaggaagaggtaaccgataccgagcaggcagaaaattggttttccttaacttcagctcagcgcatatgtgacatgtttcttgcactagataaggatactaatggtacactgagcaaacaagagctcaaggaatatgcagatggcacattgactgagattttcattgaaagagtttttgatgagcatgtccgccggagcaaagttggaggtggaaacagtcgtgagatggactttgaaagctttcttgattttgttttggctctagaaaacaaagatacccctgaaggcctgacatatttatttagatgccttgatcttaatggaagagggttccttacaactgcagatatccatactttatttagagacgtacaccagaaatggattgagggcgggaactatgagctttgcatcgaagatgtgagggatgaaatctgggacatggtgaagcccgcagatcctctcaggatctcgctgccagatcttctttcttgcaagcaaggcgggactatcgccagcatgcttatagatgtgcgtggcttctgggcccacgacaacagggagaaccttctccaggaagaggaagagcaagtggaagaggcatga

SEQ ID NO: 442 - protein, 490 aa, Sorghum bicolor
MSTASGDGADAGGDGASSAAAGASAPAGRRIPPASSMPWVRNLRRFVGTGAGLGSEALMELETKRILLEIFKERQRKSAEAGSIPSFYKKKPEEGSISSRVQRLAKYRFLKKQSELLLNADDLDAMWVCLRENCVIDDATGAEKMNYEDFCHIATVCTEQIGQKCKRFFSPSNFMKFEKDDSGRIAILPFYLYVMRTVSLTQARIDMSELDEDSDGFLQPHEMEAYIRGLIPNLAQLRDMPTAFVQMYCRIAARKFFFFCDPHRRGKACIKKVLLSNCLQELMELHQESEEEVTDTEQAENWFSLTSAQRICDMFLALDKDTNGTLSKQELKEYADGTLTEIFIERVFDEHVRRSKVGGGNSREMDFESFLDFVLALENKDTPEGLTYLFRCLDLNGRGFLTTADIHTLFRDVHQKWIEGGNYELCIEDVRDEIWDMVKPADPLRISLPDLLSCKQGGTIASMLIDVRGFWAHDNRENLLQEEEEQVEEA

SEQ ID NO: 443 - DNA, 1074 bp, Sorghum bicolor; identical to SEQ ID NO: 413

SEQ ID NO: 444 - protein, 357 aa, Sorghum bicolor; identical to SEQ ID NO: 414

SEQ ID NO: 445 - DNA, 1533 bp, Sorghum bicolor
atggcttccgccgacctcgcagaggccatcgagcccacgaagaagagcaacgtcaagtatgcctccatctgtgctatcctcgcctccatggcctccgtcatactcggctatgacattggggtgatgagtggagcggcgatgtacatcaagaaggacctgaagatcacggacgtgcagctggagatcatgataggaattctcagtgtctactcgctgatcggatccttcgctggcgcgcggacgtccgacaggatcggtcgccgcttgactgtcgtcttcgctgctgtcatcttcttcgtgggcgcgttgctcatgggtttcgccgtcaactacggcatgctcatggtgggacgcttcgtggccggagttggtgtgggcttcgggggtatgatcgcgcccgtgtacaccgccgagatctcgccggcggcatcccgcggcttcctcacgtccttcccggaagtgttcatcaacatcggtatcctgctcggctacttgtcgaacttcacgttcgctcgcctcccgctccacctcggctggcgtgtcatgctcggcatcggcgcagcgccgtccgccctgctcgcgctcatggtgttctgcatgcccgagtcgcctcggtggcttgtcatgaagggccgcctcgcggacgccagggctgtgctagagaagacctctgcctcgccagaggaggccgcagagcggctggctgacatcaaggtcgccgcggggattccaaaggacctcgacggagacgtggtcaccgtaccaaaggagcggaacggtggcgagatgcaggtgtggaaggcgctcatcttttccccaatcccggcgatccgacgcatactgctatcgggcgtcggcctgcacttcttccagcaggcttctggcagcgattccgtcgtcctgtacagcccgagcgtgttcaagagcgcggggatcaccgacgacaacaagctcctgggcgtcacctgcgcggtgggcgtcagcaagacgcttttcatcctggtggccacgttcctgctggaccgcgtcgggcgtcggcctctgctgctgaccagcgcgggtggaatgatcgtagctctcatcggcctcgggacggggctcaccgtcgtggggcatcacccggacgccaagatcccgtcggccgtagctctgtgcatcgcgtccacgctggcctacgtcgccttcttctcgatagggctcggccccatcacgggcgtgtacaactcggagatattcccactgcaggtgcgcgcgctaggcttcgcggtcggcatggcgtgcaaccgcgttaccagcgccgtgatctccatgaccttcctgtccctctcgaagggtatcaccatcggcggcagcttcttcctctactccggcatcgccgcggtggggtgggttttcttcttcacgtgccttccggagacccgcggtcgtacgctggaggagatgggcaagctgttcggcatgccagacatcgacatggctcaagcagacgacaccgctgccaaggagaaggtggtggaaatgcccaccatgtag

SEQ ID NO: 446 - protein, 510 aa, Sorghum bicolor
MASADLAEAIEPTKKSNVKYASICAILASMASVILGYDIGVMSGAAMYIKKDLKITDVQLEIMIGILSVYSLIGSFAGARTSDRIGRRLTVVFAAVIFFVGALLMGFAVNYGMLMVGRFVAGVGVGFGGMIAPVYTAEISPAASRGFLTSFPEVFINIGILLGYLSNFTFARLPLHLGWRVMLGIGAAPSALLALMVFCMPESPRWLVMKGRLADARAVLEKTSASPEEAAERLADIKVAAGIPKDLDGDVVTVPKERNGGEMQVWKALIFSPIPAIRRILLSGVGLHFFQQASGSDSVVLYSPSVFKSAGITDDNKLLGVTCAVGVSKTLFILVATFLLDRVGRRPLLLTSAGGMIVALIGLGTGLTVVGHHPDAKIPSAVALCIASTLAYVAFFSIGLGPITGVYNSEIFPLQVRALGFAVGMACNRVTSAVISMTFLSLSKGITIGGSFFLYSGIAAVGWVFFFTCLPETRGRTLEEMGKLFGMPDIDMAQADDTAAKEKVVEMPTM

SEQ ID NO: 447 - DNA, 750 bp, Sorghum bicolor; identical to SEQ ID NO: 401

SEQ ID NO: 448 - protein, 249 aa, Sorghum bicolor; identical to SEQ ID NO: 402

SEQ ID NO: 449 - DNA, 915 bp, Sorghum bicolor
atggccgccgctatagatctgtcaggggaggagctgatgagagcactcgagccttttatccgggatgcctcctctgctcctcacggatccagtccgctcctccacccccaccaccagcctctcagtccctcgtcgccgttctccttccagcacgccgccgcctacggcgggtacccgttcgccgccgccgcggccgagggggcgggccagctgagcccagcccagatgcagtacatccaggcccgcctccacctgcagcgccagtcgcagcagtcctccgtgctgggcccgcgggcccagcccatgaaggcgtccgcggcggcggccccgaccccgccgcgtccgcagaagctgtaccgcggcgtgcggcagcggcactggggcaagtgggtcgccgagatccgcctcccgcggaaccgcacccgcctctggctcggcaccttcgacaccgccgaggaagcggcgctcgcctacgaccaggccgcctaccgcctccgcggcgacgcggcgcgcctcaacttccccgacaacgccgcctcccggggcccgctccacgcctccgtcgacgccaagctccagacgctctgccagaacatcgccgcgtccaagaagggcgccaagaagcacgcctccgcctccgccgcagctgctgccgccacgtcgtcgtccgcccccaccagcaactgctcctcgtcgccgtcctccgacgacgcgtcctcgtcctgctgcctcgagtccgccgccgagtcctcgtgcccgtccccgtccccgtccgcctcccccgagtcgtcgacggtgccggagatgcagcagctggacttcagcgaggcgccgtgggacgaggccgccggcttcgcgctcaccaagtacccgtcgtacgagatcgactgggactccctcctcgccgccaattaa

SEQ ID NO: 450 - protein, 304 aa, Sorghum bicolor
MAAAIDLSGEELMRALEPFIRDASSAPHGSSPLLHPHHQPLSPSSPFSFQHAAAYGGYPFAAAAAEGAGQLSPAQMQYIQARLHLQRQSQQSSVLGPRAQPMKASAAAAPTPPRPQKLYRGVRQRHWGKWVAEIRLPRNRTRLWLGTFDTAEEAALAYDQAAYRLRGDAARLNFPDNAASRGPLHASVDAKLQTLCQNIAASKKGAKKHASASAAAAAATSSSAPTSNCSSSPSSDDASSSCCLESAAESSCPSPSPSASPESSTVPEMQQLDFSEAPWDEAAGFALTKYPSYEIDWDSLLAAN

SEQ ID NO: 451 - DNA, 1080 bp, Sorghum bicolor
atggggctcgacgtcgtggagatcgggatgggcgccgatttgagcctggatctgaggcacttcgccaccaaggccgtgaggcagagcaaggacgacgcgcctgcgccggacatggacgcctgcatccgccgcctcgaggaggagcggggcaagatcgagatgttcaagcgggagctccccctctgcgcgcggctcctcgccgacgtgattgatgtcatgaaggaggaggccggtaagaagacgacgaagagaagtgatcgcagcctgccggcggcggaggaggacgaggacggcgccgctggggacaagagcaagtggatgagcacggcgcagctctggacgggcgattccggccgggaggacgcggaatcagagaagcaagacaaggggaggagtttgccggaggccaagtcccgcggcggcgctctcttgccgttcaaggctgctgtgggctccggcgcgccggcgttcgcgtcgctctgcttgagaacggacgacaaggctgcgcgcgtcgggatgccggatctgtccttgctgtcgccgccggcgaccaagagcgccgccgaggagagccggcgccaggtggtggggcttgcgcaggcagcagcgagggcggccgccatggcgccagctgcccctgcgcttggcctccagtcccaatcgcagcagcagacagctcagcagcagcagcagcaggcaaggaaggttcggcgttgctggtcgacggagctgcatcgccagttcgtcgccgccttgaatcaactcggtggcccccaagttgccaccccgaagcaaatcagggagctgatgaaggtggatggcctaacaaacgacgaagtcaagagccatcttcagaaataccggctgcacaaccgaagggcgcctggatcaggcgtggtgagccagccgattatgctcgtgggagggctctggattccccaggagcaaagcagctctcagtctgggtctccccatgggcccctccacttctccaccgcctcaggcatcgccgtctcgtcggcggccaccgtcagctgcgaggaggaagatggccggtcagaaagctatggctggaaatga

SEQ ID NO: 452 - protein, 359 aa, Sorghum bicolor
MGLDVVEIGMGADLSLDLRHFATKAVRQSKDDAPAPDMDACIRRLEEERGKIEMFKRELPLCARLLADVIDVMKEEAGKKTTKRSDRSLPAAEEDEDGAAGDKSKWMSTAQLWTGDSGREDAESEKQDKGRSLPEAKSRGGALLPFKAAVGSGAPAFASLCLRTDDKAARVGMPDLSLLSPPATKSAAEESRRQVVGLAQAAARAAAMAPAAPALGLQSQSQQQTAQQQQQQARKVRRCWSTELHRQFVAALNQLGGPQVATPKQIRELMKVDGLTNDEVKSHLQKYRLHNRRAPGSGVVSQPIMLVGGLWIPQEQSSSQSGSPHGPLHFSTASGIAVSSAATVSCEEEDGRSESYGWK

SEQ ID NO: 453 - DNA, 1209 bp, Sorghum bicolor
atgcgccacacgcacgttctctctcatttctcaatggctcccttctcatcacgtcttcttcatggcgtgccccttctgctaatcctcgtcggcgccgccgccgcagtgacgaccgccgtccatgcggacaccggtggctaccgccggcggcacgcccgcttgttcgcgttcggcaactcgctcactgacaccggaaacgcggccatcttcccggcgactgcaggaggaccttccacctcgccgccgtacggggagacctactttggccatcccagcggccgagcttccgacggcaggctcatcgtcgacttcctcgtggaggagctgaaggtgccagagccgacgccgtacctcgccggcggcaggacgacggccacggccgccgacttcgtcaacggggccaacttcgcgctgggtggtgcaacggcgctcgaccaggcgttcttagcgaccaaggggatacagtcgctcgtgcccatctctctgactaatgagacgacgtggtttcacaacgttttgcagctactcgacgcatcagactacgatcagcataagatcttggcaagctcggtcttctaccttggcgagatcggtgtcaacgactacttcatcgccctaagcaacaacactgtggacgtcgcggtcagtctggtgccacacatcatcgacaccatccgttcagccctgaccaccatgatctctgccggggcgaagacggtggtggtttcagggatgctaccaatcggctgtgagccgcagcagctggcgctgttccctggcggtccgggcgactacgacccgaccaccggctgcatcacccggttcaacgtgctcgccgagcaccacaaccacatgctgaggacgatgctgagggagctccggcggagcaactatggcaggacgtccctgacgaccctcctctacgccgacatctaccgccccgtgatcaaggccgtcgcgtccccggcgctgtacggtttcggcgacaggccgctggcggcgtgctgcggcggcggtggcggccccaacaacttcgacttcctcgcgttctgcggcacgccggcgtcgatggcgtgcgccgacccgtccaagttcatctcctgggacggcatccacttcaccgaggctgccaataggttcatcgcgcgtaacatgatcaagggactgctgccgctaagccgtgcggcggcgtacgttgcaacaagttaa

SEQ ID NO: 454 - protein, 402 aa, Sorghum bicolor
MRHTHVLSHFSMAPFSSRLLHGVPLLLILVGAAAAVTTAVHADTGGYRRRHARLFAFGNSLTDTGNAAIFPATAGGPSTSPPYGETYFGHPSGRASDGRLIVDFLVEELKVPEPTPYLAGGRTTATAADFVNGANFALGGATALDQAFLATKGIQSLVPISLTNETTWFHNVLQLLDASDYDQHKILASSVFYLGEIGVNDYFIALSNNTVDVAVSLVPHIIDTIRSALTTMISAGAKTVVVSGMLPIGCEPQQLALFPGGPGDYDPTTGCITRFNVLAEHHNHMLRTMLRELRRSNYGRTSLTTLLYADIYRPVIKAVASPALYGFGDRPLAACCGGGGGPNNFDFLAFCGTPASMACADPSKFISWDGIHFTEAANRFIARNMIKGLLPLSRAAAYVATS

SEQ ID NO: 455 - DNA, 873 bp, Sorghum bicolor
atggagggtaaggaggaggatgttcggcttggcgccaaccgttactcggagcgtcagcccatcggcacggcggcgcagggcacggaggagaattcgaaggactacaaggaacccccggcggcgcctctgtttgaggctgaggagctgacgtcgtggtccttgtaccgcgccgggatcgccgagttcgtggccaccttcctcttcctctacatcagcatcctgacggtgatgggggtgagcaagtcgggcagcaagtgcggcaccgtgggcatccagggcatcgcctggtccttcggcggcatgatcttcgcgctggtgtactgcacggcgggcatctccggcggccacatcaacccggccgtcaccttcgggctcttgctggcgcggaagctgtcgctcacccgggcgctcttgtacatggtgatgcagtgcctgggcgccatctgcggcgccggcgtcgtcaagggcttccagcagacgctgtacatgggcgccggcggaggcgccaactccgtcaaccccgggtacaccaagggcgacggcctgggcgccgagatcgtcggcacgttcgtgctcgtctacaccgtcttctccgccaccgacgccaagcgaagcgcgcgtgactcgcatgtccccatcctcgcgccgctccccatcggtttcgccgtcttcctcgtccacctcgcaaccatccccatcaccggcacaggcatcaacccagcacgcagcctcggcgccgccatcgtctacaacaggtccaacgcatggaacgaccactggatcttctgggttggccccttcatcggcgccgctctcgccgccatctaccacgtggtcattatcagggccatccccttcaagagccgcgactaa

SEQ ID NO: 456 - protein, 290 aa, Sorghum bicolor
MEGKEEDVRLGANRYSERQPIGTAAQGTEENSKDYKEPPAAPLFEAEELTSWSLYRAGIAEFVATFLFLYISILTVMGVSKSGSKCGTVGIQGIAWSFGGMIFALVYCTAGISGGHINPAVTFGLLLARKLSLTRALLYMVMQCLGAICGAGVVKGFQQTLYMGAGGGANSVNPGYTKGDGLGAEIVGTFVLVYTVFSATDAKRSARDSHVPILAPLPIGFAVFLVHLATIPITGTGINPARSLGAAIVYNRSNAWNDHWIFWVGPFIGAALAAIYHVVIIRAIPFKSRD

SEQ ID NO: 457 - DNA, 861 bp, Sorghum bicolor
atgggcaaggaggtggacgtgtccactctggaggccggcggtgtccgtgactatgcggaccctccgccggcgccgctgattgacatcgacgagctcggcaagtggtccctgtaccgcgccgtgatcgccgagttcgtggccacgctgctgtttctgtacattacggtggccacagtgatcgggtacaagcaccagactgacgcgacggcgtcgggcgccgacgcggcgtgcggcggcgtgggcatcctcggcatcgcgtgggcgttcggcggcatgatcttcatcctcgtctactgcaccgccggcatctccggtggccacattaatccggcagtcacgttcggcctcttcctggcgcggaaggtgtccctggtgcgcgcgatcctgtacatggccgcgcagagcctcggtgccatctgcggcgtcgcgcttgtcaaggggttccagagcggattctacgcacgctacggcggcggcgccaacgaggtcagtcccgggtactccaccggcacggggctcgccgccgagatcatcggcaccttcgtgctggtgtacaccgtcttctccgccaccgaccccaagcgcaacgcccgcgattcccacgttccggtgttggcaccgcttccgattggattcgctgtgttcatggtgcacctggcgacgatcccaatcaccggcacggggatcaacccggcgaggagcctcggcgccgccgtcgtgtacaacaacagcaaggcctggagcgaccagtggatcttctgggttggtccgttcatcggcgccgcaatcgcagcgctgtaccaccagatcgtcctccgcgccagcgccagggggtacggctccttccggagcaatgcctag

SEQ ID NO: 458 - protein, 286 aa, Sorghum bicolor
MGKEVDVSTLEAGGVRDYADPPPAPLIDIDELGKWSLYRAVIAEFVATLLFLYITVATVIGYKHQTDATASGADAACGGVGILGIAWAFGGMIFILVYCTAGISGGHINPAVTFGLFLARKVSLVRAILYMAAQSLGAICGVALVKGFQSGFYARYGGGANEVSPGYSTGTGLAAEIIGTFVLVYTVFSATDPKRNARDSHVPVLAPLPIGFAVFMVHLATIPITGTGINPARSLGAAVVYNNSKAWSDQWIFWVGPFIGAAIAALYHQIVLRASARGYGSFRSNA

SEQ ID NO: 459 - DNA, 564 bp, Sorghum bicolor
atggcaggcacaaagctaatatcactggggctcattgttctcatgagcatgggattagcaaatgctgtgagggtggctagatactctagtgctgatgggtcaggacaaggagggggagggggtggcggatatgtgactggtgcgggatcagggggagggggcggcaccggattaggtgagagtggtccgaatggtgcccatgcaagtgctggagggggtggcgcaggtggtggaactagccaaaatgccgggtctgcatggggtgtagggttagggtcaggttcagggagtagtacatatagtggtagtggagaatcttccgatgctggtggtactggtgggggtggaggtggtggtcaagctggaggttcttgggactccaatgctcaaggttctggtagtggcatcggatcaggctctagctatgctaacaggtattggaacggaccaagttatgcaggtgcaaatgctaatggcaatggtggtggcacagggaacagctacaacggtggggctggcggcggtaaaggtgctggatctgggtatggcaatgcctacccctga

SEQ ID NO: 460 - protein, 187 aa, Sorghum bicolor
MAGTKLISLGLIVLMSMGLANAVRVARYSSADGSGQGGGGGGGYVTGAGSGGGGGTGLGESGPNGAHASAGGGGAGGGTSQNAGSAWGVGLGSGSGSSTYSGSGESSDAGGTGGGGGGGQAGGSWDSNAQGSGSGIGSGSSYANRYWNGPSYAGANANGNGGGTGNSYNGGAGGGKGAGSGYGNAYP

SEQ ID NO: 461 - DNA, 1164 bp, Sorghum bicolor
atgataccttccgtgaggctctctcctggtcctgcagccttctcaggctccagcctacgctcaaaattaccgtcaattccatccatctctagtcttaaaccctccaaatatgtggtctcctcgctgaaaccactctacctagcaccgctagatggtccacgcactgcagagcttaagtctcggagacagccactcgagttccgttgcgctgcttctgctgccgatgacaaggagtcaaagactaaggcggtgccagttcagtcagaaggcgcgcagaggctaaagatttccatctatttcgcgacctggtgggcgcttaatgtgatatttaacatttataacaagaaggttctcaatgctttcccttacccttggctcacctccacactctccctcgcctgtggctctgcgatgatgcttttctcttgggccacccgccttgttgaggcccccaagactgatctagacttctggaaagtccttttcccggtcgctgtggcacatacaattggccatgttgctgcgacagtgagcatgtctaaggtggcagtgtcatttacacacataattaaaagcgcagaacctgcattcagtgttttggtgtcaagattcatccttggggagacgtttccagtcccagtctatctttctctccttcctatcattggtggttgtgctctagctgctgtcacagagctgaactttaatatggttggatttatgggtgccatgatatccaaccttgcattcgttttccgcaacatcttctcgaagaggggcatgaaggggaagtctgtcagtggcatgaattactatgcttgcctgtcaataatgtccctggtcatactgactccatttgctatagctatggaaggccctcaaatgtgggctgctggttggcaaaaggctcttgcagaagttggacccaatgttatctggtggattgctgcacaaagcgtgttctaccacttatataaccaggtgtcctacatgtctctcgatcagatttctccattgacgtttagcattggcaatacaatgaagcgtatatcagtgattgtttcatcgatcattatcttccacacacctgtacgccctgtcaatgcactgggagctgccattgccatccttggcacattcctgtactctcaggcaaaggcgtga

SEQ ID NO: 462 - protein, 387 aa, Sorghum bicolor
MIPSVRLSPGPAAFSGSSLRSKLPSIPSISSLKPSKYVVSSLKPLYLAPLDGPRTAELKSRRQPLEFRCAASAADDKESKTKAVPVQSEGAQRLKISIYFATWWALNVIFNIYNKKVLNAFPYPWLTSTLSLACGSAMMLFSWATRLVEAPKTDLDFWKVLFPVAVAHTIGHVAATVSMSKVAVSFTHIIKSAEPAFSVLVSRFILGETFPVPVYLSLLPIIGGCALAAVTELNFNMVGFMGAMISNLAFVFRNIFSKRGMKGKSVSGMNYYACLSIMSLVILTPFAIAMEGPQMWAAGWQKALAEVGPNVIWWIAAQSVFYHLYNQVSYMSLDQISPLTFSIGNTMKRISVIVSSIIIFHTPVRPVNALGAAIAILGTFLYSQAKA

SEQ ID NO: 463 - DNA, 906 bp, Sorghum bicolor
atggcggagccggggtcgacgacgccgccgaacgggtctgcgccggcgacgcccggtacgccggcgccgctgttctccggcgggccgcgggtggactcgctgtcgtacgagcgcaagtcgatgccgcggtgcaagtgcctgccggcggtggaggggtggggcattgcgacgcacacctgcgtcgtcgagatccccgcgccggacgtctcgctcacccgcaagctcggcgcggagttcgtgggcacgttcatcctcatcttcttcgcgacggcggcgccgatcgtgaaccagaagtacggcggcgcgatcagcccgttcgggaacgcggcgtgcgcggggctggcggtgaccatcatcatcctgtcgacgggccacatctccggggcgcacctgaacccgtcgctcaccatcgcgttcgcggcgctgcgccacttcccctggctgcaggtgcccgcgtacgtgtccgtccaggtgctgggctccatctgcgccagcttcgcgctcaagggcgtcttccaccctttcctctccggcggcgtcaccgtccccgacgtcaccatctccaccgcccaggccttcttcaccgagttcatcatctccttcaacctcctcttcgtcgtcaccgccgtcgccaccgacacacgcgccgtgggtgaactcgccgggatcgcggtgggagcggccgtgacgctgaacatcctcgtcgccgggccgacgacgggcgggtccatgaacccggtgaggacgctggggccggcggtggcggcggggaactacaggcagctgtggatctacctgctggccccgacgctgggcgcgttggcgggggcaggcgtgtacacggcggtgaagctcagggacgagaacggcgagacgccgcgcacgcagcgcagtttccgccgctga

SEQ ID NO: 464 - protein, 301 aa, Sorghum bicolor
MAEPGSTTPPNGSAPATPGTPAPLFSGGPRVDSLSYERKSMPRCKCLPAVEGWGIATHTCVVEIPAPDVSLTRKLGAEFVGTFILIFFATAAPIVNQKYGGAISPFGNAACAGLAVTIIILSTGHISGAHLNPSLTIAFAALRHFPWLQVPAYVSVQVLGSICASFALKGVFHPFLSGGVTVPDVTISTAQAFFTEFIISFNLLFVVTAVATDTRAVGELAGIAVGAAVTLNILVAGPTTGGSMNPVRTLGPAVAAGNYRQLWIYLLAPTLGALAGAGVYTAVKLRDENGETPRTQRSFRR

SEQ ID NO: 465 - DNA, 753 bp, Sorghum bicolor
atgccgatcagcaggatcgccgtggggacccaccatgaggtgtaccacccgggcgccctcaaggcggcgttggctgagttcatctccaccctcatcttcgtcttcgccggccagggttccggcatggccttcagcaagctgacgagcggcggcgcgacgaccccctcgggcctgatcgcggcggctgtggcgcacgccttcgcgctgttcgtggcggtgtccgtgggcgccaacatctccggcggtcacgtgaaccctgccgtgaccttcggcgcgttcgtgggcggcaacatcaccctgttccgcggcctcctgtactgggtggcgcagctgctgggctccacggtggcgtgcttcctgctccgcttctccacgggcgggctggccacgggcaccttcggcctgaccggcgtctccgtgtgggaggcggtggtgatggagatcgtgatgaccttcgggctggtgtacacggtgtacgccaccgccgttgaccccaagaagggcagcctgggcaccatcgcccccatcgccatcggcttcatcgtcggcgccaacatcctggtcggcggcgccttcaccggcgcgtccatgaaccccgccgtgtccttcggccctgccctcgtcagctgggagtggggataccagtgggtgtactgggtcggcccactcatcggcggcggcctcgctggcgtcatctacgagctgctcttcatctcccaaacccacgagcagctccccaccaccgactactaa

SEQ ID NO: 466 - protein, 250 aa, Sorghum bicolor
MPISRIAVGTHHEVYHPGALKAALAEFISTLIFVFAGQGSGMAFSKLTSGGATTPSGLIAAAVAHAFALFVAVSVGANISGGHVNPAVTFGAFVGGNITLFRGLLYWVAQLLGSTVACFLLRFSTGGLATGTFGLTGVSVWEAVVMEIVMTFGLVYTVYATAVDPKKGSLGTIAPIAIGFIVGANILVGGAFTGASMNPAVSFGPALVSWEWGYQWVYWVGPLIGGGLAGVIYELLFISQTHEQLPTTDY

SEQ ID NO: 467 - DNA, 873 bp, Sorghum bicolor
atgggcaaggacgacgtgatcgagagcggcgccggcggcggcgagttcgctgccaaggactacacggacccaccgccagctccactgatcgacgcggcggagctgggttcctggtcgctgtaccgcgccgtgatcgccgagttcatcgcgacgctgctgttcctgtacatcaccgtcgccaccgtgatcgggtacaagcaccagacggacgcgacggcgtcgggcgccgacgccgcgtgcggcggcgtgggcgtgctgggcatcgcgtgggcgttcggcggcatgatcttcgtcctcgtctactgcacggcggggatctccggcggccacatcaacccggccgtcaccttcggcctgttcctggcgcgcaaggtctccctggtgcgcgcgctgctctacatcgtggcgcagtgcctgggcgccatctgcggcgtcggcctcgtcaaggcgttccagagcgcctacttcgacaggtacggcggcggcgccaactcgctcgcctccggctactcacgcggcaccgggctcggcgccgagatcatcggcaccttcgtgctcgtctacaccgtcttctccgccaccgaccccaagcgcaacgcccgcgactcccacgtcccggttctggctcccctccccatcggcttcgccgtgttcatggtgcacctggccaccatccccgtcaccggcaccggcatcaacccggccaggagccttggcgcagccgtcatctacaacaaggacaagccctgggatgaccactggatcttctgggtgggcccattcgtgggcgctgccatcgcggcgttctaccaccagtacatcctccgggcgggcgccatcaaggcactcggctccttcaggagcaacgcgtga

SEQ ID NO: 468 - protein, 290 aa, Sorghum bicolor
MGKDDVIESGAGGGEFAAKDYTDPPPAPLIDAAELGSWSLYRAVIAEFIATLLFLYITVATVIGYKHQTDATASGADAACGGVGVLGIAWAFGGMIFVLVYCTAGISGGHINPAVTFGLFLARKVSLVRALLYIVAQCLGAICGVGLVKAFQSAYFDRYGGGANSLASGYSRGTGLGAEIIGTFVLVYTVFSATDPKRNARDSHVPVLAPLPIGFAVFMVHLATIPVTGTGINPARSLGAAVIYNKDKPWDDHWIFWVGPFVGAAIAAFYHQYILRAGAIKALGSFRSNA

SEQ ID NO: 469 - DNA, 1560 bp, Sorghum bicolor; identical to SEQ ID NO: 271

SEQ ID NO: 470 - protein, 519 aa, Sorghum bicolor; identical to SEQ ID NO: 272

SEQ ID NO: 471 - DNA, 1122 bp, Sorghum bicolor
atgacgccggcggcggcgatctccggctccagcggccacctcgtcgtctcctccccctgcctcaggcagccgctcccgccatctccgcgcaccgctcgcccaatcgcggccaacgccgcctcgcccgtggcccgccgcggggtcgcggccgccgccgtgtccagccccgctgtgtcggccgccgcggggaaggatgccaaacaggctcctaaggatttccttcatatcaatgattttgacaaggatacaataatgaatatccttaatcgagcgattgaggttaaggcagcgataaagtctggggacaggagcttccaaccgttcaaagggaaatcaatggcgatgatttttgccaagccatcaatgaggacccgtgtttcatttgagacgggattcttcttacttggcgggcatgctatttatttgggtccagatgatatccagatgggcaagcgtgaggagactcgtgatgttgctcgagtactttctggctataatgacatcattatggctagggtctttgctcaccaggatattctggacttggcaaattatgcacctgtacctgtcataaatggtctcactgactataaccatccatgccagataatggctgatgcacttactatgcttgagcacattggtcgtattgaaaacaccaaggttgtctatgttggagatgggaacaacattgtgcactcatggcttctattggctgctgtacttccttttcactttgtatgtgcttgtcccaagggatttgagcctgatgcgaagacagtggagatcgctaggagtgctggaatcagtaagattgaaataacaaacgatcccagggaagcagttaagggagcagatgttgtgtatacagatgtttgggccagcatgggccaaaaggaagaagctgattatagaaaacagaagtttcagggattcacggtcgatgaagccctgatggagattgctggctcccaagcctaccttatgcactgtttgcctgctgagagaggagtggaggtgacagacggtgccatcgaggctcccaactcaatcgtgttcccccaggctgaaaacagaatgcacgctcagaatgccatcatgctccacgtgctcggtgcttaa

SEQ ID NO: 472 - protein, 373 aa, Sorghum bicolor
MTPAAAISGSSGHLVVSSPCLRQPLPPSPRTARPIAANAASPVARRGVAAAAVSSPAVSAAAGKDAKQAPKDFLHINDFDKDTIMNILNRAIEVKAAIKSGDRSFQPFKGKSMAMIFAKPSMRTRVSFETGFFLLGGHAIYLGPDDIQMGKREETRDVARVLSGYNDIIMARVFAHQDILDLANYAPVPVINGLTDYNHPCQIMADALTMLEHIGRIENTKVVYVGDGNNIVHSWLLLAAVLPFHFVCACPKGFEPDAKTVEIARSAGISKIEITNDPREAVKGADVVYTDVWASMGQKEEADYRKQKFQGFTVDEALMEIAGSQAYLMHCLPAERGVEVTDGAIEAPNSIVFPQAENRMHAQNAIMLHVLGA

SEQ ID NO: 473 - DNA, 1029 bp, Sorghum bicolor
atggctaggaagtgctctagctgtgggaacaatggccacaactcgaggacctgcagcgggcacggcaggacgacggtcttcgtaggccacggcggcatcggcggcggcggcgtgaggctgttcggggtgcagctgcacgtggccgggtcctcgcccatggccatgaagaagtgcttcagcatggagtgcctgtcgtcgtcgacgttgtcgtccgccgtgacgccgacgtactacgctgccgctctcgccgccaccaccaacagcaactcgccgtcggcgtcgtcctcgtcgtcgctcgtgtcggtggaggaggctcctgagaagatgaccaacgggtacctctccgacgggctcatgggcagggcgcaggagcggaagaagggcgttccatggacggaggacgagcaccggcgattcctggcgggcctggagaagctcgggaagggcgactggcgaggcatctcccgtcacttcgtgacgacgcggacaccgacgcaggtggccagccacgcccagaagtacttcctccggcagagcagcctgacgcacaagaagcgcaggtccagcctcttcgacgtggtggagaacgctgacagggcggcgacgagctccattaaggacagggagcaggagcagcgcctgaggctcaaggatgctgcgatcgcgacgaccgcctctgcagcagcacccggaacgacgacgccgacagagctcccggcgctgtcgctcggcatcatcagccggccagcaaggaggcctgagcacgtcgtcctgcctccgaccagcctgtcgctgcagctgccgcggtgctcggcggcaatgggcagcctggccctggccgcgccgaaacacacacacccttcgtcgaccctgacgccggcggcaacggctagtagtagccaggcgctgccggacctggagctgaagatctcgatcgcccggccgcagagcgacgtccaccaggtccagactgggtcgtcgccgccgccgccgaggacgccctttctgggcaccatcagggtcacataa

SEQ ID NO: 474 - protein, 342 aa, Sorghum bicolor
MARKCSSCGNNGHNSRTCSGHGRTTVFVGHGGIGGGGVRLFGVQLHVAGSSPMAMKKCFSMECLSSSTLSSAVTPTYYAAALAATTNSNSPSASSSSSLVSVEEAPEKMTNGYLSDGLMGRAQERKKGVPWTEDEHRRFLAGLEKLGKGDWRGISRHFVTTRTPTQVASHAQKYFLRQSSLTHKKRRSSLFDVVENADRAATSSIKDREQEQRLRLKDAAIATTASAAAPGTTTPTELPALSLGIISRPARRPEHVVLPPTSLSLQLPRCSAAMGSLALAAPKHTHPSSTLTPAATASSSQALPDLELKISIARPQSDVHQVQTGSSPPPPRTPFLGTIRVT

SEQ ID NO: 475 - DNA, 756 bp, Sorghum bicolor
atggccaggccgctctcttccttctgcctccaccggatcaggtccggcggtactgcgtccactgccgcaccgctgtcgatatgcgccaacaagaagacctccttcgacgacgacggcggcggtggcatatgcaagtcgctgaaggatggcaagcaggaagacgaggaggctaacaagaagggtggcgtggaggccgtcgtcgtggggaggaaggtgatggtggcggcggacggcggcagcgaggaggcccggacggcgctgcagtgggcgctgtcgcacgccgtccggccctgcgacacggtggtcctgctcgacgtcgtcaggggcggcgccggcggcggcaacggcaagaaccgacgcgatccaagagggagtagtcagcacctggaggcaatgaggagcatctgccaggccaagagaccagaggtgcgcgtggaggtttccctggcggagggcggcggcggcggcggcaaggaccgcgggccggcgatagtggaggcggcgaggaagcagggcgtgtcgctcctcgtcgtggggcagaagaggcggtcctctgtcacatggcggctgctgtccatgtggatcgccggcgtcaagggcggcggtggcggtgccggaggcggctgcgccagcgccgccgactactgcgtgcagcacgcggcgtgcacggcgctggccgtccggcgcaagagccggcgaggcggcggatacctcatcaccaccaggcggcagagggatttctggctcctggcttga

SEQ ID NO: 476 - protein, 251 aa, Sorghum bicolor
MARPLSSFCLHRIRSGGTASTAAPLSICANKKTSFDDDGGGGICKSLKDGKQEDEEANKKGGVEAVVVGRKVMVAADGGSEEARTALQWALSHAVRPCDTVVLLDVVRGGAGGGNGKNRRDPRGSSQHLEAMRSICQAKRPEVRVEVSLAEGGGGGGKDRGPAIVEAARKQGVSLLVVGQKRRSSVTWRLLSMWIAGVKGGGGGAGGGCASAADYCVQHAACTALAVRRKSRRGGGYLITTRRQRDFWLLA

SEQ ID NO: 477 - DNA, 3504 bp, Sorghum bicolor
atggatttgtccaggttcgcctccggcgtcgggcccagccgcgcggcccctcgggcgggcctgcagatcggcgccgccgggaatggcttccggccctgcacccagcggcgagcgcggcaccgcggcggcggcggcgggtacgggagcctcacgtccaccgccgccgccgccgccctccgcggccgcggcgggctcttctacctggctcccacgcgcgggagccctcctctcagtctccgcgccagagggcggccgccgcggtgccagggcaacgactcattggcctacgtcgacggccccttggaggccgccaaggactccggcgaggtcaccgacgaggaggccaccagctcggggtccgacgacgagaggggccccggccccgccgacgtcgaccgtctcagggagatgctgcaccggtccaggaacgagctggaggtggccaggctcaacagcaccatgttcgaggagaaggcgcagcggatatccgagtcggccatcgcgctcaaggaccgcgccgacggcgcccagagggacgtgtctgcggccgttgccactgtgcaggagattatcggcaaggaggcggacgccaaggaggccgttcaaaaggctaccatggcactgtcgatggccgaggcgaggctgcagctggcagcggaggcgctggaggcgaagcggggctcggtcgggccaatggaggttagcatcgaaggcgtggaggaggaggcccttgtgtctgcgcaggaagagattaaggattgccggatggccctgtcacggtgcgaggaggagctgggacgtgtccaggacaagaagatggagctgcagaaggaggttgataggctgacggagctcgcagagaaggcccagttggacgcgtccaaggccgaagaagatgttgccaatataatggtgttggctgagcaggcggtggctcttgagatggaagctgcacagcgtgtcaacgatgcggaaatgttgctggggaaagcggagaaggccatatcctcagttgacactgtggtggagctaacgtcatctgctgaagagcagaaaagcactgaagaagatagcatttctgaagggtacgagtatagcagtgatgccaccgatgatgtttctgtgagggatgaggtgtcaagtatcgagcgtctaatggttggtgacttgactgttgagggcattgagcagcttgaaccatcccgtgagatatatgatgaagcaagcagtgataagacgtctgttgagcctcagaaagaggctgagcctgattcagataagtcaaagcaagggaagaagcaggaaatggaacgaaaggaggtcaccaaggaaccactgagtgctccaaaagcactggtgaagagatcatcccgcttcttcccggcatctttcttctcctccaaagttgatggagagtttacgcctacatcagtctttcgggggttaatgaaatcagtgcaaaaacaggttccgaagcttgttgttgggatattgcttcttggttcaggggcattcttcttaaatagagctgagaagagtcaactatttcagcagcaaggcattgccacaagcattggaaaggtaacctccacaacaaagcccatagttcgtgagatacggcaaattccacagagagtaaagaagctaatagagctcttacctcatcaagaggtaaatgaggaagaagcttcgctttttgacatactgtatttgcttctggccagtgttatttttgtaccattatttcagaaaatccctggaggcagtcctgttcttggatatcttgctgctggtgtcctcattggtccatatgggctctccatcatccgtaatgtgcacgggacaaaggcaattgcggaattcggagtcgtgttcttactatttaacattggacttgagctttctgtggaaaggctaagctcgatgaagaagtatgtcttcggcttgggatctgctcaggtgctggctactactgcagctgttggtatgatagctcatcgttttgctgcactaccagggccagcagcaatcgttgttgggagtgggttggctctgtcatccacagctgttgtcttacaagtattgcaagagcgtggtgaaagtacgtcacgtcatgggcgcgctacattttctgtgttattgttccaggatttggctgtggtggttctgttgatattaatacctctcatatcacctaattcttcaaaaggaggggttggtttccaagcaatagcagaagccatgggaatggctgcagtcaaagcagtagctgctataactgccataatgtctggaggccgtctgttgctccgtcctatttacaaaataattgctgaaaatcggaatgccgagatattttcagcgaatacactccttgttatttttggcacaagtcttcttacagcccgggctgggttatcaatggcacttggagcttttttggctggcctgttactagcagaaacggagttctccttgcaggttgagtcagatatagctccgtatcgtggtcttctgttaggacttttctttatgacggttggaatgtctattgacccaaagctgcttctgtcaaacttcccagcaatctctgtgatattgggtctcttgatatttggaaaaacattgttggttacatttgtcggcagggtgtttggggtttctactatagctgctattcgtgttggcctcttgcttgcacctggtggtgagtttgcttttgttgcctttggagaagctgtcaatcagggtcttctatcacctcaattatcatcgttgctatttttagtcgttggcatttcaatggctctgacaccatggttagctgctggggggcagtttctcgcatcaaaatttgagcagcatgatgtgaggagtttattgcccgtggaaagtgagactgacgatttgcaagaccatattattatattaggctttggacgtgttgggcagatcattgcgcaactcctgtcagagcggttaatcccttttgttgcacttgatgttagaagcgatcgggtagcagttgggcgtgcacttgaccttccagtgtattttggggatgctggaagcagagaggtactgcacaaagttggagctgaaagagcttgtgctgctgcaattactttggatactcctggtgcaaactacagagctgtctgggcattgagcaaatatttcccaaatgtgaagacatttgttagagcacatgacgttgatcatggtgttaatttggagaaagctggtgcaatggcggttgtccctgagaccttggagccaagccttcagctagctgctgctgttcttgcacaagcaaaacttccaatgtcagagattcaggaaaccatcagcgagttccggaatcgacatctgtcagagcttacagagttgtgtgctacgacaggaagttctcttggctatgggttttccagagttacgtccaaatcgaagtctgtcacccccgatgatgaaagcgaaacagtggatggtgcactagctatttga

SEQ ID NO: 478 - protein, 1167 aa, Sorghum bicolor
MDLSRFASGVGPSRAAPRAGLQIGAAGNGFRPCTQRRARHRGGGGGYGSLTSTAAAAALRGRGGLFYLAPTRGSPPLSLRARGRPPRCQGNDSLAYVDGPLEAAKDSGEVTDEEATSSGSDDERGPGPADVDRLREMLHRSRNELEVARLNSTMFEEKAQRISESAIALKDRADGAQRDVSAAVATVQEIIGKEADAKEAVQKATMALSMAEARLQLAAEALEAKRGSVGPMEVSIEGVEEEALVSAQEEIKDCRMALSRCEEELGRVQDKKMELQKEVDRLTELAEKAQLDASKAEEDVANIMVLAEQAVALEMEAAQRVNDAEMLLGKAEKAISSVDTVVELTSSAEEQKSTEEDSISEGYEYSSDATDDVSVRDEVSSIERLMVGDLTVEGIEQLEPSREIYDEASSDKTSVEPQKEAEPDSDKSKQGKKQEMERKEVTKEPLSAPKALVKRSSRFFPASFFSSKVDGEFTPTSVFRGLMKSVQKQVPKLVVGILLLGSGAFFLNRAEKSQLFQQQGIATSIGKVTSTTKPIVREIRQIPQRVKKLIELLPHQEVNEEEASLFDILYLLLASVIFVPLFQKIPGGSPVLGYLAAGVLIGPYGLSIIRNVHGTKAIAEFGVVFLLFNIGLELSVERLSSMKKYVFGLGSAQVLATTAAVGMIAHRFAALPGPAAIVVGSGLALSSTAVVLQVLQERGESTSRHGRATFSVLLFQDLAVVVLLILIPLISPNSSKGGVGFQAIAEAMGMAAVKAVAAITAIMSGGRLLLRPIYKIIAENRNAEIFSANTLLVIFGTSLLTARAGLSMALGAFLAGLLLAETEFSLQVESDIAPYRGLLLGLFFMTVGMSIDPKLLLSNFPAISVILGLLIFGKTLLVTFVGRVFGVSTIAAIRVGLLLAPGGEFAFVAFGEAVNQGLLSPQLSSLLFLVVGISMALTPWLAAGGQFLASKFEQHDVRSLLPVESETDDLQDHIIILGFGRVGQIIAQLLSERLIPFVALDVRSDRVAVGRALDLPVYFGDAGSREVLHKVGAERACAAAITLDTPGANYRAVWALSKYFPNVKTFVRAHDVDHGVNLEKAGAMAVVPETLEPSLQLAAAVLAQAKLPMSEIQETISEFRNRHLSELTELCATTGSSLGYGFSRVTSKSKSVTPDDESETVDGALAI

SEQ ID NO: 479 - DNA, 174 bp, Sorghum bicolor
atgaaggagggcacggcgaactgcgtcgacatcctcatcgccatcatcctcccccctctcggcgtcttcctcaagttcggctgcaaggtcgagttctggctctgcctcttgctcaccttcctcgcctatcttccggggatcatctacgcgatctacgccatcaccaaggactag

SEQ ID NO: 480 - protein, 57 aa, Sorghum bicolor
MKEGTANCVDILIAIILPPLGVFLKFGCKVEFWLCLLLTFLAYLPGIIYAIYAITKD

SEQ ID NO: 481 - DNA, 750 bp, Sorghum bicolor
atggtgaagctcgcgttcggaagtgtcggcgactccttcagcgccacctccatcaaggcctacgtgtccgagttcatcgccaccctcctcttcgtcttcgccggcgtcggttccgccatcgccttcggtaaacagatcaatgaccgcgctctggaccctgccggtctggtggcgatcgcgatcgcacgcgcgctggcgctctttgtgtgtgtctctatctctctctatatctctggcgggcacctgaacccggccgtgaccttcgggctggccgtgggcggccacatcaccatcctgacgggcatcttctactgggtggcgcagctgctgggtgcctccgtggcgtgcctgctcctcaagttcgtgacccacggcaaggccatcccgacgcacggcgtgtccgggatcagcgagctcgagggcgtggtgttcgagatcatcatcaccttcgcgctcgtgtacaccgtgtacgccaccgccgccgaccccaagaagggctccctcggcaccatcgcgcccatcgccatcggcttcatcgtcggcgccaacatcctcgccgcggggcccttcagcggcggctccatgaaccccgcacgctccttcggccccgccgtcgccgcgggcaacttcgccggcaactgggtctactgggtcggcccgctcatcggcggtggcctcgctggcctcatctacggcgacgtcttcatcggcggcaactaccagcaggtcgccgaccaggactacgcctaa

SEQ ID NO: 482 - protein, 249 aa, Sorghum bicolor
MVKLAFGSVGDSFSATSIKAYVSEFIATLLFVFAGVGSAIAFGKQINDRALDPAGLVAIAIARALALFVCVSISLYISGGHLNPAVTFGLAVGGHITILTGIFYWVAQLLGASVACLLLKFVTHGKAIPTHGVSGISELEGVVFEIIITFALVYTVYATAADPKKGSLGTIAPIAIGFIVGANILAAGPFSGGSMNPARSFGPAVAAGNFAGNWVYWVGPLIGGGLAGLIYGDVFIGGNYQQVADQDYA

SEQ ID NO: 483 - DNA, 861 bp, Sorghum bicolor; identical to SEQ ID NO: 457

SEQ ID NO: 484 - protein, 286 aa, Sorghum bicolor; identical to SEQ ID NO: 458

SEQ ID NO: 485 - DNA, 1788 bp, Sorghum bicolor
atgacgacggcggccggcatgccggggtcgtcgccggtgggctcggcggcggccgcggctggcggtcccgcggcgcccgaggtggcggcaagggacgcggtgatcgggtggttccgcggcgagttcgccgcggccaacgcgatgatcgacgcgctgtgcggccacctggcgcagatcggcggcggcggcgccgagtacgaccccgtcttcgccgcgctccaccgacgccgcgccaactggttccccgtcctccacatgcagaagttctaccccgtcaccgacgtcaccgccgagctgcgccgcgtcgcggacgcccgcgccgccgccgcagccgccgccgtcgcggggtcctgctgctactcggaggaggccacgtccacggtgatccaggagcccatggaagacctccccgctgaggctgaggctgaggctgagcctgagcccgaactggagccggagcacgagcaggatcctgtactacaggatccggcaccggcggccgaggaggctgacggcaccgtcatcgaccccgccgtggagtaccacgagcaggacgcggaggtggattcctccggggattcgtcggagcggaaggccccctccacggaagacgacaccgtagcagacggacatcatactgatcaaggatctcaaggggaacacagcctaccagagagctatcccatctgctctgaccacgaggagtgcattgcccgtcctgagaggatcaagatccagaaaggtttcgtggccaaggaatccgtgaaggggcacatggttaatgtcgtcaaaggcttgaagatatatgaagacgtctttacaacatcggagatcgtgaaagttgcagatttcatcaatgaaattcgtcaggctggcagaaatggagaactttcaggtgagactttcatattcttcaacaagcagatcaaaggaaacaagagggagatcatacagctcggtgtcccgttatttcaacctaccacagaggaagctaattgtcacacagaaccaatcccccttgtcctgcaggctgtcattgaccaccttgttctttggcgtttaataccagaaagcaggaagccaaacagtgtcatcatcaacttcttcgatgaggatgaacattcgcagccctacttcaagcctccccatctggacaaccccatttgcactcttctgctgtctgaaactacgatggcatttggcaggtcactcgtcactgacagcaacggcaactacaagggacctctcacactctcactaaagcaagggtccctattagtgatgcgtgggaacagtgccgacatggcgcgccatgtggtgtgtccgtcgtccaaccggcgcgtgagcatcacgttcgcaagggtgaggccatccacgccggtggacctgagcccactcccgtcccccaccaaggctatgacgccctggcagccgcagccggccactggctcccaggtggcggcgcccgcgtgcatgacgcagaagcccccggtcagcggtgccatcatcggttatgccccgacaccgcaggccgtgctggcgcccgcggcctggggcatggccatgcgcgcgcccgtcatgatggtggccgcagcgcctgcgaggcccatggtgatggcctcgtcgggcaccggcggcggcaacatcagcaagcggatgggccgcagcggcaccggcgtgttcctgccgtggacggtcgggccgaagcggtacaacaagcaccttccgccgcgcatccagaagcgccggttctcggcgatgatgtcgcccatcgaggcgcagggctga

SEQ ID NO: 486 - protein, 595 aa, Sorghum bicolor
MTTAAGMPGSSPVGSAAAAAGGPAAPEVAARDAVIGWFRGEFAAANAMIDALCGHLAQIGGGGAEYDPVFAALHRRRANWFPVLHMQKFYPVTDVTAELRRVADARAAAAAAAVAGSCCYSEEATSTVIQEPMEDLPAEAEAEAEPEPELEPEHEQDPVLQDPAPAAEEADGTVIDPAVEYHEQDAEVDSSGDSSERKAPSTEDDTVADGHHTDQGSQGEHSLPESYPICSDHEECIARPERIKIQKGFVAKESVKGHMVNVVKGLKIYEDVFTTSEIVKVADFINEIRQAGRNGELSGETFIFFNKQIKGNKREIIQLGVPLFQPTTEEANCHTEPIPLVLQAVIDHLVLWRLIPESRKPNSVIINFFDEDEHSQPYFKPPHLDNPICTLLLSETTMAFGRSLVTDSNGNYKGPLTLSLKQGSLLVMRGNSADMARHVVCPSSNRRVSITFARVRPSTPVDLSPLPSPTKAMTPWQPQPATGSQVAAPACMTQKPPVSGAIIGYAPTPQAVLAPAAWGMAMRAPVMMVAAAPARPMVMASSGTGGGNISKRMGRSGTGVFLPWTVGPKRYNKHLPPRIQKRRFSAMMSPIEAQG

SEQ ID NO: 487 - DNA, 1899 bp, Sorghum bicolor
atggagagcctggcgcagcgcgccgcgctgctgcgggagtcgctgcagaagagccagcaggtcaccgacgccgtcgtctccatcctaggctccttcgacagccgcctcaccgcgctcgactccgccatgcgccccatccaggtgaggacgcacgccgtgcgcaccgcgcacgagaacatcgaccgcacgctgcgctccgcggatgtgatccttacccagttcgaccgaactcgagaggcagagcgtgaaatacagaagggtccgcatgagaaccttcaaggcttcctagatgcggttgatcggttgagaagtattgagcgtttctttagttcaaatcggagttaccgtagtagtgatggggtgctcaaccatgtaaacgccctcctttctaaggcccttgtcaagatggagggtgaattccagaatcaattgtcccagcgcagcaaaccgatggagcctgatcgtctttttgattgtcttccaagtacactaagaccatcatctgaatctcagcccgaaggtgggaaaaacccatctgaaaatcaccaaaactcagaggctgctgtatatagtcctcctgctcttattgagccaaagtttgttccactactctctaaattagcacaacagttggttcaagctggatgccaacagcaatgctcagaaatatacagtgaagctcgctcttcagctttagaatcaagtctgaagaacttgggtgttgaaaaactgagcaaagatgaagtgcagaaaatgccgtgggaaattttggagtctaaaattgggaattggattcatttcatgcgaattgctgtcaaacttctttttgctggggagcgccagctttgcgaccaagtttttgagtgcagtcaatctttgagggataagtgttttgctgcaataacaaagaacagtttggctacactactcagttttggagaggctattgctatgagtaaacgatcaccagagaaactctttgttctgctagacatgtatgagataatgtgtgagcttcaaacagagattgacaccatttttgttggagaagcatgctcgcaaatgcgcgactatgcactgagtttaacaaaatgcttagcacaaacagcgcaaaagactttcagtgattttgaagaagcggttgaaaaggatgcaacaaagaatattcacactgatggaacagttcatcctttaacgagctatgtgatcaactatgttaaatttttgtttgactaccagtcaactctaaagcagcttttccaggagttcaaaaaggaagatggaacaggttctgagctggcagctgtaacaatgaaaatcatgcaagccttacaaaataatttagaagcaaaagcaaaacaatacaaggatccagccttgatgcacatatttttgatgaacaacattcactatatcgtcaaatctgtccgcagatcagaagccaaggatttgttgggtgatgactggattcaaaggcaccgaaggattgtacagcaaaatgccaatcagtatagaaggattgcttggtcgaaggtgttgcaatgcctctctggtcaaggtttgacttcatcaggtggtagtggtcaagtaggaagtgatggtggcaatagcagtggagcttcaagagcagctgtgaaggagagattcagatctttcaatgtgttattcgaagagatctatcagaagcaatgtggctggtcggttccagacactgagctgcgtgagtcactaagacttgcggttgctgaaatcctgttgcctgcctaccgatctttcataaaacgttttgggcctctcatagagaatagcaaagcacctggaaaatacgtgaagcacactcctgagcaactcgagctgctgctaggcaatttatttgaggggaaacaagaacgcgcttga

SEQ ID NO: 488 - protein, 632 aa, Sorghum bicolor
MESLAQRAALLRESLQKSQQVTDAVVSILGSFDSRLTALDSAMRPIQVRTHAVRTAHENIDRTLRSADVILTQFDRTREAEREIQKGPHENLQGFLDAVDRLRSIERFFSSNRSYRSSDGVLNHVNALLSKALVKMEGEFQNQLSQRSKPMEPDRLFDCLPSTLRPSSESQPEGGKNPSENHQNSEAAVYSPPALIEPKFVPLLSKLAQQLVQAGCQQQCSEIYSEARSSALESSLKNLGVEKLSKDEVQKMPWEILESKIGNWIHFMRIAVKLLFAGERQLCDQVFECSQSLRDKCFAAITKNSLATLLSFGEAIAMSKRSPEKLFVLLDMYEIMCELQTEIDTIFVGEACSQMRDYALSLTKCLAQTAQKTFSDFEEAVEKDATKNIHTDGTVHPLTSYVINYVKFLFDYQSTLKQLFQEFKKEDGTGSELAAVTMKIMQALQNNLEAKAKQYKDPALMHIFLMNNIHYIVKSVRRSEAKDLLGDDWIQRHRRIVQQNANQYRRIAWSKVLQCLSGQGLTSSGGSGQVGSDGGNSSGASRAAVKERFRSFNVLFEEIYQKQCGWSVPDTELRESLRLAVAEILLPAYRSFIKRFGPLIENSKAPGKYVKHTPEQLELLLGNLFEGKQERA

SEQ ID NO: 489 - DNA, 870 bp, Sorghum bicolor
atggaggggaaagaggaggacgtgcgcctgggcgccaacaagttctcggagcggcagcccatcgggacggcggcgcagggcgccggggacgacaaggactacaaggagcccccgccggcgccgctgttcgagcccggggagctcaagtcctggtccttctaccgcgcgggcatcgccgagttcgtcgccaccttcctcttcctctacatcaccatcctcaccgtcatgggcgtctccaagtccaactccaagtgcgccaccgtcggcatccagggcatcgcctggtccttcggagggatgatcttcgcgctcgtctactgcaccgccggcatctccggagggcacatcaacccagctgtgactttcgggctgttcttggccaggaagctgtccctgactagggccatcttctacattatcatgcaatgcctgggtgccatctgtggagctggagtggtgaagggcttccagcaggggctttacatgggcaacggtggtggtgccaatgttgtcgcccccggctacaccaagggtgatggccttggcgctgagatcgttggcaccttcatcctggtctacaccgtcttctcggccactgatgccaagaggaatgccagggactcccatgttcctatccttgccccactgccaattgggttcgcggtgttcctggtccaccttgccaccatccccattactggcactggcatcaacccagctaggagccttggcgctgccatcatctacaacagggatcatgcctggagcgaccattggatcttctgggtcggccccttcattggtgctgccctggctgccatctaccaccaggtgatcatcagggccatcccgttcaagagcaggtcttaa

SEQ ID NO: 490 - protein, 289 aa, Sorghum bicolor
MEGKEEDVRLGANKFSERQPIGTAAQGAGDDKDYKEPPPAPLFEPGELKSWSFYRAGIAEFVATFLFLYITILTVMGVSKSNSKCATVGIQGIAWSFGGMIFALVYCTAGISGGHINPAVTFGLFLARKLSLTRAIFYIIMQCLGAICGAGVVKGFQQGLYMGNGGGANVVAPGYTKGDGLGAEIVGTFILVYTVFSATDAKRNARDSHVPILAPLPIGFAVFLVHLATIPITGTGINPARSLGAAIIYNRDHAWSDHWIFWVGPFIGAALAAIYHQVIIRAIPFKSRS

SEQ ID NO: 491 - DNA, 1473 bp, Sorghum bicolor
atggtgctctccaaggccgtctccgagagtgacatgtccgtgcactccacgttcgcgtcgcgctacgtccggtcgtctctcccaaggtatcgcatgccggagaactcgatccccaaggaggcggcgtaccagatcatcaacgacgagctgatgctggacgggaacccgcgcctgaacctggcgtccttcgtcaccacctggatggagcccgagtgcgacaagctcatcatggccgccatcaacaagaactacgtcgacatggacgagtaccccgtcaccaccgagctccagaaccggtgcgtgaacatgatcgctcatctcttcaacgcgccgctgggcgagtccgagacggcggtgggcgtcggcacggtgggctcgtcggaggccatcatgctggccgggctggccttcaagcgcaggtggcagaacaagcgcagggccgagggcaagccgtttgacaagcccaacatcgtcaccggcgccaacgtccaggtttgctgggaaaagttcgcgaggtacttcgaggtggagctgagggaggtgaagctgcgcgacggctactacgtgatggacccggagaaggcggtggagatggtggacgagaacaccatctgcgtcgcggcgatcctgggctccacgctcaacggcgagttcgaggacgtgaagctgctcaacgacctgctggaggtgaagaacggggagaccgggtgggggacgcccatccacgtggacgcggcgagcggcggcttcatcgcgcccttcctgtacccggagctggagtgggacttccgcctgccctgggtcaagagcatcaacgtcagcggccacaagtacgggctcgtctacgccggcatcggctggtgcatctggcgcagcaaggaggacctgccggaggagctcatcttccacatcaactacctcggcgccgaccagccgacgttcacgctcaacttctccaagggctcgagccaagtcatcgcgcagtactaccagctcatccgccatggcttcgagggatacaggaacatcatggagaactgccacgagaacgccatggtgctcaaggaaggcctggagaagacgggccgcttcaacatcgtgtccaaggacgagggcgtcccgctggtggccttctcgctcaaggaccgcagccggcacgacgagttcgagatctccgacatgctgcgccgcttcggctggatcgtgccggcctacaccatgcccgccgacgcgcagcacgtcacggtgctccgcgtcgtcatccgggaggagttcagccgcaccctcgccgagcgcctcgtcctcgacatcgagaaggtgatgtaccagctggacgcgctgccgtccaggatcccgccccctccaccgccggcacagctggtcaggaaaaagtcggagctcgagacgcagaggtcggtgacggaggcgtggaagaagtttgtgctcgccaagaagaccaacggcgtctgctag

SEQ ID NO: 492 - protein, 490 aa, Sorghum bicolor
MVLSKAVSESDMSVHSTFASRYVRSSLPRYRMPENSIPKEAAYQIINDELMLDGNPRLNLASFVTTWMEPECDKLIMAAINKNYVDMDEYPVTTELQNRCVNMIAHLFNAPLGESETAVGVGTVGSSEAIMLAGLAFKRRWQNKRRAEGKPFDKPNIVTGANVQVCWEKFARYFEVELREVKLRDGYYVMDPEKAVEMVDENTICVAAILGSTLNGEFEDVKLLNDLLEVKNGETGWGTPIHVDAASGGFIAPFLYPELEWDFRLPWVKSINVSGHKYGLVYAGIGWCIWRSKEDLPEELIFHINYLGADQPTFTLNFSKGSSQVIAQYYQLIRHGFEGYRNIMENCHENAMVLKEGLEKTGRFNIVSKDEGVPLVAFSLKDRSRHDEFEISDMLRRFGWIVPAYTMPADAQHVTVLRVVIREEFSRTLAERLVLDIEKVMYQLDALPSRIPPPPPPAQLVRKKSELETQRSVTEAWKKFVLAKKTNGVC

SEQ ID NO: 493 - DNA, 870 bp, Sorghum bicolor
atggcgaaggacatcgaagcatcggggcccgaggccggcgagttctcggccaaggactacaccgaccctccgccggcgccgctgatcgacgcggcggagctcacccagtggtcgctgtaccgcgcggtcatcgccgagttcatcgccacgctgctcttcctctacatcaccgtggccaccgtcatcgggtacaagcaccagacggacgcgacggcgtcgggccccgacgcggcgtgcggcggcgtcggcatcctcggcatcgcctggtccttcggcggcatgatcttcatcctcgtctactgcaccgccggcatctcaggtgggcacatcaacccggccgtgaccttcggtttgttcctggcgaggaaggtgtccctggtccgcgcgctgctctacatcatcgcgcagtgcctgggcgccatctgcggcgtggggctcgtcaagggcttccagagcgcctactacgtgcgctacggcggcggcgccaacgagctcagcgacggctactccaagggcaccggcctcgccgccgagatcatcggcaccttcgtgctcgtctacaccgtcttctctgccaccgaccccaagcgcaatgcccgtgactcccacgtcccggtgttggctcctctcccaattgggttcgccgtgttcatggtgcacctggccaccatccccatcaccggcaccggcatcaacccggcgaggagcctgggagccgccgtcatctacaacaacgacaaggcctgggacgaccaatggatcttctgggtgggcccactgatcggcgccgccatcgccgccgcctaccaccagtacgtgctgagagccagcgcctccaagctcgggtcgtcctaccggagcaacgcctga

SEQ ID NO: 494 - protein, 289 aa, Sorghum bicolor
MAKDIEASGPEAGEFSAKDYTDPPPAPLIDAAELTQWSLYRAVIAEFIATLLFLYITVATVIGYKHQTDATASGPDAACGGVGILGIAWSFGGMIFILVYCTAGISGGHINPAVTFGLFLARKVSLVRALLYIIAQCLGAICGVGLVKGFQSAYYVRYGGGANELSDGYSKGTGLAAEIIGTFVLVYTVFSATDPKRNARDSHVPVLAPLPIGFAVFMVHLATIPITGTGINPARSLGAAVIYNNDKAWDDQWIFWVGPLIGAAIAAAYHQYVLRASASKLGSSYRSNA

SEQ ID NO: 495 - DNA, 936 bp, Sorghum bicolor
atggggctcggggaggcggcgcggcggctcctggcggccgtggactgggagcgcgaggcctacccggcgtacggcgacttcctcgctctccccgccttcgttctcttcttccctaccgtccgcttcctcctcgaccgcttcgtcttcgagtgggttgcgaggaggcttatacatgggaatggacatcagagagctaataacgaaacagaagaagcaaggaagaagataagaaaattcaaggaatcagcttggaaatgtgtttatttcctgtctggagaacttttatctttgtcagtcacatataacgagccttggttcaccaataccagatatttttgggtaggaccaggagaacaggtctggcctgatcaaaagataaaattgaaacttaaggctgtatatatgtatgctgctggattctacacatattccatatttgcacttatgttttgggaaacaaggcgttcagactttggagtgtcaatgtcacatcatgttgctactgttgttctgattgttctatcttatgtgttcagatttgctagagttggttctatagtattggcaattcatgatgcaagcgatgttttcctggaagtagggaagatgtccaagtacagccattgtgattggcttgccaatgtttcgtttctgttttttgtgatttcatgggttcttctccgcctcacatattttccgttctggattctgagaagtacaagctatgaggtcttgttgactttggacaaaaagaagcacaattttgatggtcctatatactattatgtgttcaattcccttctattttcactacttgttctccacatatattggtgggttttaatatatcggatgcttgtgagacaaatcatgacaagaaatgttggagatgatgtgcgatctgattcagaaggagaagacgaccatgaagattga

SEQ ID NO: 496 - protein, 311 aa, Sorghum bicolor
MGLGEAARRLLAAVDWEREAYPAYGDFLALPAFVLFFPTVRFLLDRFVFEWVARRLIHGNGHQRANNETEEARKKIRKFKESAWKCVYFLSGELLSLSVTYNEPWFTNTRYFWVGPGEQVWPDQKIKLKLKAVYMYAAGFYTYSIFALMFWETRRSDFGVSMSHHVATVVLIVLSYVFRFARVGSIVLAIHDASDVFLEVGKMSKYSHCDWLANVSFLFFVISWVLLRLTYFPFWILRSTSYEVLLTLDKKKHNFDGPIYYYVFNSLLFSLLVLHIYWWVLIYRMLVRQIMTRNVGDDVRSDSEGEDDHED

SEQ ID NO: 497 - DNA, 750 bp, Sorghum bicolor; identical to SEQ ID NO: 481

SEQ ID NO: 498 - protein, 249 aa, Sorghum bicolor; identical to SEQ ID NO: 482

SEQ ID NO: 499 - DNA, 705 bp, Sorghum bicolor
atggcgtggcgtggcccgctcggagccggagacgccggggacagcggcctcgagctcagcctcggcctcccggcctacttcgccaagccatcatcaggtttggacgtcgccgccggcgaggagtccggtgaggcctctgctttcgctcaccaggctgccaatgggagcaatggctccaaagcaagggtcaggccagcacccgcggcgccggtggttgggtggccgccggtgcggtcgttccggaggaacctggcctcgtcctcctcctcaaggccgtcgccgccgtcgtcgtcgggtcaccacaaggttcaggacggcggcgcgcacaagggcggactgttcgtgaagatcaacatggacggcgtgccgatcgggcggaaagtggacctcaccgcgtacggcggctacgccgacctctccgccgccgtcggcaagctcttccgcggcctgctcgccgctcagagggacccggccgcgacggcgggtggcgaggcggcggcggaggaggaggtgcaggagccggtgatcggcggcgactacacgctggtgtacgaggacgacgagggagacagggtccttgtcggcgacgtcccctgggagatgttcgtggccaccgccaagaggctgcgcgtgctcaagagctccgacgtgccggcatcgtcgctgagagcagggggcaggaagagggctgcagccgattgctga

SEQ ID NO: 500 - protein, 234 aa, Sorghum bicolor
MAWRGPLGAGDAGDSGLELSLGLPAYFAKPSSGLDVAAGEESGEASAFAHQAANGSNGSKARVRPAPAAPVVGWPPVRSFRRNLASSSSSRPSPPSSSGHHKVQDGGAHKGGLFVKINMDGVPIGRKVDLTAYGGYADLSAAVGKLFRGLLAAQRDPAATAGGEAAAEEEVQEPVIGGDYTLVYEDDEGDRVLVGDVPWEMFVATAKRLRVLKSSDVPASSLRAGGRKRAAADC

SEQ ID NO: 501 - DNA, 1746 bp, Sorghum bicolor
atgggagaggtcgcggacatgtacacccaagacgggacggtggacaggaaggggaatcccgccctgaagaaggacaccggcaactggagggcatgcccctacatcctcgcgaacgagtgctgcgagaggctggcctactatggcatgagcaccaaccttgttcactacatgaagacccggcttggccaggtgaacagcgtcgcctccaacaacgtcaccaactggtcagggacgtgctacatcacgccactcatcggcgccttcttcgccgacgcgtacctggggaggttctggaccatcgccagcttcatggtcatctacattttcggactggcgctgctgacgatggcgtcgtcggtgaaggggctggtgcctacgtcgtgtgacaatgacggcgtgtgccacccgacggacgcgcagtcggcggtggtgttcgtggcgctgtacctgatcgcgctgggaacgggcgggatcaagccctgcgtgtcctccttcggcgccgaccagttcgacgagaacgacgagcgggagaagaagagcaagagctccttcttcaactggttctacttctccatcaacatcggcgcgctggtggcgtccacggtgctggtgtacgtgcagacgcacatcggctggggctggggcttcggcatccccgccgtggtcatggccatcgccgtcgtcagcttcttcgtgggcacgccgctgtacaggcaccagaagcccggtggcagcccgctgacgcgcatcgcgcaggtgctcgtcgcgtgcgcgcgcaagtggaacgtggccgtgcccgccgacaagtcgcgcctccacgagacgctggacaaggagtccggcatcgagggcagccgcaagctggagcacacggaccagctcgcgtgcctcgacagggctgccgtcgtgacggccgaggacagcgccgcgggggcggcgacggcgacgagcccgtggcgcctgtgcacggtgacgcaggtggaggagctcaagagcgtgatccggctgctccccatctgggcgagcgggatcgtgttcgcggcggtgtactcgcagatgagcaccatgttcatcctccagggcgacacgctggaccagcgcatggggtccaagttcaagatcccctcggcgacgctctccatggtggacaccatcagcgtcatcttctgggtgcccgtctacgaccgcgtcatcgtgcccgtcgtgcgctcctacaccggccgtccccgagggttcacgcagctgcagcggatgggcatcggcctcgtcgtctccatcttctccatggtggcggcgggcgtgctggacatcgtgcggctgaacgccgtggcgcggcacggcctgtacggcaaggacgaccacgtgcccatctccatcttctggcagataccgcagtacttcatcatcgggtgcgcggaggtgttcaccttcgtggggcagctggagttcttctacgaccaggcgcccgacgccatgaggagcatgtgctccgcgctgtcgctcaccaccgtcgcgctcggcaactacctcagcacggtgctggtgaccatcgtcacgcacatcaccaccaggaacggcaacatcgggtggatcccggagaacctcaaccggggccacctcgactacttcttctggctgctcgccgtgctcagcctcctcaacttcctcgtctacctcgtcatcgccacctggtacaagtacaagaagacggccgatgatatcccggacgccaaaggggagcactga

SEQ ID NO: 502 - protein, 581 aa, Sorghum bicolor
MGEVADMYTQDGTVDRKGNPALKKDTGNWRACPYILANECCERLAYYGMSTNLVHYMKTRLGQVNSVASNNVTNWSGTCYITPLIGAFFADAYLGRFWTIASFMVIYIFGLALLTMASSVKGLVPTSCDNDGVCHPTDAQSAVVFVALYLIALGTGGIKPCVSSFGADQFDENDEREKKSKSSFFNWFYFSINIGALVASTVLVYVQTHIGWGWGFGIPAVVMAIAVVSFFVGTPLYRHQKPGGSPLTRIAQVLVACARKWNVAVPADKSRLHETLDKESGIEGSRKLEHTDQLACLDRAAVVTAEDSAAGAATATSPWRLCTVTQVEELKSVIRLLPIWASGIVFAAVYSQMSTMFILQGDTLDQRMGSKFKIPSATLSMVDTISVIFWVPVYDRVIVPVVRSYTGRPRGFTQLQRMGIGLVVSIFSMVAAGVLDIVRLNAVARHGLYGKDDHVPISIFWQIPQYFIIGCAEVFTFVGQLEFFYDQAPDAMRSMCSALSLTTVALGNYLSTVLVTIVTHITTRNGNIGWIPENLNRGHLDYFFWLLAVLSLLNFLVYLVIATWYKYKKTADDIPDAKGEH

SEQ ID NO: 503 - DNA, 1587 bp, Sorghum bicolor
atggcggcgccggcgccgaagcaggaggagctgcagccgcacgccgtcagggaccagctgccctccgtatcctactgcctcaccagcccgcccccatggccggaggccgtactcctcggcttccagcactacctcgtcatgctcggcaccaccgtcatcatccccaccgcgctcgtcccccagatgggcggcggcaatgagaaggcgcgggtggtgcagacgctgctgttcgtggccgggatcaacacgctgatccagagcttcctcggcacgcgcctccccgccgtcatgggggcctcctacaccttcgtcgcgcccaccatctccatcatcctcgccggccgctacagcggcattgccgatccccacgagaaattcgtgcgcatcatgcggggcacgcaaggcgcgctcattgtggcctccaccctccaaatcatcatgggattcagtggcctttggcgcattgtcgtcaggctgctgagcccgctgtctgctgcccccttggtcgccctcgtcggattcgggctctatgaactggggtttccaagtgttgccaaatgtgtagagattggtcttccacagattttactgctggtggcactttctcagtacataccacatttggtccccttgctgagtactgcctttgagcggtttgctgtcataatgtccattaccctcatctggctttacgccttcttcctgacggttggcggtgcctataagaatgctgctccgaaaacccaattccattgccgcactgatcgatctggccttgttgggggtgctccatggataagtgtaccctatccatttcagtggggagcaccaacctttgatgctggtgaagcttttgctatgatggcagcttcttttgttgctcttgtagagtccaccggtgcatttattgccgtttcacggtatgccagtgcaacaccatgccctccttccatcatgagtcgtggcattgggtggcagggagttggcattttgctgagtggcttgtttggaacagctaatggaacctctgtatctgtcgaaaatgctgggctgctcggtttgtcacgcgttggtagtagacgcgttgtgcagatttctgctggatttatgatattcttctcaatccttgggaaatttggagctgtttttgcatcgattcctggcccaattatcgcagctatatactgtcttctctttgcatatgttggtatggcaggtgttgggttcctacagttctgcaacctgaatagcttccgaacaaagttcatcctaggattttctttgtttatgggtctgtcggtgccacagtatttcaatgaatacacttccgtcgcaggctttggtccagtgcacacgcatgcaagatggttcaatgatatgatcaatgtggtattctcctcgaaggcatttgttgccggggctgtggcgtattttctggacaacaccctgcataggcgagacggcaccgtgaggaaagaccgggggcaccatttctgggacaggttcaggtccttcaagactgacccgcgcagcgaggagttctactccctcccattcaacctcaacaagttcttcccatccttctga

SEQ ID NO: 504 - protein, 528 aa, Sorghum bicolor
MAAPAPKQEELQPHAVRDQLPSVSYCLTSPPPWPEAVLLGFQHYLVMLGTTVIIPTALVPQMGGGNEKARVVQTLLFVAGINTLIQSFLGTRLPAVMGASYTFVAPTISIILAGRYSGIADPHEKFVRIMRGTQGALIVASTLQIIMGFSGLWRIVVRLLSPLSAAPLVALVGFGLYELGFPSVAKCVEIGLPQILLLVALSQYIPHLVPLLSTAFERFAVIMSITLIWLYAFFLTVGGAYKNAAPKTQFHCRTDRSGLVGGAPWISVPYPFQWGAPTFDAGEAFAMMAASFVALVESTGAFIAVSRYASATPCPPSIMSRGIGWQGVGILLSGLFGTANGTSVSVENAGLLGLSRVGSRRVVQISAGFMIFFSILGKFGAVFASIPGPIIAAIYCLLFAYVGMAGVGFLQFCNLNSFRTKFILGFSLFMGLSVPQYFNEYTSVAGFGPVHTHARWFNDMINVVFSSKAFVAGAVAYFLDNTLHRRDGTVRKDRGHHFWDRFRSFKTDPRSEEFYSLPFNLNKFFPSF

SEQ ID NO: 505 - DNA, 1437 bp, Sorghum bicolor
atggcgaggaagccgctggactacgaggagctgaacgagaacgtcaagaaggtgcagtacgcggtgcgcggggagctctacctccgcgcctccgagctccagaaggagggcaagaagatcatcttcaccaacgtcggcaacccgcatgctctcggccagaaaccgctcaccttcgggcgccaggtggtggcgctgtgccaggctccgttcctcctcgatgatccccacgtcggcctcatgttcccggcggatgccatcgctagggccaagcactacctcgccatggctaagggcggtctaggtgcgtacagtgattcccgtggtatccctggaattaggaaggaagttgctgacttcatctacaagcgtgatggatatccgactgatccagaactcatttacctgacagacggtgccagcaaaggtgtgatgcaaatactgaacaccatcatcagaaacgagagggatgggatcttggtccctgttcctcaatacccactttattctgcttccattgccctatatggtggtgctctggtcccgtactacttggaagaagaggctaactggagccttgactttgtaaatatccgaaaaacagtggcagaggcacggtcgaagggaatcactgttcgagcaatggtgattataaatccaggaaatcccactggccaatgccttagtgaaccgaatataaaggaagttctgcaattttgctaccatgaaaacttagttctgcttgcagatgaagtgtatcagcagaacgtctttcaagatgagcgcccatttataagctcaagaaaggttatgttcgacatgggcccgccactaagcagggagcttcagcttgtttctttccacactgtgtccaaagggaactggggagagtgtggacaacgtggtggatactttgaaatgacaaatcttcctcccaagacagtagatgagatctacaaggttgcatcaatagcactgagtccaaatgttcctgggcaaatttttatgggagtaatggttaaccctccgaaacctggagatatctcataccccaagttcgccgctgaaagcaagtccgtccatgaatctttgaggaggagagcacgcatgatgacagatggtttcaacagttgccgaaatgtcgtgtgcaatttcacagaaggagctatgtactctttcccccaaataaggctgccaccaagagccattgaggcggcaaaaagagctggcaaagcagcagacgttttctactgtctaaagctcctggaggcaacaggaatttccactgttccgggctctggttttgggcaaaaggaaggggtgttccaccttcggacaactatccttccagctgaggaagacttccctgccatcatgtcgagcttcaagaagttcaacgactcattcatggagcaatacgagggctactccagaatgtga

SEQ ID NO: 506 - protein, 478 aa, Sorghum bicolor
MARKPLDYEELNENVKKVQYAVRGELYLRASELQKEGKKIIFTNVGNPHALGQKPLTFGRQVVALCQAPFLLDDPHVGLMFPADAIARAKHYLAMAKGGLGAYSDSRGIPGIRKEVADFIYKRDGYPTDPELIYLTDGASKGVMQILNTIIRNERDGILVPVPQYPLYSASIALYGGALVPYYLEEEANWSLDFVNIRKTVAEARSKGITVRAMVIINPGNPTGQCLSEPNIKEVLQFCYHENLVLLADEVYQQNVFQDERPFISSRKVMFDMGPPLSRELQLVSFHTVSKGNWGECGQRGGYFEMTNLPPKTVDEIYKVASIALSPNVPGQIFMGVMVNPPKPGDISYPKFAAESKSVHESLRRRARMMTDGFNSCRNVVCNFTEGAMYSFPQIRLPPRAIEAAKRAGKAADVFYCLKLLEATGISTVPGSGFGQKEGVFHLRTTILPAEEDFPAIMSSFKKFNDSFMEQYEGYSRM

SEQ ID NO: 507 - DNA, 1776 bp, Sorghum bicolor; identical to SEQ ID NO: 437

SEQ ID NO: 508 - protein, 591 aa, Sorghum bicolor; identical to SEQ ID NO: 438

SEQ ID NO: 509 - DNA, 702 bp, Sorghum bicolor
atggccctgcaggtgcaggcccagtcgtctctcctcggccggttcgcggccatcacggccgggtgcagcgaggtggagccgtgggcggccgtcgtctgcgggttcgtgtccgcgtgggtgctcatcagcgccaacgcgctcgccgcgcgcctcaagttcgacgacccgctggaggcggcgcagctgcacggcgggtgcggcgcctggggcgtcctcttcacgggcctcttcgcgagccaaaagtacgtggagcagatctacggctccgggaggccctacgggctgttcatgggcagcggcgggaagctcctcgccgcgcagatcatccagatcctggtgatcgccgggtggaagctggacctgctgtgcatctcggccgacgacgagatgtccggcatggacctcaccaggcacggaggtttcgcctacatctaccacgacgaggacccaagcgacaaggccgggggttggtgggttcatgctcaagtccgcgcagcaccgtgtcgagccgccggcggcgacagcgaccagcaaccaggtgtaaaaatcagaagcaaattaaaacctatcgagctgaagttacgtgcttgcctttttcagtgtgtcatcgcgtattcatatttgattttgatctcgatcatatctgccggtactgtttgggcaatacttcgccactcttcggagtcgcaagaatttgtgtaa

SEQ ID NO: 510 - protein, 233 aa, Sorghum bicolor
MALQVQAQSSLLGRFAAITAGCSEVEPWAAVVCGFVSAWVLISANALAARLKFDDPLEAAQLHGGCGAWGVLFTGLFASQKYVEQIYGSGRPYGLFMGSGGKLLAAQIIQILVIAGWKLDLLCISADDEMSGMDLTRHGGFAYIYHDEDPSDKAGGWWVHAQVRAAPCRAAGGDSDQQPGVKIRSKLKPIELKLRACLFQCVIAYSYLILISIISAGTVWAILRHSSESQEFV

SEQ ID NO: 511 - DNA, 1701 bp, Sorghum bicolor
atggctctacttcttgcttctgccatgaatcacactgctcatccagcagaacttagaagccatctaggacgacccaataatgagagtttctcacggcaccacctttgttcttcaccacaaaacatcagtaagcgaaggtctaaccttagctttaggccacgagctcaaacgataagcagtgagcctggaatccacatgctgagcccctgggaaatccctaggagggactggttcccccctagctttctcttcggtgctgccactgcatcataccaaattgaaggtgcttggaatgaagatgggaaggggccaagcacatgggatcacttctgccacaattttccggaatggatagtggacaggagcaatggggatgttgcagcggattcgtaccatatgtacgctgaggatgtcaggttgctgaaggaaatgggcatggacgcctataggttctccatctcttggcccagaatactgccaaaggggacgctcgctggaggtattaacgagaaaggcgtcgagtactacaacaagttgatcgacttgttgctagagaacggcatggagccatatataacaattttccactgggacgcgcctcaagcgctggtagacacgtatggcggcttcttagatgagaggattataaaagattacacagacttcgctaaagtgtgctttgaaaagtttggtaagaaggtgaaaaactggttcacctttaatgagccggagacattttgttctgtttcctatggaactggagtccttgcccctgggcggtgctcaccaggagtaagttgtgccgttccaactggaaactcactcaccgagccatacattgttgcccacaaccttctccgagctcatgctgagactgttgatctttacaacaagtatcacaagggtgcggacggccgtatagggcttgctttaaatgtatttggtcgtgtgccatacacaaatacgtttctcgatcaacaggcccaagaaatgtccatggacaaatgcctaggatggttcttggagccagtgcttcgtggtgactaccccttctccatgagagtgtcggcgagggatcggctgccctacttcaaagaaaaagagcaagagaagctagttggttcttacgatatgatcgggataaactactacacctcaacgttctccaagcacaacgacatctcagcaaactactcgccagtgctcaacactgacgatgcctatgccagtcaaaaaacccaagggcctgacgggaatgctattggtcctcctactggaaatgcgtggatcaatatgtaccctaaaggcctacatgatatccttatgaccatgaagaacaagtatggaaacccacccatatacatcactgagaacgggataggggacattgacaagggcgatctacccaaagcagttgcgttggaagaccacacaaggctagattacatccagcgccacctctcagttcttaaacaatcgatagacttgggagcagacgtgcgcggctacttcgcgtggtctctgctggacaacttcgaatggtccagcggctacaccgagcgttacggcatcgtctacctcgatcgtgagaatggctgcgagcgaaccatgaagcgatcagccaggtggttccaggagttcaatggagctgccaagaaggttgaaaataacaagattcttacgccggccggccagcttaac

SEQ ID NO: 512 - protein, 567 aa, Sorghum bicolor
MALLLASAMNHTAHPAELRSHLGRPNNESFSRHHLCSSPQNISKRRSNLSFRPRAQTISSEPGIHMLSPWEIPRRDWFPPSFLFGAATASYQIEGAWNEDGKGPSTWDHFCHNFPEWIVDRSNGDVAADSYHMYAEDVRLLKEMGMDAYRFSISWPRILPKGTLAGGINEKGVEYYNKLIDLLLENGMEPYITIFHWDAPQALVDTYGGFLDERIIKDYTDFAKVCFEKFGKKVKNWFTFNEPETFCSVSYGTGVLAPGRCSPGVSCAVPTGNSLTEPYIVAHNLLRAHAETVDLYNKYHKGADGRIGLALNVFGRVPYTNTFLDQQAQEMSMDKCLGWFLEPVLRGDYPFSMRVSARDRLPYFKEKEQEKLVGSYDMIGINYYTSTFSKHNDISANYSPVLNTDDAYASQKTQGPDGNAIGPPTGNAWINMYPKGLHDILMTMKNKYGNPPIYITENGIGDIDKGDLPKAVALEDHTRLDYIQRHLSVLKQSIDLGADVRGYFAWSLLDNFEWSSGYTERYGIVYLDRENGCERTMKRSARWFQEFNGAAKKVENNKILTPAGQLN

SEQ ID NO: 513 - DNA, 801 bp, Sorghum bicolor
atgagcaccggcgcgcggccggggcggcggttcacggtgggccggagcgaggacgccacgcacccggacaccatccgcgccgccatctccgagttcatcgccaccgccatcttcgtcttcgccgccgagggctccgtcctctcgctcgggaagatgtactaccacgacacggcgagcacggcgagcgggctggtgacggtggcgctggcgcacgcgctggcactggccgtggcggtggcggtggccgtcaacgtctcgggcgggcacgtgaacccggccgtcacgttcggcgcgctggtcggcggccggatctcgctcgtccgcgcggtcttctactgggtggcgcagctgctgggcgccgtggccgccacgctcctcctccgcctcgccacgggcggcgcccgcccgcccgggttcgcgctggcgtccggggtcggcgactggcacgccgtgctgctggaggccgccatgacgttcggcctcatgtacgcctactacgccaccgtggtcgacccgaagcgcggccacgtcggcaccatcgcgccgctcgccgtggggttcatgctcggcgccaacgtgctggccggagggccgttcgacggcgccgggatgaacccggcgcgggtcttcggccccgcgctcgtcgggtggcggtggaggcaccactgggtgtactggctcggacccttcctcggcgccgggctcgccgggctggtgtacgagtacctggtcatcccgtccgccgacgctgcgccgccgcacagcacgcaccaccagccgctcgcgccggaggactactag

SEQ ID NO: 514 - protein, 266 aa, Sorghum bicolor
MSTGARPGRRFTVGRSEDATHPDTIRAAISEFIATAIFVFAAEGSVLSLGKMYYHDTASTASGLVTVALAHALALAVAVAVAVNVSGGHVNPAVTFGALVGGRISLVRAVFYWVAQLLGAVAATLLLRLATGGARPPGFALASGVGDWHAVLLEAAMTFGLMYAYYATVVDPKRGHVGTIAPLAVGFMLGANVLAGGPFDGAGMNPARVFGPALVGWRWRHHWVYWLGPFLGAGLAGLVYEYLVIPSADAAPPHSTHHQPLAPEDY

SEQ ID NO: 515 - DNA, 2181 bp, Sorghum bicolor; identical to SEQ ID NO: 319

SEQ ID NO: 516 - protein, 726 aa, Sorghum bicolor; identical to SEQ ID NO: 320

SEQ ID NO: 517 - DNA, 432 bp, Sorghum bicolor
atggaagccaagaacggctacagctacagcccgctcgccggggacgaccacgaggcggcggcggcggcggcggaggtgatcagcaccaccggcgccggttttggaggcgacgacgtcaagctcaggctgctcggatacaagcagcagctcaagcgagacctctcggtggtggccaacttctcggtgagcttctccatcatctcggtgatcacgggcgtgacgacgctgtacgggacgggcctccagttcggcgggccggtgaccatggtgtacggctggcccatcgccggcgccttcaccgtcgccgtgggcctcgccatggccgagatctgctccgcctaccccacctccggcggcctctacttctggagcgccaggctctgcacccaccgccgatggggacccttcgccgcctggctcaccggctggtaa

SEQ ID NO: 518 - protein, 143 aa, Sorghum bicolor
MEAKNGYSYSPLAGDDHEAAAAAAEVISTTGAGFGGDDVKLRLLGYKQQLKRDLSVVANFSVSFSIISVITGVTTLYGTGLQFGGPVTMVYGWPIAGAFTVAVGLAMAEICSAYPTSGGLYFWSARLCTHRRWGPFAAWLTGW

SEQ ID NO: 519 - DNA, 2130 bp, Sorghum bicolor; identical to SEQ ID NO: 335

SEQ ID NO: 520 - protein, 709 aa, Sorghum bicolor; identical to SEQ ID NO: 336

SEQ ID NO: 521 - DNA, 348 bp, Sorghum bicolor
atgtcgacggtgagccgtgcatcccttgaccagaagcttgccctcgccaagcgatgctcgcgagaggcgacccttgccggagccaaggcggcagctgtggcaactattgcctccgcgattcctactctagcgagtgtgaggatgctgccatgggcgaaggccaacatcaaccccaccggccaggccctcatcatctcaacggttgccgggatggcctacttcatcgccgccgacaagaagatcctgtcgctggcgaggcggcactcgtttgaggaagctcctgaacatctcaggaacacctccttccagggcacaggtcgcccgcacccggctttcttcaggccatga

SEQ ID NO: 522 - protein, 115 aa, Sorghum bicolor
MSTVSRASLDQKLALAKRCSREATLAGAKAAAVATIASAIPTLASVRMLPWAKANINPTGQALIISTVAGMAYFIAADKKILSLARRHSFEEAPEHLRNTSFQGTGRPHPAFFRP

SEQ ID NO: 523 - DNA, 1236 bp, Sorghum bicolor
atgaacgcgctcgccgccaccagccgcaacttccggcgggcctcgaagctgctcggcctcgactccaagctcgagcagagtctgctcatcccgttccgggagatcaaggtggaatgcaccatccccaaagacgacggcaccttggcgtcgttcgtcggcttccgcgtgcagcatgacaacgcccgcgggccgatgaaaggcggcatccgctaccatcctgaggttgatccagatgaagtaaacgcccttgctcaactcatgacatggaagacagctgttgcagcagttccatatggtggagcaaagggagggatcggatgctctcctggtgaactaagtagaagtgagttggagcggttgacgcgagtatttacccagaaaattcatgatcttatcggaacgcatacagatgtcccagctcctgacatggggaccaatgcacagaccatggcatggatgttggatgagtactcgaaatttcatggtcactcaccagcagtcgtcacaggcaagccaattgatcttggtggatcactgggtagggatgcagcaacagggcgaggtgtcatgtatgcgaccgaggctctacttgctgaatatggaaaatgtatttctggatcaacttttgtgattcaaggttttggcaatgttggctcatgggctgcacgacttatccatgagaaaggtggtaagattattgcaattggagatgtgacgggttcaatcaaaaacatgtcgggtatagacatacctgctttgatgaagcataagaatgaaggtcatgccatgaaagactttcatggtgcagaagtcatggattcgactgagttgctagtgcacgaatgtgatgttcttgtcccttgtgccttaggtggagttcttaacaaggataatgcaccaagcgtgaaggccaaatttatagttgaagctgctaaccatccaactgatccagaggcagacgagattctcgccaagaagggagtggtcgtattacctgatatctatgctaattcaggtggtgtgatcgttagctactttgagtgggttcagaacattcaaggtttcatgtgggatgaagagaaagtgaacaatgaactagagaagtacatgagcagtgcttttcaacacatcaaggccatgtgcaagagtctggattgcaaccttaggatgggggcattcaccttaggagttaacagggttgcccgtgccaccctcttgagaggctgggaggcatga

SEQ ID NO: 524 - protein, 411 aa, Sorghum bicolor
MNALAATSRNFRRASKLLGLDSKLEQSLLIPFREIKVECTIPKDDGTLASFVGFRVQHDNARGPMKGGIRYHPEVDPDEVNALAQLMTWKTAVAAVPYGGAKGGIGCSPGELSRSELERLTRVFTQKIHDLIGTHTDVPAPDMGTNAQTMAWMLDEYSKFHGHSPAVVTGKPIDLGGSLGRDAATGRGVMYATEALLAEYGKCISGSTFVIQGFGNVGSWAARLIHEKGGKIIAIGDVTGSIKNMSGIDIPALMKHKNEGHAMKDFHGAEVMDSTELLVHECDVLVPCALGGVLNKDNAPSVKAKFIVEAANHPTDPEADEILAKKGVVVLPDIYANSGGVIVSYFEWVQNIQGFMWDEEKVNNELEKYMSSAFQHIKAMCKSLDCNLRMGAFTLGVNRVARATLLRGWEA

SEQ ID NO: 525 - DNA, 1236 bp, Sorghum bicolor; identical to SEQ ID NO: 523

SEQ ID NO: 526 - protein, 411 aa, Sorghum bicolor; identical to SEQ ID NO: 524

SEQ ID NO: 527 - DNA, 2130 bp, Sorghum bicolor; identical to SEQ ID NO: 335

SEQ ID NO: 528 - protein, 709 aa, Sorghum bicolor; identical to SEQ ID NO: 336

SEQ ID NO: 529 - DNA, 894 bp, Sorghum bicolor; identical to SEQ ID NO: 385

SEQ ID NO: 530 - protein, 297 aa, Sorghum bicolor; identical to SEQ ID NO: 386

SEQ ID NO: 531 - DNA, 888 bp, Sorghum bicolor
atggctgcctccaccgcgtccaggaccaactcccgggtgaactactcgaacgagatccacgacctgtccaccgtgcagagcggctccgctgtccctaccttgttctaccctgacaaatccatcgccgacatcttcccgccgcacctcgggaagaaggtgatctcggaggtggtggcgacgttcctgctggtgttcgtgacctgcggggcggcgtccatctacggcgaggacaacaagcgcatctcgcagctggggcagtcggtggccggagggctcatcgtcaccgtcatgatctacgccaccggacacatctccggcgcgcacatgaacccagccgtcacgctctccttcgcatgcttccggcatttcccctggattcaggtgccgttctactgggcggcgcagttcacgggggcgatgtgcgcggcgttcgtgctcaaggcggtgctccaccccatcgccgtcatcggcaccaccacgccgtcgggaccgcactggcacgccctcgtcatcgagatcgtcgtcaccttcaacatgatgttcgtcacctgcgccgtcgccacggactccagggcggtgggtgagttggccgggttagcagtcggttccgcggtttgcattacgtccatcttcgcagggcctgtgtccggcggatcgatgaacccggcgaggacgctcgcgccggcggtggccagcaacgtcttcacgggactctggatctactttctcggccccgtcatcggcactctctctggagcctgggtctacacctacatccgcttcgaggaggcacccgctgccaaggacacacagcggctctcctccttcaagctccgccgcttgcagagccagtccgcgctcgccgccgacgagttcgacaccgtctaa

SEQ ID NO: 532 - protein, 295 aa, Sorghum bicolor
MAASTASRTNSRVNYSNEIHDLSTVQSGSAVPTLFYPDKSIADIFPPHLGKKVISEVVATFLLVFVTCGAASIYGEDNKRISQLGQSVAGGLIVTVMIYATGHISGAHMNPAVTLSFACFRHFPWIQVPFYWAAQFTGAMCAAFVLKAVLHPIAVIGTTTPSGPHWHALVIEIVVTFNMMFVTCAVATDSRAVGELAGLAVGSAVCITSIFAGPVSGGSMNPARTLAPAVASNVFTGLWIYFLGPVIGTLSGAWVYTYIRFEEAPAAKDTQRLSSFKLRRLQSQSALAADEFDTV

SEQ ID NO: 533 - DNA, 486 bp, Sorghum bicolor
atggactcgtcggagctaaggaaggtgttccaaatgttcgacaagaacggcgacggccagatcaccaagaaggagctcggcgagtcgctcaagaacctcggcatcttcatcgccgacgaggagctcgatgccacgatggacaagatcgacgttaatggcgatggttgcgtggacgtcgaggagttcggcaggctctaccgctccatcgtcgaggacggcccagtggccgacgccgacggcgacaagcacgatgaggatgaggacatgcgggaggcgttcaacgtcttcgaccagaacggcgacgggtacatcaccgtcgacgagctgcggtccgtgctggccagccttggcctcaagcaggggcgcacggccgaggactgccgtaagatgatcagcaaggtcgacgccgacggcgacgggcgcgtcgacttcacggagttcaagcagatgatgcgcggcggcgggttcgctgcactaggtagatga

SEQ ID NO: 534 - protein, 161 aa, Sorghum bicolor
MDSSELRKVFQMFDKNGDGQITKKELGESLKNLGIFIADEELDATMDKIDVNGDGCVDVEEFGRLYRSIVEDGPVADADGDKHDEDEDMREAFNVFDQNGDGYITVDELRSVLASLGLKQGRTAEDCRKMISKVDADGDGRVDFTEFKQMMRGGGFAALGR

SEQ ID NO: 535 - DNA, 1539 bp, Sorghum bicolor
atgtcggtgacgagcggcggccacggcgaagaagaagcagacgaccttctgaaggaggcgctgttggctgccggcaatggcagcggcagcgacggtggcatcgacggcgaggaggacctggaggagatccggagcgtggggtcgttcctgcggcacgcggcggaggagaaccggaagctctggtacctggccggccccgccatcctcacgtccatcgcgcagtactcgctcggcgccatcacccaggtgttcgccggccacctcaccacgctcgagctcgacgccatctccaccgagaacaacgtcgtcgccggcctcgccttcggcatcatgctggggatggggagcgcgctggagacgctgtgcgggcaggcgtacggcgcgaagcagctgcccatgctgggcgtgtacctgcagcggtcgtggatcatcctcaccgccatggccgtgctcatgctcccgctctacctcttcgccaccccgatcctgcgcctcttccaccaggacgccgagatcgccgacctcgccggccgcctcgcgctctacatgatcccgcagctcttcgcctacgccttcaacttccccatccagaagttcctgcaggcgcagagcaaggtgatggccatggccgccgtctccgcggccgcgctggcgttccacgtcgcgctcagctggttcctcgtcgggcccatgcggatggggctcgtcggcctcgccgtcgcgctcaacgcgtcctggtggctcgtcgtgctgggccagctcgcctacatcctcatgggctactgccccggcgcatggaacggattcgactgcctcgccttctccgacctcgtcggcttcgcgcgcctctccctcggctccgccgtcatgctctgcctggaattctggttctacatgttcctgatcgtcatcgtcggcaacctggagaacgctcaggtcgccgttgccgcagtctccatctgcacgaacctgttcgggtggcagatcatggtgttcttcggattcaacgctgccatcagcgtgcgggtgtcgaacgagctgggcgccgggcgtccccgtgcggccaagttggcgatcctggtggtgctcatgtcgtcggtggccatcgggctggccttcttcgtcctcgtcctggccttccgcgacgtctacggcgcgccgttcacggacagccccgaggtggtgcgcgccgtggccagcctgggcgtcgtcttcgccttctcgctgctgctcaacagcgtgcagccggtgctgtcgggcgtcgccgtcggcgccggctggcagtggctggtggcgtacatcaacctcggctgctactacctcgtcggcatccccgtcgggtacatgatcgccttcccgctgcgcggcggggtgcaggggatgtggggtggcatgctcactggcgtcggcctgcagacgctcatcctggtcgccatcacgctgcgcaccaactgggacaaggaagccggcgaggcgcattccaggatacagaaatggggtggatcgtcggcggcggctaggggcgaaggtacactgtag

SEQ ID NO: 536 - protein, 512 aa, Sorghum bicolor
MSVTSGGHGEEEADDLLKEALLAAGNGSGSDGGIDGEEDLEEIRSVGSFLRHAAEENRKLWYLAGPAILTSIAQYSLGAITQVFAGHLTTLELDAISTENNVVAGLAFGIMLGMGSALETLCGQAYGAKQLPMLGVYLQRSWIILTAMAVLMLPLYLFATPILRLFHQDAEIADLAGRLALYMIPQLFAYAFNFPIQKFLQAQSKVMAMAAVSAAALAFHVALSWFLVGPMRMGLVGLAVALNASWWLVVLGQLAYILMGYCPGAWNGFDCLAFSDLVGFARLSLGSAVMLCLEFWFYMFLIVIVGNLENAQVAVAAVSICTNLFGWQIMVFFGFNAAISVRVSNELGAGRPRAAKLAILVVLMSSVAIGLAFFVLVLAFRDVYGAPFTDSPEVVRAVASLGVVFAFSLLLNSVQPVLSGVAVGAGWQWLVAYINLGCYYLVGIPVGYMIAFPLRGGVQGMWGGMLTGVGLQTLILVAITLRTNWDKEAGEAHSRIQKWGGSSAAARGEGTL

SEQ ID NO: 537 - DNA, 1677 bp, Sorghum bicolor
atggtgatcacccctcaaagaaagagcgccgaacgcaatcccggcagcttcgaacacgatgacagtgatgatgacttcggagctgaatccaccgcctctaagccgtctgcgcattcgcgcgacagcaacaaatccaacaagcccaagacgagccatggcggttcaacctacgcggcgacgacgacgacgacgacgccgatgccgccccaaagtagctccgaaccgacaggtggcgtcaccgcaggagcgacggcgggcaataataatgctgactccaccagcgtggacagcggcgggccgaggagcagcagcatggagagcagcagcagcggcacggccgcctcaggcacgacgccggccaacgtccggcgccacaccggcggcgacagccggtgggacgccatccagctggccacgtcccaggaagcgcagctgaacctgggccacttccggctgctcaagcgcctgggctacggcgacatcggcagcgtgtacctggtggagctccgcgccacgccggcggccttcttcgccatgaaggtgatggacaaggcgtccatcatcagccggaacaagatggcccgcgcgcagacggagcgcgagatcctcggcctcctggaccaccctttcctccccacgctctacacgcacttcgagaccgacaagttctactgcctcgtcatggagtactgcagcggcggcaacctccactcgctccgccagaagcagcccggcaagcacttcaccgagcccgccgccaggttctacgtcgccgaggtgctgctggccatggagtacctgcacatgctggggatcgtgtacagggacctcaagccggagaacgtgctggtccgggaggacggccacatcatgctctccgatttcgacctgtcgctgcgctgcaccgtgtgcccgacgctggtcaagtcgtcgtcggtgcactccaccgggagcggcggcggcagcggcggcagcagcgtcggcagaggagtggacgtcgcggacggcgacgtcatcaccgccaaccagggtggctgcatccagccctcgtccttcttcccgcgcatccttccccggcgcagccggaagccgtccaagagcgagctgggtctcagcggcccggccgcggtggagttcaacgcggagccgacggacgcgcgctccatgtcgttcgtcggcacgcacgagtacctggcgccggagatcatccgcggcgagggccacggcagcgcggtggactggtggacgctcggcatcttcctctacgagctgctgcacggctccacgcccttcaagggcgccggcaaccgcgccacgctgtgcaacgtcatcgagcagccgctgcgcttcccctccgacggcgcggccgggggcccggcggtcagctccgtcgccagggacctcatccgcggcctgctcgtcaaggacccacagaagcggatcgccttcaccagaggcgccacggagatcaagcagcacccgttcttcgaaggtgtcaactgggcgctggtcaggagcatgaccccgccgtcggtgccggacccggtcgacttccggcagtacggagccgccaaggagaagaaggcgtccgacagcagtacaacggctgccgtggaggcgccgccggccggaaagcaaaactccggcgagtcttacacggatttcgagtatttctag

SEQ ID NO: 538 - protein, 558 aa, Sorghum bicolor
MVITPQRKSAERNPGSFEHDDSDDDFGAESTASKPSAHSRDSNKSNKPKTSHGGSTYAATTTTTTPMPPQSSSEPTGGVTAGATAGNNNADSTSVDSGGPRSSSMESSSSGTAASGTTPANVRRHTGGDSRWDAIQLATSQEAQLNLGHFRLLKRLGYGDIGSVYLVELRATPAAFFAMKVMDKASIISRNKMARAQTEREILGLLDHPFLPTLYTHFETDKFYCLVMEYCSGGNLHSLRQKQPGKHFTEPAARFYVAEVLLAMEYLHMLGIVYRDLKPENVLVREDGHIMLSDFDLSLRCTVCPTLVKSSSVHSTGSGGGSGGSSVGRGVDVADGDVITANQGGCIQPSSFFPRILPRRSRKPSKSELGLSGPAAVEFNAEPTDARSMSFVGTHEYLAPEIIRGEGHGSAVDWWTLGIFLYELLHGSTPFKGAGNRATLCNVIEQPLRFPSDGAAGGPAVSSVARDLIRGLLVKDPQKRIAFTRGATEIKQHPFFEGVNWALVRSMTPPSVPDPVDFRQYGAAKEKKASDSSTTAAVEAPPAGKQNSGESYTDFEYF

SEQ ID NO: 539 - DNA, 903 bp, Arabidopsis thaliana
atgcctcctccggcaatgcttgcgtttgacgatggtttagcccggaaatctaacgataatgagtggcaaggtttcagagtttttccaggagaaaatactaaccctaaccctaatataaatttcttggttaagaaggcaattctgcagaacgagaaatcaatcactcctcttttctcccgttcgtcggcaagagatgatagcttcagaattgtgttgccgccggcgttgcctcctcctagagactccaccgttccgcttcctatgcttccggagccgatgagagtccggaagaagcttagccaccaagaatcagtcatatttatgagcaaatcgcgtttcgcagagaaaatcctctacaaggaagaagatttcaaatgtaacgccttctgcttgtctctacctggcttcggaaagaacaagctgattagatcttcttcgaaacgccaaaattctatggagaagaagatgatcagagcttcttccttcacgggatcaactgtttctgtacgcgcctcgctagagaaattcgaatgcggttcttgggcatcgacgacagctcttattcaagataacggtcggttgtttttcgattttccggttgagatgacgaagtgcaacagccgcggtggaaatggaggaagagatgtgcaagaaccggtgacctctggtttcttattcgatagagaaacagagactttggctctgagaagcgttttaaagacgaggagtactcgtgatcaccggagatcagctgagtcttcaccgcaacgtcgtgttaggttctcgacttcgtcttcatcggcttcagtttcgtgccctacttcgcctcgaacttgtatcactccacgtttgcgtaaggctagagatgacttcaacaccttcttgaccgcacaaaacgcttga

SEQ ID NO: 540 - protein, 300 aa, Arabidopsis thaliana
MPPPAMLAFDDGLARKSNDNEWQGFRVFPGENTNPNPNINFLVKKAILQNEKSITPLFSRSSARDDSFRIVLPPALPPPRDSTVPLPMLPEPMRVRKKLSHQESVIFMSKSRFAEKILYKEEDFKCNAFCLSLPGFGKNKLIRSSSKRQNSMEKKMIRASSFTGSTVSVRASLEKFECGSWASTTALIQDNGRLFFDFPVEMTKCNSRGGNGGRDVQEPVTSGFLFDRETETLALRSVLKTRSTRDHRRSAESSPQRRVRFSTSSSSASVSCPTSPRTCITPRLRKARDDFNTFLTAQNA

SEQ ID NO: 541 - DNA, 786 bp, Sorghum bicolor
atggcatcagcagagctttcccgtgaggaaaatgtgtacatggccaagctcgcggagcaggcagagaggtacgaggagatggttgagttcatggagaaggtagccaagactgttgactctgaggagctcactgtggaggagcgcaacctcctgtctgttgcatacaagaatgtcattggagcccgccgcgcctcatggcgcatcatctcctccattgagcagaaggaggagggccgtggcaatgaggaccgtgtaacactcatcaaggactaccgtggcaagattgagactgagctcaccaagatctgcgatggcatcctcaagctgctcgagtcccaccttgtgccctcttcaactgctcccgagtccaaggtcttctatctcaagatgaagggtgactactacagataccttgctgagttcaagactggagctgagagaaaggacgctgctgagaacaccatggtggcatacaaggctgcccaggacattgctttggctgagcttgctccaactcaccctattaggcttggactggcacttaacttctcagtgttctactatgagattctcaactcacctgatcgcgcctgcagtcttgcaaagcaggcttttgacgaggccatctcggaactggacaccctgagcgaggagtcctacaaggacagcactttgatcatgcagctcctccgtgataacttgaccctatggacttctgacatctcggaggaccctgctgaagagatcagggaggcacccaagcgtgactcgagcgaggggcagtaa

SEQ ID NO: 542 - protein, 261 aa, Sorghum bicolor
MASAELSREENVYMAKLAEQAERYEEMVEFMEKVAKTVDSEELTVEERNLLSVAYKNVIGARRASWRIISSIEQKEEGRGNEDRVTLIKDYRGKIETELTKICDGILKLLESHLVPSSTAPESKVFYLKMKGDYYRYLAEFKTGAERKDAAENTMVAYKAAQDIALAELAPTHPIRLGLALNFSVFYYEILNSPDRACSLAKQAFDEAISELDTLSEESYKDSTLIMQLLRDNLTLWTSDISEDPAEEIREAPKRDSSEGQ

SEQ ID NO: 543 - DNA, 2511 bp, Sorghum bicolor
atggtggcacggccttgtttactcctgcttgtccttaccgccgccactgtggtagtacttggagttcatggcgaggagtcgccgtctagcacaggaaagagcagctacgtggacagcgccaccaagctgccgtacgtctccgacgttggcttcaccgacgccggctccaaccgcaacatctccgccgagtacatcaacccgtccttcacgaagcgctacctcaatgtgcgcagcttcccggacgccgcgcgcagctgctacaccatcgggtccatggcaccggggtccaagtacatcttccgagccacgttcatgtacggcaactacgacgggctcagcaagcccccggtgttcgacctccacctcggcgtcaacttctggcagacggtgaacatcaccggccccgacgttccgttgatcgccgaggtcatcgccgtcgtcccagcggactcggtgcaggtttgcctcgtcaacactggcaccgggacgccgttcatctccgggctggacgtgaggccggtgaagagcacgctctactcgcaagtgaacgcgacgcaggcgctggtcctgctcgccaggcgcgactacgggccgagcgggttcgccgtgatcaggtaccccgacgacccatacgaccgcacgtggtttccgtggagcgacccggaggagtggtcggagatctcgacggcggagggcatgaggccggtcgtagttggcagccgattcgaggtgccgtccgccgtgatgcagactgccatcgtgcccctgctcaacgcctccgccaagagcatcgacttctcgtgggacgccgagcctagccacgtgtatcccgaccccggctacatttgtatgttgcacttcgcggagcttcaacgcctggacagcaacgccactcgtcagttcgacgtgatagtcaatggcattgcttggtatcacgcatacacgcccatgtaccttacatccgatacactgtacagcaataggctacaccatggttccaacagctacaacatctcattaaaagccacggcgaactcgacgctgccaccaattgtcaacgccgtcgagattttcaacgtcatctccatagccaacgtggccacagatgttcaggatgttgctgccattatggcaatcaaggccaattatcaggtgaagaaggactggatgggtgacccctgcgttcccaaggcactttcgtgggatggattgagctgcagctttgccatcttcagtcctccaagaatcgaatcactaaacctttcgttcagcggcttgagtggagatgtatcattttactttgccaaactcaaatcactcaagtattttgatttgacaggcaaccagctcaatggatccatcccgcctgggcttctcaaaagaattcaagatggctcgctatcactgaggtatggtaataacccaaatctctgcagcaacagcgattcttgtcagtccgcaaagaagaaaagcaactcaatgctagctgtctacattgctgttccagtagttgtgtttgtggtagtaggaacactagcactactgttcttcttcatgcgagtaaaaggcagtgtggagccgggcaacaacctgaatatcaagaaccgtaggttcacgtacaacgaagtgaaggccatgacgaaaaacttccaactggagctcggcaagggaagcttcggaaaagtctacaatggctccttgaaagatggtactcgtgtggcagtgaagctgctatctgaatgttccaggcaaggtgttggagagttcctggcagaggctgagaccttaacaaagattcaccacaagaatattgtctccttgatcggttactgcaaggatggtgggcacatggcgcttgtctacgagtacatgtcaggaggaaccctggaacacaaacttagagggagcgacgatggcagcactggatcattaacctggaagcagaggctgcgcattgcactggattccgcgcaagggcttgagtatcttcacaaatcgtgcaccaagcgactcatccatagggacgtgaagacgtcaaacatcctactgaatgacaaccttgaggctaagatcgccgattttggcctgctaaaggctttccatcgcgatgaggacacccatgtatccaggacaagggtggttggcacgctcggctactttgctcctgagtatgtggaagctcagcgtctcaccgagaagtgtgacgtgtacagcttcggcgtcgtgctgctggaggtgatcacagggaagccggcaatcctagagtgcccagaggccactaacatcaccatgtgggtgctgcagcgcctcaatcaacaaaacatcgaggatgtggttgatccacgcatacaagatgattatgatgtcaatgttgcatggaaggccgctgacatcgccctcaagtgtactgagcgtgctcccgaacaacggcccaccatgaccgacgtggtgactcagctgcaagagtgcctcatgctcgaggatggcggcggcggaagagacgccatatag

SEQ ID NO: 544 - protein, 836 aa, Sorghum bicolor
MVARPCLLLLVLTAATVVVLGVHGEESPSSTGKSSYVDSATKLPYVSDVGFTDAGSNRNISAEYINPSFTKRYLNVRSFPDAARSCYTIGSMAPGSKYIFRATFMYGNYDGLSKPPVFDLHLGVNFWQTVNITGPDVPLIAEVIAVVPADSVQVCLVNTGTGTPFISGLDVRPVKSTLYSQVNATQALVLLARRDYGPSGFAVIRYPDDPYDRTWFPWSDPEEWSEISTAEGMRPVVVGSRFEVPSAVMQTAIVPLLNASAKSIDFSWDAEPSHVYPDPGYICMLHFAELQRLDSNATRQFDVIVNGIAWYHAYTPMYLTSDTLYSNRLHHGSNSYNISLKATANSTLPPIVNAVEIFNVISIANVATDVQDVAAIMAIKANYQVKKDWMGDPCVPKALSWDGLSCSFAIFSPPRIESLNLSFSGLSGDVSFYFAKLKSLKYFDLTGNQLNGSIPPGLLKRIQDGSLSLRYGNNPNLCSNSDSCQSAKKKSNSMLAVYIAVPVVVFVVVGTLALLFFFMRVKGSVEPGNNLNIKNRRFTYNEVKAMTKNFQLELGKGSFGKVYNGSLKDGTRVAVKLLSECSRQGVGEFLAEAETLTKIHHKNIVSLIGYCKDGGHMALVYEYMSGGTLEHKLRGSDDGSTGSLTWKQRLRIALDSAQGLEYLHKSCTKRLIHRDVKTSNILLNDNLEAKIADFGLLKAFHRDEDTHVSRTRVVGTLGYFAPEYVEAQRLTEKCDVYSFGVVLLEVITGKPAILECPEATNITMWVLQRLNQQNIEDVVDPRIQDDYDVNVAWKAADIALKCTERAPEQRPTMTDVVTQLQECLMLEDGGGGRDAI

SEQ ID NO: 545 - DNA, 852 bp, Sorghum bicolor
atgatgggtggcaaggccgctctgctgctggccctggtggccgtgaccctggccgtcgtggagatccaggccgacgccggctacggctacggcggcggctacccgacgccgacgccgaagccgccggccaaggggcccaagccggagaagcccccgaccaagggccacggccacaagccggagaagccgcccaaggagcacaagccgactccgcccacctacaccccgagccccaagcccacgccgccgccggctactcccaagccgacgccgcccacctacacgccgagccctaagcccaagtcgccggtctaccctcccccgccgaaagccagtactcctccgacctacaccccgagccccaagcctccggcgaccaagccgcctacctacccgacccccaagccaccagctaccaagcctccgacacctcctgtgtacactccgagccccaaaccaccggttacaaagcctcctacacccaagccgaccccgccggtgtacacgccgaaccccaagccaccggttaccaagcctccgacacacacgccgagccccaagcctccgacatccaagccgactccgccggtgtacacaccgagccccaagccaccgaagccgtccccgccgacgtacacgccgaccccgaagccaccggctaccaagccgcccacctcaactccgacgcaccctaagccgacgccgcacacgcctatccccaagcccacgccgccaacctacaagccggcaccgaagccgacgccgccggcgcccaccccgccgacatacacgccgccggtgtcgcacacccccagctcgccgccgccgccgccgccgccgccttactactag

SEQ ID NO: 546 - protein, 283 aa, Sorghum bicolor
MMGGKAALLLALVAVTLAVVEIQADAGYGYGGGYPTPTPKPPAKGPKPEKPPTKGHGHKPEKPPKEHKPTPPTYTPSPKPTPPPATPKPTPPTYTPSPKPKSPVYPPPPKASTPPTYTPSPKPPATKPPTYPTPKPPATKPPTPPVYTPSPKPPVTKPPTPKPTPPVYTPNPKPPVTKPPTHTPSPKPPTSKPTPPVYTPSPKPPKPSPPTYTPTPKPPATKPPTSTPTHPKPTPHTPIPKPTPPTYKPAPKPTPPAPTPPTYTPPVSHTPSSPPPPPPPPYY

SEQ ID NO: 547 - DNA, 1800 bp, Sorghum bicolor
atgaggcggcggtcggtcctgccgtcccaccacgacgacatggagaagggcggcggcaagccggcgtcgtcgcgcctctgcttcctcgccacgctctgcgccatgttctgggtcctcatcttctacttccacttcgccgtcgtctccaacgagccggccgtttcggcggcgcaggccaccggtgtccgcattgaccgctctcgcatccacattcccgaactcgacggcgcgtcccgcgtcgacgttcccctcgccccgcccgcccgcgcgtcggagccaccgccgccacctcctgtcgcgcgccccaaggagacggagacggagacggagacggagacggagacggaggcggaggcggaggaggagtacccgttcgagcgggcgctcaagacggcggagaacaagagcgacccctgcggcggccggtacatctacgtgcacgacctgccgccgcggttcaacgaggacatgctgcgggactgcgagaagctcagcgtctggaccaacatgtgcaggttcatgagcaacgacgggcttggcccgccgttgggcaacgaggagggcgtcttctccaacaccggctggtatggcaccaaccaattctccgtggatgttatcttcggcaacaggatgaagcagtacgagtgcctgaccaaggactcgtctatcgccgcggcggtgttcgtgccgttctatgctgggtttgatgtggcaaggtatctctggggttataataccacgacgagggatgccgcgtcgcttgatttggtggagtggctgatgaagaagccggagtggagtgtgatgggtgggcgggaccatttcctggttgcagggaggatcacttgggatttcagaaggttgacggatgaagagtcagattggggcagcaagctgcttttcttgccggctgcaaagaacatgtcgatgctcgtggtggagtcgagcccgtggaattcaaatgattttgggataccatatcctacatacttccacccggccaaggacgctgatgttttcctttggcaggatagaatgaggagcttggaacgcccatggctgttctcgtttgcaggcgctccacgtcctggtgatccaatgtccatcagagggcagctcatcgatcaatgcaggagctcaagcgtttgtaaattgttggagtgtgaccttggggagagcaagtgccactccccgagcacaatcatgaagatgttccagagctctctgttctgcttgcagccccagggcgactcctacacaagaagatctgcctttgactcgatgttggctggctgcatacctgttttcttccatcctggttcagcgtacgtccaatatacatggcatcttccaaagaactatacaaggtactctgtattcatccctgaagatgacgtccgttctagaaatgccagcattgaggagagactaaagagtattcacccagatgtgatcaagcaaatgagagaggaggtcatcaatctaataccaaaggtgatatatgctgatccaagatcgaaactggagaccttgaaagatgcatttgatgtttctgtagaggcaatcattaacaaagtgacaaagttgagaagagatatcatcgcaggccaagaagataaagattttatcgaagagaatagctggaagtatagtctgttagaagatggacagcggacaattggacctcatgaatgggatccattcttctcaaagcccaaagataaaggtggagattctagtggttcatctgctgaatctgccaagaattcttggaaaagtgaacaaagaggacatagttga

SEQ ID NO: 548 - protein, 599 aa, Sorghum bicolor
MRRRSVLPSHHDDMEKGGGKPASSRLCFLATLCAMFWVLIFYFHFAVVSNEPAVSAAQATGVRIDRSRIHIPELDGASRVDVPLAPPARASEPPPPPPVARPKETETETETETETEAEAEEEYPFERALKTAENKSDPCGGRYIYVHDLPPRFNEDMLRDCEKLSVWTNMCRFMSNDGLGPPLGNEEGVFSNTGWYGTNQFSVDVIFGNRMKQYECLTKDSSIAAAVFVPFYAGFDVARYLWGYNTTTRDAASLDLVEWLMKKPEWSVMGGRDHFLVAGRITWDFRRLTDEESDWGSKLLFLPAAKNMSMLVVESSPWNSNDFGIPYPTYFHPAKDADVFLWQDRMRSLERPWLFSFAGAPRPGDPMSIRGQLIDQCRSSSVCKLLECDLGESKCHSPSTIMKMFQSSLFCLQPQGDSYTRRSAFDSMLAGCIPVFFHPGSAYVQYTWHLPKNYTRYSVFIPEDDVRSRNASIEERLKSIHPDVIKQMREEVINLIPKVIYADPRSKLETLKDAFDVSVEAIINKVTKLRRDIIAGQEDKDFIEENSWKYSLLEDGQRTIGPHEWDPFFSKPKDKGGDSSGSSAESAKNSWKSEQRGHS

SEQ ID NO: 549 - DNA, 1146 bp, Sorghum bicolor
atgggctcgctgatgtcctgcctctccgacccctgcccgtcggggaacaggtccccgccgctgcaggcgaagcggcgctcctccacctcttcccgcggccgtggcgggagagactccgccaaggcctccgtgtcctttgacgaggaggcgctggccgcggcggcagcgctcgtgctggggcagaggggcgccgccggtggcctgggggcattcgagcggtccgcgtcggtgcgatacgctgccaagcgccagagccagggcccgccactgccccggagcagcagcacgcgtccgaggtcgctcgctgaccccgagctccaaccgcagcagctcctcgccaaggatttgaatactaaggatttggaaaccaacgtcattgttcttgttcatggaggtggatttggcgcttggtgttggtacaagactatatcacttcttgaagatagtgggttcaaagttaacgccatcgacttaacaggctctgggattcattcttacgacacaaacaagattagcagtctttcagagtacgctgaaccacttacgtcttaccttaaaggcttaggtggtgctgaaaaggtaattttggtcgctcatgatcttggtggtgtctgtgtatcctatgcaatggagatgttcccatccaaagttgccaaggctgttttcctttgtgcagcaatgctgacaaatggaaacagtgcccttgacatgttccaacagcagatggacacaaacggtactctccaaaaggcgcaagaattcgtctactccaacggcaaggaccgtcctccaactgccatcaacatcgacagggccttgcttagagacctgttgttcaaccagagcccttccaaggacgtgtcgctggcctcggtgtccatgaggcccatccccttcgcccctgtgctggagaagcttgtgctcaccgctgagaactatggctcggtgcggcggttctacgtggagaccacggaggacaatgcaattcctctgcctctccagcagagcatgtgtggtgccaacccaccggagaaggtgctgcggctgaagggggcggaccacgcacccttcttctccaagccgcaggcgctgcacaagaccctggtcgagatcgccaccatgccgccgccggtccaggcttcgtga

SEQ ID NO: 550 - protein, 381 aa, Sorghum bicolor
MGSLMSCLSDPCPSGNRSPPLQAKRRSSTSSRGRGGRDSAKASVSFDEEALAAAAALVLGQRGAAGGLGAFERSASVRYAAKRQSQGPPLPRSSSTRPRSLADPELQPQQLLAKDLNTKDLETNVIVLVHGGGFGAWCWYKTISLLEDSGFKVNAIDLTGSGIHSYDTNKISSLSEYAEPLTSYLKGLGGAEKVILVAHDLGGVCVSYAMEMFPSKVAKAVFLCAAMLTNGNSALDMFQQQMDTNGTLQKAQEFVYSNGKDRPPTAINIDRALLRDLLFNQSPSKDVSLASVSMRPIPFAPVLEKLVLTAENYGSVRRFYVETTEDNAIPLPLQQSMCGANPPEKVLRLKGADHAPFFSKPQALHKTLVEIATMPPPVQAS

SEQ ID NO: 551 - DNA, 2211 bp, Sorghum bicolor
atgaagatgatggcggcggtggctatagaagaaggcgatcagggggaggcaggcgaggcgcattccgtgtctccaccaacgctgccgtgccggctacctcgatcggggcctgccgtgccgccggacggacattcgtttacccatccatgcctatcgtcaaccgagcatctggccacgtcccccgcgggagggccgccagcgccgaaggcacaggcacccccgccgaaggcttcctcgtcgtctccgccgccacctccaccgaaggcttcctcgtcgtctcccccgccgccgacaccgtcgcctccacagcactcaccgccgccgccaccgtcgaagcagtccccgcctcctccggcaccttcgtcgaagacaccagcgactccgccgcagaagtcgccgacggcgtccccgcctcctccggcctcgccgccgccatcgagcaagtcctctcctcctcctcctccttccccgtcgtcgacgcctccgtcgtcaccacctccgcgttcttcgccgccgccgccgcccgcggcatcgacatcgacatcgacgccaccatcgtcgacgtcgcagaaatcgcctccgaaacaggaattaaccaagtcgccgccaccctcgtcgtcagagaagacgcccggagcagcctcacctcccccaaatgcgtcgtcagactccggatcaaaatcacagccgccgccgcgcgggacaccgtcgacgtcctcggacaacaccgccggtcgccagccacctccagcgtcgtcggggacaccatcctcgcccacgcagatgctgcctcctccgatggcggtgacggtgatcgtgccgggtgcctccggcggcccacctgcaagcggcaggtggaggggcccgcctggcccggcactgagtccccccgcaggtggctcaggctcaggcggcaacatgaagaacgaggtgatcatcatcggcatctccgtcgccgggctcctcctggcactggcctcgctgctgatcatcgtgtgcgtcaacagcaaccgggggaagaggaagcggcgcgcgcaaccgtcgccgtcgcggaggcacaacctcgtcgtcgtgccggaaccgtaccaggcgtcgccgagcgggacgaactcgtacgagctgtcggggaccaagtcgtggttcacgtacgacgagctggtggggatcacgggcgggttctcggcggcgaacgtgatcggggaaggagggttcgggaaggtgtacatgggggcgctgggcgacgggcggcgcgtggcggtgaagcagctcaaggtgggcagcggccagggggagaaggagttccgcgccgaggtggacatcatcagccgcatccaccaccgccacctcgtcacgctcgtcggctactgcgtcaccgagaaccaccgcctcctcgtctacgagttcgtggccaacaacacgctcgagcatcacctgcacggaaaagggctacccgtgatggattggccgaagcggatgaagattgccatcggagcggcgcgtgggttgacgtacctccacgaagactgccatcctaggatcatacacagggacatcaagtcggccaacattctcctggacgacgccttcgaggccaaggttgcagatttcggccttgctaaactgacaaacgactcgctgactcacatctcgacgcgcgtgatgggcacgttcgggtacatggcacctgagtacgcacagagcgggaagctgacggacagatccgacgtgttctccttcggggtggtgctcctggagctcatcaccgggcggaagcccgtcgacgcatctcaaccgctgggagaagagagcctggttgaatgggctcggcttctcctggtggacgccttggagacggacgacttccgggaggtcgccgaccccgcgttggagtgcaggttctccaagaccgagatgcggaggatggtggaggcggccgccgcctgcgtgcgccactccgccgccaagagacccaggatggtgcaggtgtggcgatcgctggacgtggacgagtgctcgtcggacctgaccaacggcgtgaagctggggcagagcatggcgtacgactcgggccggtactcggcggacatcgagctgttccggcgaatggcgttcgccaacgacctctccaccgccgagttgggcgtcttggacgaggacgaccaccacagcagcagcagcaaagccggttccggttccaggcggcacaagtag

SEQ ID NO: 552 - protein, 736 aa, Sorghum bicolor
MKMMAAVAIEEGDQGEAGEAHSVSPPTLPCRLPRSGPAVPPDGHSFTHPCLSSTEHLATSPAGGPPAPKAQAPPPKASSSSPPPPPPKASSSSPPPPTPSPPQHSPPPPPSKQSPPPPAPSSKTPATPPQKSPTASPPPPASPPPSSKSSPPPPPSPSSTPPSSPPPRSSPPPPPAASTSTSTPPSSTSQKSPPKQELTKSPPPSSSEKTPGAASPPPNASSDSGSKSQPPPRGTPSTSSDNTAGRQPPPASSGTPSSPTQMLPPPMAVTVIVPGASGGPPASGRWRGPPGPALSPPAGGSGSGGNMKNEVIIIGISVAGLLLALASLLIIVCVNSNRGKRKRRAQPSPSRRHNLVVVPEPYQASPSGTNSYELSGTKSWFTYDELVGITGGFSAANVIGEGGFGKVYMGALGDGRRVAVKQLKVGSGQGEKEFRAEVDIISRIHHRHLVTLVGYCVTENHRLLVYEFVANNTLEHHLHGKGLPVMDWPKRMKIAIGAARGLTYLHEDCHPRIIHRDIKSANILLDDAFEAKVADFGLAKLTNDSLTHISTRVMGTFGYMAPEYAQSGKLTDRSDVFSFGVVLLELITGRKPVDASQPLGEESLVEWARLLLVDALETDDFREVADPALECRFSKTEMRRMVEAAAACVRHSAAKRPRMVQVWRSLDVDECSSDLTNGVKLGQSMAYDSGRYSADIELFRRMAFANDLSTAELGVLDEDDHHSSSSKAGSGSRRHK

SEQ ID NO: 553 - DNA, 2211 bp, Sorghum bicolor; identical to SEQ ID NO: 551

SEQ ID NO: 554 - protein, 736 aa, Sorghum bicolor; identical to SEQ ID NO: 552

SEQ ID NO: 555 - DNA, 816 bp, Sorghum bicolor
atgggcaggaggctgccggcggcggcgttgtgcggtggccgggcggcgacgcgggtgaggaggaagcgggtgcagcgggcgtcgtcctacgcctcgccctccaatattaagctccccgccgcggcactgcccggcggcggcggcggtggaaagaccggcagcgcagcagcagcaggaggaggaggaggaggaggctgctacgtcaatggcaacggcgcgctgatggtggaagtgcgcaggcctgccgccggctctgggacgacgacggtgaccggcaagaaggacggcggcgggcggcgggtcatggtgctggcggacggccgcgccgaggccgccggcgcgctccagtgggcgctgtcgcaggccgtccggagcaacgacaccgtcgtcctcctcgccgtcgccaagaccgtcgcccgagacgccgtcagtgattcttgtgtcaagatgctgggcaccaagagccagcaacacctcgccgccttgaggactgtctgtgaatcaacaaggccagaggtgaaggtggagacgtgcgccgtggaggcggaggagcgcgcgccggcggtggtggacgcggccaggcggcacggcgcgtcgctgctcgtgctgggccagcgcccgcggcggcacgcggtggcaaggtggctgcagacgctgtggcggcgccggcgcagcagcaggggctcctccggcggcggcatggtggagtactgcatcgagcacgcgccgtgcgtggcgctggccgtgcgccggaggagctccggcggctacctcgtctccagcaagcaccacagggacttctggctcctcgcctag

SEQ ID NO: 556 - protein, 271 aa, Sorghum bicolor
MGRRLPAAALCGGRAATRVRRKRVQRASSYASPSNIKLPAAALPGGGGGGKTGSAAAAGGGGGGGCYVNGNGALMVEVRRPAAGSGTTTVTGKKDGGGRRVMVLADGRAEAAGALQWALSQAVRSNDTVVLLAVAKTVARDAVSDSCVKMLGTKSQQHLAALRTVCESTRPEVKVETCAVEAEERAPAVVDAARRHGASLLVLGQRPRRHAVARWLQTLWRRRRSSRGSSGGGMVEYCIEHAPCVALAVRRRSSGGYLVSSKHHRDFWLLA

SEQ ID NO: 557 - DNA, 1470 bp, Sorghum bicolor
atggacagggacagcagctcggtgtccgacgggagctcggaggccggcggggagcgcggcggcgggtgctgctcgtcgccgtccacgcggagcctcgtcgacgcggcgggcggcaacctcagccgcaccgtgtccgacgtgtccacgtccgccttctcggagcagtgcagcagcgtcagcgtcgacgtcgaccacagcgggccgttcgagcccaccgccgccgccgtggccaagctcatcgcccggtcgtccccggcgtccgccgccgagtcactcagacggctcagcatcaagccccgcgccgacgtgcttgaccgccgctccaccgacgacgagctggagctggtgaaggagaggttctctaagctcctgctcggcgaggacatgtccggcggcggcaagggcgtctgcaccgccgtggccatctccaacgccatcaccaacctctacgcgacggtgttcgggagctgccacaagttggagccgctgccggcggggaagaaggcgatgtggacaagagagatggactgcctcctctccgtctgcgactacatcgtcgagttctacccgtccacgcagacactgcccgacggcaccaaagttgaggtcatggcgaccagaccaagatcggacatctacatcaaccttcccgcgctcgagaagctcgacgccatgctcatcgacattctggacagcttccagaaggcggagttctggtacgcggacgccgggacgaggtcgttcggctcggtcacctcctcgtcgtcgtcgaggacgatgtcgtcgtcgttcaggaggtcggctcaccggaacgaggacaagtggtggctgccggtgccctgcgtcccggacgccggcctcaccgacaaggcgcgcaaggaccttcagaagaggcgcgactgcgctaaccagatccacaaggccgccgtcgccatcaacagcggcgtcctcagcgacatggaggtgcccgagtcgttcatggccgtgctccccaagagtgggcgggcaagcgtgggggactcggtgtaccgcgtcatgctgggcgccgacaagttctcgccggagttcctgctcgacacgctcgacatctcgtcggagcacgacgcgctggcgatggccgacagggtggaggccgccatgtacgtgtggcggcgcaaggcgagtggcagccatgggaagctgccgtggagcaaggtcaaggagatcgcggccgacggcgacgacaagaacgtgacgctggcgaacagggccgagagcctcctgctctgcatcaagcaccgcttccctggcctgtcgcaaaccaccctggacaccagcaagatccagttcaacaaggatgttgggcaagcaatcctggagagctactcaagggtgttggagagcttggctttcaacattgtttcatggatcgatgatgttcttttcgtcgacaggtcaattaggaaattgggtgacaacctgaagccctga

SEQ ID NO: 558 - protein, 489 aa, Sorghum bicolor
MDRDSSSVSDGSSEAGGERGGGCCSSPSTRSLVDAAGGNLSRTVSDVSTSAFSEQCSSVSVDVDHSGPFEPTAAAVAKLIARSSPASAAESLRRLSIKPRADVLDRRSTDDELELVKERFSKLLLGEDMSGGGKGVCTAVAISNAITNLYATVFGSCHKLEPLPAGKKAMWTREMDCLLSVCDYIVEFYPSTQTLPDGTKVEVMATRPRSDIYINLPALEKLDAMLIDILDSFQKAEFWYADAGTRSFGSVTSSSSSRTMSSSFRRSAHRNEDKWWLPVPCVPDAGLTDKARKDLQKRRDCANQIHKAAVAINSGVLSDMEVPESFMAVLPKSGRASVGDSVYRVMLGADKFSPEFLLDTLDISSEHDALAMADRVEAAMYVWRRKASGSHGKLPWSKVKEIAADGDDKNVTLANRAESLLLCIKHRFPGLSQTTLDTSKIQFNKDVGQAILESYSRVLESLAFNIVSWIDDVLFVDRSIRKLGDNLKP

SEQ ID NO: 559 - DNA, 2220 bp, Sorghum bicolor
atggctaacagggtcgccgtcgccagcgtcatcgccgcggtgggcatcgtggccgtgatcggcaccatcgccgcggtgaccagcgccaagaaagtggacgacaacgacgccggcggcttgttttccagcgtgaagctctccacggtgtgcgcctcgacgctgtacccgcagaagtgcgagcagagcctgaagcccgtcgtgaacgacacctccgacccggaggacgtcctccgggccgcgttcaacgtggccctggacgaggtcgccgccgccttccagcggtccgcgcacatcggcaagggcgccacggacaacctcaccaagaacgccatggaggtgtgcaagaagctcctagacgacgccaccgaggacctcggggccatgtcgaggctcaagccccaggacgtggtgcgccacgtcaaggacctccgggtctgggtctctggcgtcatgacctacgtctacacctgcgccgacggattcgagaagcccgagctcaaggaggccatggacaaggtgctgcagaactccaccgagctcagcagcaacgcgctcgccatcctcacccgcctcggcgagctcctgccggaggaagccaaagctctgaacgccaccttggcgggtgcggggcacggccgccggcttcttggctggcagatgggcgaggccgaggaggtgaccagcggaggccgcgggcttctggccgtcgatgacaagctgggcgagatcgcggacgtcgcgagcgcaaaccggaagctcctgtcggacacgctggacgagatcgccggcatgtcccacggcgcgaacggccggcgcctgcttagcaccctgtggtctcagataaccagcacccagggagaggacgtcctcgcccaccaacaaaagctgggcgtgtcgccagacgacgagaccgatcacgccgcccggcgcaaccttctgtcgaccgagctcgacagcatcgccagcacgtccgccgaggcaaaccgccagcttctcgcggcggaggagctccccgacgagctcgccggcaagcgccagctgctgtcccggacgctcatggggatcgacgaggcggccaccgaggccaagcgccagcttgatgaggcaacgacggagaacaccatgtctgagactgagcacagggtactgaccactgacctcgtcggcacgttcgacgagatccaagacgggcgcagcggggcgccgcccggcaacttccccaagtggatgtcggccacccagcggaggctcctgcagctgcccagcctgcagaagcccaacaaggtggtggcccaggacggcagcggcgacttcaagaccatcagcgaggccatcgccgccgtgcccaagaccttcgagggccgcttcgtcatctacgtgaagtccggcgtgtacaaggagtacgtcaccgtgcccaagaacatggccaacatcttcatgtacggcgacgggccgacgaagacggtggtgaccggcgacaagagcaacacaggcgggttcgccaccatcgccacgcccaccttttccgcggagggcaacgggttcatctgcaagtcgatgggtttcgtcaacacggcggggccggatggtcaccaggcggtggcgatgcacgtgcagggggacatgtcggtgttcttcaactgccggttcgaggggtaccaggacacgctgtacgtgcacgcgaaccggcagttcttccgcaactgcgaggtgctgggcaccgtggacttcatcttcggcaactcggcggcgctgttccagaactgcctgatgacggtgcgcaagcccggggacagccagtccaacatggtgacggcgcaggggaggacggaccccaacatgcccacggggatcgtgctccagggctgccgcatcgtgccggagcaggcgctcttccccgtgcggctccaggtgcccagctacctcggccggccatggaaggagtacgcgaggacggtggtgatggagagcaccatcggcgacctcatcaggccggaagggtgggcggagtggatgggcgacctcggcctcaagacgctctactacgccgagtacgccaacaccggcccgggcgccggcaccagcaagagggtcaactggccgggctaccgcgtcatcggacaggccgaggccacgcacttcaccgccggcgtcttcatcgacggcatgacgtggctccagagcaccggcacgccaaacgtcatgggcttcaccaaatga

SEQ ID NO: 560 - protein, 739 aa, Sorghum bicolor
MANRVAVASVIAAVGIVAVIGTIAAVTSAKKVDDNDAGGLFSSVKLSTVCASTLYPQKCEQSLKPVVNDTSDPEDVLRAAFNVALDEVAAAFQRSAHIGKGATDNLTKNAMEVCKKLLDDATEDLGAMSRLKPQDVVRHVKDLRVWVSGVMTYVYTCADGFEKPELKEAMDKVLQNSTELSSNALAILTRLGELLPEEAKALNATLAGAGHGRRLLGWQMGEAEEVTSGGRGLLAVDDKLGEIADVASANRKLLSDTLDEIAGMSHGANGRRLLSTLWSQITSTQGEDVLAHQQKLGVSPDDETDHAARRNLLSTELDSIASTSAEANRQLLAAEELPDELAGKRQLLSRTLMGIDEAATEAKRQLDEATTENTMSETEHRVLTTDLVGTFDEIQDGRSGAPPGNFPKWMSATQRRLLQLPSLQKPNKVVAQDGSGDFKTISEAIAAVPKTFEGRFVIYVKSGVYKEYVTVPKNMANIFMYGDGPTKTVVTGDKSNTGGFATIATPTFSAEGNGFICKSMGFVNTAGPDGHQAVAMHVQGDMSVFFNCRFEGYQDTLYVHANRQFFRNCEVLGTVDFIFGNSAALFQNCLMTVRKPGDSQSNMVTAQGRTDPNMPTGIVLQGCRIVPEQALFPVRLQVPSYLGRPWKEYARTVVMESTIGDLIRPEGWAEWMGDLGLKTLYYAEYANTGPGAGTSKRVNWPGYRVIGQAEATHFTAGVFIDGMTWLQSTGTPNVMGFTK

SEQ ID NO: 561 - DNA, 1686 bp, Sorghum bicolor
atgaagctcatgtacttcctcatggacagggacgagcagcgcgagaagcggctggagctcgaattcgaggtgtcggagctggagacggcgctcgagaaggagcagcagctgggcagggtcctgcagtgctcgctgcaggggcgcgtcgtctgccattgctgcctctccgcgctggttcctaccaacgttaggggcctccttgcggagctcgcagtggtggaggatgagatattctacctggagaagaaggtcgacgacctgcgcctacgcctgcgccgggagcagaagtggacggaccattgcatccttcagcagcagcagcagcagagctggctgcagaaccgccagcagcggcactccgtgtccaggagggagctccagcagctacccaagctgccatgtccaggaggaagcgacgaagctctcgagcgcgagagcaaggcttctgtcggatccgccaaaggagatgagatggagcacgtcgtcgtcagcaggagaagcagccactgccactcgtcgtcagagaatccgaacccgacgcctccggagaggaagacgacgacgtgcgtggtgagcagcagcccgaacaagctctcggaggagctcgtcaggctgatggtgaccatcttccacaagctcaacaagacgacgacgacaacggacgcggcggcggagctggagctgagcggcacgtcgtcgtcgtccaagctcaacatctcctcgtgcatcggacccaggagcctcgtccccaaggtctccgtgtccgtgaacggcgccgcggcggcggcgatgagcccgctcaagaaccggagagcggcgttgaccaagggcggcggcgcggagaaggaggctgcggccgctgggaccgggtgccagaagaggttcgtcgagttcacgagggcctccgtcgacgtcacccgcgtctcgctgtgcctcgtggacatcaagaacctgagaggcctgatgcaaaagctttcgctcgtcgatccgagccttctgacgaacaagcagaagctggcgttttggatcaacatctacaacttctgcgtgatgcatgcgtttcttcagcacggtttacctccatctccagagaagcttcttgcgctgctgaatcaggcttcagtgaacgttggagggacagtactgaatgtggtgtcgatcgagcacctcatcctgaggcactctcctgacgccaagcaaggtatcatggacgacgaaggacggatggatgtgctgcactcgtacgggctagggtaccccgagcccaacgtcgtcttcgcgctgtgcagaggcagccgctcgtcgccagcactgcgcgtgtacacggcggaggacgtgtcgaacgagctggagcgggccaaggtggagtacctggagtcgtcggtgcgcgtcgccggcggcggcaggaagcagcgcgccgccgtggtggtgcccaagctgctgcactggcacatgcgcgacttcgccgccgacgacgtcgcgtcgctgctggagtgggtgcacagccagctgcccagggcgtcgggcccgctccgccgggccatcagggaggtcatcctgggcgccaacattaccaacggcagcggcagcggcagcagggccgccacgccggcgccggcggcggccaagatggtggaggtcgagccctacgacgccgacttctgctacatgctgcccgtctggtga

SEQ ID NO: 562 - protein, 561 aa, Sorghum bicolor
MKLMYFLMDRDEQREKRLELEFEVSELETALEKEQQLGRVLQCSLQGRVVCHCCLSALVPTNVRGLLAELAVVEDEIFYLEKKVDDLRLRLRREQKWTDHCILQQQQQQSWLQNRQQRHSVSRRELQQLPKLPCPGGSDEALERESKASVGSAKGDEMEHVVVSRRSSHCHSSSENPNPTPPERKTTTCVVSSSPNKLSEELVRLMVTIFHKLNKTTTTTDAAAELELSGTSSSSKLNISSCIGPRSLVPKVSVSVNGAAAAAMSPLKNRRAALTKGGGAEKEAAAAGTGCQKRFVEFTRASVDVTRVSLCLVDIKNLRGLMQKLSLVDPSLLTNKQKLAFWINIYNFCVMHAFLQHGLPPSPEKLLALLNQASVNVGGTVLNVVSIEHLILRHSPDAKQGIMDDEGRMDVLHSYGLGYPEPNVVFALCRGSRSSPALRVYTAEDVSNELERAKVEYLESSVRVAGGGRKQRAAVVVPKLLHWHMRDFAADDVASLLEWVHSQLPRASGPLRRAIREVILGANITNGSGSGSRAATPAPAAAKMVEVEPYDADFCYMLPVW

SEQ ID NO: 563 - DNA, 2883 bp, Sorghum bicolor
atggacgccccggcccccacgaggggccctgcgagcttcctcacgcaggccaacgccctcctccgcaagaacctctgcttccagaagcggaacctcaagaccaacatcgggatcacgctcttcccggtgctcctctgcgtcatcctcgtcgtgctccagggcgtcatcgacaacgagctcgacaagcccaagtaccgctgcggttgcgcctgcgtcgacccgggcccggacgcggtcggggacgcgtgccgccggacggagtgcggcgtccagcactccaccctggaccaggtcggcagctgcccgatccctagcccgaccccgtggccggcgctggtgcaggtgccgcggcccgagtcacgcgccgtcaggaccgccggccagccgttcgacggcttgcctgacccgagctgccgggacactggctcctgccccgcggccgtcctcgtcaccggcaacaaccgctcgctagctcaaaacctttcgggtggactgtttcctgcttcgacttcctccttgaatttgacagattatctggatgaactctccaggatcgttgctggatcggacacgtggccatggacaacagaattaatagaatcagcgtttatcccagggaataacttgtatcggctgcaatctcggtgtttgtccaatctaacacagacagtttcattcaatgccggggtcataccccttcagctcaacatagactgcgttcagggtttgccactatggcgtgaaagtgcatcatttgtaaatgatgaactctttaagggttacagacaaaatggtggaggtagtggaggtgggaagacaaatgaatttgttgcaggttatgattttctgaacacaaatatgaatggtcttgaaatgaatatttggtacaactctacctataacaacaacaccgcatacgtatctatttcattactacgagttccacgcttggttaatgcggcatcaaatgagtacattaaatttctcagaggaagtggagtggaaatgttgcttcaatatgttaaagagatgcccaaagtaggaacaaagctgaaatttgacctctcttctcttcttggtgcattgttcttcacgtggatcattgaactactatttccagtgagtgtcatattaacatatctcgtgtatgagaagcaacagaagctgaaaattatgatgaagatgcatggtctgaaggatggtccttactggctaatctcctatttttacttctttgccctgtcggctatctacatgatactgtttgtgatttttggctccttgatcggtctagatttctttaggaaaaatgactatagccttcaatttgtcttctacttcatctacataaacctgcagatttcacttgcatttcttgtagcttccttcttttctgctgtcaaaacagccacagttgttggttacatctatgtatttggctctggcttactaggggaatttcttcttcgcttttttgttgaggatactggttttccaaagggttggatagttttaatggagatcatccctggattttcattgttccgaggattatatgagtttggtcaatatgcatctgctggaaactcaatggggaccactggtatgaaatggagtaatctagatgactctcttaatggaatgcgtggtgttttgattattatggttgtggagtgggcaatacttctacccttggcattctatgtggatcaagtctcgtcgctgggtggtggattcaggaaaaattcctttttcttcttgagctgctttaaaaggcgtgctctatcattgcggagatatagctttaggagacaagaatctaaagtagtcgttgaaatggacaatcctgatgctgttcaagaaagagaggtggttgagcaacttctgctggaacccattgcaaaccaagcgatcctctctgataacctcaaaaaggtttaccatggaaaagatggaaatcctgacaaacttgctgtccgagggttgtctcttgccataccaaaaggccagtgttttggaatgcttggcccgaatggagctgggaaaacatcgttcatcagtatgatgattgggcttattccaccaacatctggtaccgcctatgtacatggaatggatataaggactgatatggatgagatctatactaacatgggtgtatgcccacagcatgacttactttgggaaacattaacaggaagagagcacctattgttttacgggagacttaagaatcttaaaggcactgaattattgaaggctgttgatgactctctgaagagtgttaatctgtttcatggtggcgttggtgataagcaagtgggaaagtacagtgggggcatgaaacgaaggcttagtgttgccatctcattaattggggatcccaaagtggttttcatggatgagccaagcaccggacttgatccagcatcaagaaacaatctgtggagtgttgtgaaggaggcaaagagaaaccgtgccatcattcttacaacacactcaatggaggaggcagaagtactatgtgatagacttggcatttttgtcgatggtggtttccagtgccttggtaacccaaaagagctgaaagctagatatggcggcacctatgtactgacaatgacaacatcttcggagaatgaaaaggaggttgagcagcttgttcaccacctatcaccaaatgcgagcaggatataccacatttcaggaacccagaaatttgagctgccaaagcaggacttgaagattgctgatgtattccatgccgtcgagagtgcaaaatgccggttcaacatatatgcttggggcctggttgacaccaccttggaggatgtctttattaaggttgccaagggagcacaagcattcaatgttgttacgtaa

SEQ ID NO: 564 - protein, 960 aa, Sorghum bicolor
MDAPAPTRGPASFLTQANALLRKNLCFQKRNLKTNIGITLFPVLLCVILVVLQGVIDNELDKPKYRCGCACVDPGPDAVGDACRRTECGVQHSTLDQVGSCPIPSPTPWPALVQVPRPESRAVRTAGQPFDGLPDPSCRDTGSCPAAVLVTGNNRSLAQNLSGGLFPASTSSLNLTDYLDELSRIVAGSDTWPWTTELIESAFIPGNNLYRLQSRCLSNLTQTVSFNAGVIPLQLNIDCVQGLPLWRESASFVNDELFKGYRQNGGGSGGGKTNEFVAGYDFLNTNMNGLEMNIWYNSTYNNNTAYVSISLLRVPRLVNAASNEYIKFLRGSGVEMLLQYVKEMPKVGTKLKFDLSSLLGALFFTWIIELLFPVSVILTYLVYEKQQKLKIMMKMHGLKDGPYWLISYFYFFALSAIYMILFVIFGSLIGLDFFRKNDYSLQFVFYFIYINLQISLAFLVASFFSAVKTATVVGYIYVFGSGLLGEFLLRFFVEDTGFPKGWIVLMEIIPGFSLFRGLYEFGQYASAGNSMGTTGMKWSNLDDSLNGMRGVLIIMVVEWAILLPLAFYVDQVSSLGGGFRKNSFFFLSCFKRRALSLRRYSFRRQESKVVVEMDNPDAVQEREVVEQLLLEPIANQAILSDNLKKVYHGKDGNPDKLAVRGLSLAIPKGQCFGMLGPNGAGKTSFISMMIGLIPPTSGTAYVHGMDIRTDMDEIYTNMGVCPQHDLLWETLTGREHLLFYGRLKNLKGTELLKAVDDSLKSVNLFHGGVGDKQVGKYSGGMKRRLSVAISLIGDPKVVFMDEPSTGLDPASRNNLWSVVKEAKRNRAIILTTHSMEEAEVLCDRLGIFVDGGFQCLGNPKELKARYGGTYVLTMTTSSENEKEVEQLVHHLSPNASRIYHISGTQKFELPKQDLKIADVFHAVESAKCRFNIYAWGLVDTTLEDVFIKVAKGAQAFNVVT

SEQ ID NO: 565 - DNA, 498 bp, Arabidopsis thaliana
atggctttctcacgcctctcatttgcagcttctctcatcgtcttctcatctctaatcatatcttcagttgcttattacggcaatgaagctgacccggagaccggaaaattgattcccatcgccgttgaagggatcatcaagtgcaagtccggtggcaaaacttacccaattcaaggtgcaacggcaagaattgcgtgtgtgaaggtcgatgcatatgggaatgagttagttccaatatcgatattgagcagcaaaactgatgctaaaggttacttcatcgccacgatattcccttcgcagcttcgtgcaggaaggacagtgaccaaatgcaaaacttacctttacaaatctccactcgctgattgcgattttccgaccgatgtgaacaaaggtgttagaggacagccattgagcacgtaccgtattcttcaagacaagagcttcaagctttactgggctggtcctttcttctacacgtctgaacctacttactactaa

SEQ ID NO: 566 - protein, 165 aa, Arabidopsis thaliana
MAFSRLSFAASLIVFSSLIISSVAYYGNEADPETGKLIPIAVEGIIKCKSGGKTYPIQGATARIACVKVDAYGNELVPISILSSKTDAKGYFIATIFPSQLRAGRTVTKCKTYLYKSPLADCDFPTDVNKGVRGQPLSTYRILQDKSFKLYWAGPFFYTSEPTYY

SEQ ID NO: 567 - DNA, 1407 bp, Arabidopsis thaliana
atgtccacacataaattgtatataaatatctttgtatggcaatatgccaagataaaacaaaacaatactatcttgaaaatgtcttcaccacagttgcaaagagctatggagaatccaactcttgagctcaaaattgtatcagctagtgacgtcaaccatatcgatgccacggacaaaatggacgtatacgcagtcgtttcaatcaacggcgacacaacacaacaaaaacaagcggccaaaactcccattgattacgatggtggttctaatccgacgtggaatcacaccgttaagttctccgtcaacgagagagaagccaacgaaggcctattaactataacggtcaagctatttagctactggctagaaggtgataatgacctgtatttgggagaagtcaacgtctcggttcaggatcttcttgcctcaaatccgattccaccgtttactaacggtaacatcaacaaaatgaagtcaatgacttgccctatcaaggccaccgaaaaaagtaccaacacaacggtgagcctttcataccggtttaaacctgtaccggttgaggaattttaccctccgtcaccggattctttgccatcgattggtaaacccgtttaccgagacctggatccagcaaaattaagtcagcctcttgtattttctcctcggtttcaagccaccacgacgaaactgatcctagagctcgtgatcaaattcgccaagaacatcgaagatgtcaacgccttctcgtccatggacgtatacgcttcggttgcgattcttaaggacagaaaagttaagaataggatcaacacaccggtggcttttgccgcttatacaaatccaaagtggaatcaaatgatgaaattttctattgatgagaagtcagctcaagaagggcggttgatgctccttgtggagttgatgagccaccggcctttccttggtgataaggagattggatttgttagacttccgatgcaacagttattggtctcaaatccgccttatccgttgaccgacaatggtgatgctaacggtatgaagttggagacacatgctttgacgggtccttatggaaaaaaaggtgtcgtgagcttcacgtataggtttcttgcagaacaagttacagcaccatctacaccaggccagccatatattatgtatgtaccggtatcgcctcagccatacgcgtcacctgatcagcttcaggtgacctcgagttacgtgactgttcaaccaggggctaattctgggccaagcaacggtctagtaccaatatttatgccgcctacatatcaatcacatggataccaacaatattcaccaaggaagtcgaaatcgcaactacaaccgtcaccacgacagttgcagcttcaacccctgcgtctgcagccgctctcgcagtaa

SEQ ID NO: 568 - protein, 468 aa, Arabidopsis thaliana
MSTHKLYINIFVWQYAKIKQNNTILKMSSPQLQRAMENPTLELKIVSASDVNHIDATDKMDVYAVVSINGDTTQQKQAAKTPIDYDGGSNPTWNHTVKFSVNEREANEGLLTITVKLFSYWLEGDNDLYLGEVNVSVQDLLASNPIPPFTNGNINKMKSMTCPIKATEKSTNTTVSLSYRFKPVPVEEFYPPSPDSLPSIGKPVYRDLDPAKLSQPLVFSPRFQATTTKLILELVIKFAKNIEDVNAFSSMDVYASVAILKDRKVKNRINTPVAFAAYTNPKWNQMMKFSIDEKSAQEGRLMLLVELMSHRPFLGDKEIGFVRLPMQQLLVSNPPYPLTDNGDANGMKLETHALTGPYGKKGVVSFTYRFLAEQVTAPSTPGQPYIMYVPVSPQPYASPDQLQVTSSYVTVQPGANSGPSNGLVPIFMPPTYQSHGYQQYSPRKSKSQLQPSPRQLQLQPLRLQPLSQ

SEQ ID NO: 569 - DNA, 1449 bp, Sorghum bicolor
atggcccggccccccaaaaccaccgggattgccttctccccccccctggggggaaccgccgccgccccctcggaactccttttcctcaaatccacgctccccgaacccgccgccgttgtcgccgaattggacagcaaggtggcgatgtcgcggcggcggatgcaggaggccggcggggccagcggcggcggcgggtgcctgacgggcaacccaatcgacgactgctggcggtgctctgggacggactggcggcaggaccggcagcggcttgcggactgcggcatcgggttcgggcgcaacgcgctgggcggcaagggcggtccggtgtacgtggtgacggactcgtcggacggcgaccccgtgaacccggtccccggcacgctccggcacgccgccatccaggaaggcccgctgtggatcgtgttcgcgtcggacatggccatccgcctgaacgaggagctgctggtgaacagctacaagaccatcgacgggcggggcgcgcgcgtgcacatcggcggcggcggcgcgtgcatcacgctgcagtacgtgtccaacgtgatcatccacaacgtgcacgtccacgactgcgtccccgccggcaacgccaacgtgcggtcctcgccgacgcactacgggtggcgcaccaggtcggacggcgacggcatctcgctgttcggggcacgggacgtgtgggtggaccactgcgcgctgtggcggtgcgccgacgggctggtggacgccatcatggggtcgacggccatcaccgtgtccaacagctacttcgcgcaccacgacgaggtgatgctgctgggcgccagcgacgcgtacctgccggactccgggatgcaggtcaccatcgcgttcaaccggttcggccccgggctggtgcagcggatgccgcgatgccggcgagggtacttccacatcgtcaacaacgactacacgtcgtgggagatgtacgccatcggcggcagcgcaaaccccaccatcaacagccagggcaaccgctacatcgcgcccggcgacccaaacgccaaggaggtgacgaagcgggtggacacggcggagggtcagtggaacgggtggaactggcggacggagggcgacatgatggtgaacggcgccttcttcgtgccgtccggagagggcctggaggagatctacgacaaggcgtccagcaccgacccaaagtcgtcggcgctcgtcgacgtgctcacgcagaacgccggcgtcctcggcgatcccaggaacgatgccgaagaaaccgggtacaggggtgtcaactacgccggcgtgggaactggcggcggtggcggcaacggctacggctacctcgggatggtctatgccaacggtggcggcgatcggagaagcagatcacagtcggcgctgtcattgatttcttcagttaccaccctcattgcgctcggatgcttgcgcttgttgtaa

SEQ ID NO: 570 - protein, 482 aa, Sorghum bicolor
MARPPKTTGIAFSPPLGGTAAAPSELLFLKSTLPEPAAVVAELDSKVAMSRRRMQEAGGASGGGGCLTGNPIDDCWRCSGTDWRQDRQRLADCGIGFGRNALGGKGGPVYVVTDSSDGDPVNPVPGTLRHAAIQEGPLWIVFASDMAIRLNEELLVNSYKTIDGRGARVHIGGGGACITLQYVSNVIIHNVHVHDCVPAGNANVRSSPTHYGWRTRSDGDGISLFGARDVWVDHCALWRCADGLVDAIMGSTAITVSNSYFAHHDEVMLLGASDAYLPDSGMQVTIAFNRFGPGLVQRMPRCRRGYFHIVNNDYTSWEMYAIGGSANPTINSQGNRYIAPGDPNAKEVTKRVDTAEGQWNGWNWRTEGDMMVNGAFFVPSGEGLEEIYDKASSTDPKSSALVDVLTQNAGVLGDPRNDAEETGYRGVNYAGVGTGGGGGNGYGYLGMVYANGGGDRRSRSQSALSLISSVTTLIALGCLRLL

SEQ ID NO: 571 - DNA, 1506 bp, Sorghum bicolor
atgtctcactctcacgagatgacgagtaggaaacctcctggtcttcagttacttggtggtgccggttcactaagaacataccagacactagtcttggtccttacattctttgcatacacatgctttcatatgactcggaagatcacaagcatcgttaagagcgctctcgatccccagacgaaggttggattctcccactggggacgactgcacatgagcaagagcaacgctcttaacactggctggttgccatttaacactgttgatggttcagcattacttggtgagatagatgttgcgttccttgctgtatattccatcgggatgttctttgctggacatattggggatcgcatggatttgaggatctttctgacaattggcatgattggcactgccatattcacaactctctttggtgctggatattggctgaatgtccacagcttctactatttcttggttattcagatgctttctggcctgtttcaatcaattgggtggccttcagttgttgcggttgttggtaactggtttgggaagagcaagagggggttaatcatgggcatatggaatgcacacacttctattgggaatatagctggctcactgcttgctgcgttcctcctgaagtttgggtggggctggtcatttgccgtccccagccttatcatggctcttgttggtttgatggtgtatattttcttgccggttaatcctgaggtaatggagatagacattgacagtggtgagtttaattgtgagaaggacgctgtgaaggagccccttttggaaccaggccaagaagtgaaacatcaggcagtgggtttcttagaggcatggaggattcctggagttgcgccatttgctctttgcctcttcttctccaaattggttgcatataccttcctgtattggctaccgttctacatcagccatacacgtattggtggtcagtacctctctgatgctatggctggcagcttatcaacaatctttgatgttggtggtgtgttgggaggagtccttgccggtcacatctctgatcgcttaaatgcgcgagcaatcactgctgcaagcttcatgtactgtgcgatacctgccctcttcctgtaccgcacatatggaagcatgtcgataatgtggaacatctccctcatgttcatcactggaatgtttgtgaatgggccttatgccctgatcacaactgcagtgtcagctgatcttggcacccacagctctttgaatggcaactcccgagcactggccactgtgacagcaataattgatgggacggggtctgtcggagctgccatcggaccgttgctaacaggatacatctcatcgaagagctggagtgctgtgttcacaatgttgatggcagcagctctccttgctgggctcctcttgacaaagcttgtatgtgccgaactaaaaggaaaaacaccttccaacgcgagcaaggatgtcgccgatgcagaaggtacctactcagatgaagtgtaa

SEQ ID NO: 572 - protein, 501 aa, Sorghum bicolor
MSHSHEMTSRKPPGLQLLGGAGSLRTYQTLVLVLTFFAYTCFHMTRKITSIVKSALDPQTKVGFSHWGRLHMSKSNALNTGWLPFNTVDGSALLGEIDVAFLAVYSIGMFFAGHIGDRMDLRIFLTIGMIGTAIFTTLFGAGYWLNVHSFYYFLVIQMLSGLFQSIGWPSVVAVVGNWFGKSKRGLIMGIWNAHTSIGNIAGSLLAAFLLKFGWGWSFAVPSLIMALVGLMVYIFLPVNPEVMEIDIDSGEFNCEKDAVKEPLLEPGQEVKHQAVGFLEAWRIPGVAPFALCLFFSKLVAYTFLYWLPFYISHTRIGGQYLSDAMAGSLSTIFDVGGVLGGVLAGHISDRLNARAITAASFMYCAIPALFLYRTYGSMSIMWNISLMFITGMFVNGPYALITTAVSADLGTHSSLNGNSRALATVTAIIDGTGSVGAAIGPLLTGYISSKSWSAVFTMLMAAALLAGLLLTKLVCAELKGKTPSNASKDVADAEGTYSDEV

SEQ ID NO: 573 - DNA, 2886 bp, Sorghum bicolor
atggcaccggcagtactgtcgtcgtcggggctgctgcttctctaccttgccgccgtcgcgtccgtcgccggcgtcctccaagctcgcgcacagcctgacagcattggtttcatcagcatagactgtggcctgtccgggacggcgagctacgtggacgacaccaccaagctgtcgtacgtcccggatgccgggttcatcgacggcgacgccgggtccaaccacaacatctcggccgagtacatgtcgccgatgctctcgaagcgctaccacaacgtgcgcagcttcgccgccggcggcagcgcgcgcaactgctacacgctccgctccatcgtggcggggctcaagtacctcctccgcgccaccttcaagtacggcaactacgacgggctgcgccggctgcccgtcttcgacctccacgtcggcgtcaactactggacgacggtgaacatcacggacgccgacgcggccgtgatcgtcgaggccatcgtcctcgtgccggacacctccgtgcaggtgtgcctcgtcgacaccggctccggggcgcccttcatctccgggctcgacctgcggccgctcaagagcacgctctacccgcaggcgaacgcgacgcagggcctggtcctcctcggccggctcaacttcgggccgaccgacgacacggagctcgtcaggtaccccgacgacccgcacgacaggttgtggataccctgggtggacacggccacctggaactccgtgtcgacggcgcagagggtgcagaacatcgacaacgacatgttcgaggcgccgtccaaggtgatgcagacggcggtggcgccgcgcaacgggtcgaagagcatcgagttcaactgggactcggagccgacgcccaaggacccgacgccagggtacgtcggcatcttccacttctccgagctgcagctcctgcccgccggcgccgtgcggcagttctacatcaacctcaacggcaagccgtggtaccccaaggctttcacgccggagtacctctacagcgacgccgtcttcaacaccaacccctacagggggatcgcccgctacaacatctccatcaacgccaccgccaactccacgctgccgccgatcatcaacgccgtcgaggtgttctccgtcatctccaccaccaacgtccccacggactcccaggacgtatctgccatcacggcgatcaaggccaagtatcatgtgcagaagaattggatgggtgacccgtgcgttcccaagactcttgcgtgggatgggttgacgtgcagctatgccatttcaagccctccaagaatcactggcttgaacctatccttcagtggtcttagcggcgacatatcatcttcttttgcaaacctgaaagccgtccaaaacttggatctgtcgcacaacaacttgacaggctcaattcctgaatccctttcgcaactatcttcactgacagttctagatttgaccagcaaccagctcaatggaacaattccctctggacttctccaaaggattcaagatggctccctaaacctaaaatatggaaacaatccaagcctttgctccaatggcaactcgtgtcagacaacgaagcggaagagcaagctagccatctacattgccatcgctgtagttctggtggttgtggtattagtatcagtggtactgctgctttgcttcatccagaaacaaaaaaagcaaggaccagcgaagaacgccgtgaagcctcagaacgagacgccactgagccctgcgccagcaggcgacgcgtattcgcagagctcgctgcagctcgagaaccgacggttcacgtacaaggagctggagatgatcacgagcaacttccagcgcgtgctcggccggggaggcttcggctccgtctacgatggcttcttggaggatggcacgcaggtggctgtcaagctgcggtctgattcttccaatcagggcgtcaaggagttccttgcagaggctcagaccttgacacggattcatcacaagaatctcgtgtctatgatcggttactgcaaggatggggactacatggcacttgtctacgagtacatgccagaaggcactctacaagagcacattgcaggaaatggtcgcagcagaggattcttgagctggagacagaggctcagaatcgctgtggagtcagcccaagggctggagtatctacacaaagggtgcaacccgtccctcattcacagggatgtgaaggctgccaacatcctactcaacgccaaactggaagccaagatcgccgattttggcctcaccaaggctttcaatcttgacaacaacactcatgtatctacgaatacacttgttggtacacccggatacgttgatccagagtatcaggctacgatgcagccaacgacaaagagcgacgtctacagcttcggcgtcgtgctgctggagctcatcacggggcggccggccgtcctgcgcgacccggagccgacgagcgtcatccagtgggcgcggcagcgcctggcgcggggcaacatcgagggcgtcgtcgacccgcgcatgcgcggcgaccacgacgtcaacggcgtgtggaaggccgcggacgtcgcgctcaagtgcaccgcgcaggcctcggcgcaccgccccaccatgaccgacgtcgtggcgcagctccaggagtgcctccagctcgaggaggctcgcgccgccgccgccgccggcgacgtgaacggcggcggctactacaccggcggcagcagcagcagcgccggcggcccatactccggttacaatgcgtacggcgccggtgagggtggcctgtccactgacgtgagccagagcagcaccgggtttgaggtggagcacaattttgggagggtgccgacgatgcccacgggtcctgccgcgcggtag

SEQ ID NO: 574 - protein, 961 aa, Sorghum bicolor
MAPAVLSSSGLLLLYLAAVASVAGVLQARAQPDSIGFISIDCGLSGTASYVDDTTKLSYVPDAGFIDGDAGSNHNISAEYMSPMLSKRYHNVRSFAAGGSARNCYTLRSIVAGLKYLLRATFKYGNYDGLRRLPVFDLHVGVNYWTTVNITDADAAVIVEAIVLVPDTSVQVCLVDTGSGAPFISGLDLRPLKSTLYPQANATQGLVLLGRLNFGPTDDTELVRYPDDPHDRLWIPWVDTATWNSVSTAQRVQNIDNDMFEAPSKVMQTAVAPRNGSKSIEFNWDSEPTPKDPTPGYVGIFHFSELQLLPAGAVRQFYINLNGKPWYPKAFTPEYLYSDAVFNTNPYRGIARYNISINATANSTLPPIINAVEVFSVISTTNVPTDSQDVSAITAIKAKYHVQKNWMGDPCVPKTLAWDGLTCSYAISSPPRITGLNLSFSGLSGDISSSFANLKAVQNLDLSHNNLTGSIPESLSQLSSLTVLDLTSNQLNGTIPSGLLQRIQDGSLNLKYGNNPSLCSNGNSCQTTKRKSKLAIYIAIAVVLVVVVLVSVVLLLCFIQKQKKQGPAKNAVKPQNETPLSPAPAGDAYSQSSLQLENRRFTYKELEMITSNFQRVLGRGGFGSVYDGFLEDGTQVAVKLRSDSSNQGVKEFLAEAQTLTRIHHKNLVSMIGYCKDGDYMALVYEYMPEGTLQEHIAGNGRSRGFLSWRQRLRIAVESAQGLEYLHKGCNPSLIHRDVKAANILLNAKLEAKIADFGLTKAFNLDNNTHVSTNTLVGTPGYVDPEYQATMQPTTKSDVYSFGVVLLELITGRPAVLRDPEPTSVIQWARQRLARGNIEGVVDPRMRGDHDVNGVWKAADVALKCTAQASAHRPTMTDVVAQLQECLQLEEARAAAAAGDVNGGGYYTGGSSSSAGGPYSGYNAYGAGEGGLSTDVSQSSTGFEVEHNFGRVPTMPTGPAAR

SEQ ID NO: 575 - DNA, 1317 bp, Sorghum bicolor
atggcgccggtgtatgctggggagctcgccggcaccagcggctccggctccggcctgacgctgaacccggtggcgcggcgggcgctcagccgcggcgcgtcgacgtcgacgctgggcacgcccaagtcgcctccgccggcctacgggagcatcgtcaccgtgctgagcatcgacggcggtggcgtgcgcgggatcatcccgggcaccatcctcggcttcctcgaggaaaagctgcaggagctcgacgggccggacgcgaggctggcggactacttcgacgtgatcgccgggaccagcaccggcgggctggtgacggccatgctcacggcgccgaacaaggacggccgtccgctctttgctgccaaggacatcaacgacttctacctcgagcactgccccaagatcttcccatccggcagcagcggcggtcctctggggttgttcaagagcatggcagggcccaagtacgacggcaagtacctccactccatcgtccgggagctcctcggcgagacgagggtcagccaggcgctccagaacatcgtcatccccaccttcgacatcaaactcctccagcccactgtcttctccagatacgatgccatgagcgatgtctccaaggacgctctgctctccgacgtctgcatcagcacgtccgccgcgccgacctaccttccaggccaccagttccagacgacagacaaggacggcaagccccgggccttcaacctcatcgacggtggcgtcgccgcaaacaatccgacgctgctggcgatgacgcacgtgagcaagcagatcctgctgggaaaccaggacttcttcccgatcaagccagcggactacggcaagttcttggtgctgtcgctgggcacgggctccgccaaggtggaggagaagttcgacgccgtggagagcagcaggtggggaatcctggggtggctctacaacaagggagccacgccgatcatcgacagcttcagccaggccagctccgacctcgtcgacatccacgcctccgtgctcttccaggcgctgcactgcagcagcaagagctacctccggatccaggacgacgagctcaagggcgagacggcgtccgtcgacgtgtccaccagggagaacctgaaccgcctcgtcggcgtcggcaaggcgctgctgaagaagccggcgtgcaaggtgaacattgagactggcaggaacgagccggatggacataggggcaccaatgaggaggagctcgtccatttcgctcagatgctggtagatgagcgacgtgcgaggcttcagaagaagggcaacagcacagtactggtgtaa

SEQ ID NO: 576 - protein, 438 aa, Sorghum bicolor
MAPVYAGELAGTSGSGSGLTLNPVARRALSRGASTSTLGTPKSPPPAYGSIVTVLSIDGGGVRGIIPGTILGFLEEKLQELDGPDARLADYFDVIAGTSTGGLVTAMLTAPNKDGRPLFAAKDINDFYLEHCPKIFPSGSSGGPLGLFKSMAGPKYDGKYLHSIVRELLGETRVSQALQNIVIPTFDIKLLQPTVFSRYDAMSDVSKDALLSDVCISTSAAPTYLPGHQFQTTDKDGKPRAFNLIDGGVAANNPTLLAMTHVSKQILLGNQDFFPIKPADYGKFLVLSLGTGSAKVEEKFDAVESSRWGILGWLYNKGATPIIDSFSQASSDLVDIHASVLFQALHCSSKSYLRIQDDELKGETASVDVSTRENLNRLVGVGKALLKKPACKVNIETGRNEPDGHRGTNEEELVHFAQMLVDERRARLQKKGNSTVLV

SEQ ID NO: 577 - DNA, 1119 bp, Sorghum bicolor
atggagaaaggaaaacacatccagccaccgacttatggcaaccttgtaacgattctttctattgatggtggaggcattcgaggaatcattccggctgttgttctcacctttctggaatcagagttgcagaaacttgatggagaggaagccaggttagcagattacttcgatgtcgttgctgggaccagcacaggggggcttgtgacctcaatgctggttgcaccaaacaatacaaacaggccactctttgcagccaaggatattcaagcattttatatgaaccatgctcccaagattttcccacagcagaggggtccatttggtaagataatgaggatattccgatcgctgtcaggaccttcctatgatggtaagtaccttcatgatgttgtcagaaagaagttaggaatcaccaggctgcatgagactttaacagatgtggtaataccaactttcgacatcaagcggctacaacctattattttctcgtcctatgaggttaagaatgagaagtacaacacaatggatgctctactatcagatatttgtatcagcacatctgctgctccaacttatcttcctgcacactacttcaaaacagaagattgccatgggaacaccaaggagttccatcttattgatggaggagtagctgccaataatccggctttagttgccattggagaagtaaccaagcagatattcaaggaaaacccagatttcttcccaataaaacctatggattatggccggtttttggtcatttcactaggcacaggctccgcaaagtttgaagcaaactacaatgcacaaaaggctaaatcatggggagtgttgggttggttgcttggcagtggatccactcccttggtagatattttcacacaggcaagtgcagatatggtggatatccatatctctgctgttttcaaagccttgcattctgagcaaaactatctgaggattcaggatgatactctacaagggacactgtcctcggttgatgttgcaaccaaggaaaatatggagaaacttgccagagttggagatatgctactaaagaaacctgtgtcacatgtgaatttggaaactggccatatggtgcctgcctgtcatagg

SEQ ID NO: 578 - protein, 373 aa, Sorghum bicolor
MEKGKHIQPPTYGNLVTILSIDGGGIRGIIPAVVLTFLESELQKLDGEEARLADYFDVVAGTSTGGLVTSMLVAPNNTNRPLFAAKDIQAFYMNHAPKIFPQQRGPFGKIMRIFRSLSGPSYDGKYLHDVVRKKLGITRLHETLTDVVIPTFDIKRLQPIIFSSYEVKNEKYNTMDALLSDICISTSAAPTYLPAHYFKTEDCHGNTKEFHLIDGGVAANNPALVAIGEVTKQIFKENPDFFPIKPMDYGRFLVISLGTGSAKFEANYNAQKAKSWGVLGWLLGSGSTPLVDIFTQASADMVDIHISAVFKALHSEQNYLRIQDDTLQGTLSSVDVATKENMEKLARVGDMLLKKPVSHVNLETGHMVPACHR

SEQ ID NO: 579 - DNA, 1740 bp, Sorghum bicolor
atggggtcgaggcggcggcggcaccaccaccacggccggtgggtggtgcccgccgtggcgccggccgcggcggcgttcgcagcggcggggttgctcttcctcgtcgtcgcgttccactgcttcctgtcgccgccgcaaagcgacggcggtggcggtggtgccagtggcagctcccgtgtcttccggcgcccgaacccgccgttcctgttgaacaagccagcggaggtgcgcagaaatgtaatcggcgccgtggatttcgctgttcccagcggtgggagcaagcttggggagcagctctgggagtcgaaggcggcgggcaacttcttcggctgcagcaacgccaccaagcaattcgccgatgccgaggctgtgaccaagtcggaccgttacttgatgatcgcgaccagcggcggactgaatcagcagcgaacagggagcttttcttcagttgtactcgtccacatactgaatgcaacacttgtcattccaaagctggatgaagaatccttctggaaagatgcgagcgactttgcagagatatttgatgttgattcattcatatcctcactctcgaatgatgtaaagatcgtacgacaagtacctgacaggaatgggaaaccaccttcgccatataagatgcgtattcctagaaagtgtactcctaaatgctatgagagccgagtgttgcctgctcttctaaagaagcatgttgttcagttaaccaaatttgactaccgattatcaaataagctagagactgatcttcaaaagcttaggtgtagagtcaattatcatgcactaaggtttacagacccaatcttcagaatgggtgaaatgcttgtccaaagaatgagggaaaaaagtgggcgcttcattgctcttcacctaagatttgagcctgacatgcttgcgttctctggttgctactatgggggtggagacattgagagaagagaacttggtgagattcgtaagaggtggaagaccctgcatgcaagcaaccctgacagagaacggcggcacggaaagtgccctctaacaccagaggaagtagggctcatgcttagggcattgggatttgggaaggacgtgcacctttatgttgcatcaggagatgtatatggaggcgaggagacactggcacctctgaaagcactcttcccaaactttcactcaaaggaaactctagcaaacaaggagttagctcctttcttaccatattcatctcgcatggctgctcttgattttattgtatgcgacaggagtgatgtttttgtgacaaacaacaatggcaacatggccagaatgttggctggtcgaaggagatattttgggcacaagaggaccataaggcccaacactaagaaactttactcattgtttctgaatcgaaccagcatgagttgggacacatttgcatctaaagttcagaccttccaaaagggattcatgggggagcccaatgagattaaactaggaagaggcgaattccatgagcatcctgcagattgcatttgtgcaaaatcgaagggaaaaactggacagagcaggcctcacctagttaaaggagctggagaagctgtggagagccactctattgatggggaacttgactggaaggatttggactacggagagcatacacccttgggcagggattcatctaatgaaacagaatcagatgatattcgtgttggtggatcagacattcctgaattggaggatatgatgtcagactag

SEQ ID NO: 580 - protein, 579 aa, Sorghum bicolor
MGSRRRRHHHHGRWVVPAVAPAAAAFAAAGLLFLVVAFHCFLSPPQSDGGGGGASGSSRVFRRPNPPFLLNKPAEVRRNVIGAVDFAVPSGGSKLGEQLWESKAAGNFFGCSNATKQFADAEAVTKSDRYLMIATSGGLNQQRTGSFSSVVLVHILNATLVIPKLDEESFWKDASDFAEIFDVDSFISSLSNDVKIVRQVPDRNGKPPSPYKMRIPRKCTPKCYESRVLPALLKKHVVQLTKFDYRLSNKLETDLQKLRCRVNYHALRFTDPIFRMGEMLVQRMREKSGRFIALHLRFEPDMLAFSGCYYGGGDIERRELGEIRKRWKTLHASNPDRERRHGKCPLTPEEVGLMLRALGFGKDVHLYVASGDVYGGEETLAPLKALFPNFHSKETLANKELAPFLPYSSRMAALDFIVCDRSDVFVTNNNGNMARMLAGRRRYFGHKRTIRPNTKKLYSLFLNRTSMSWDTFASKVQTFQKGFMGEPNEIKLGRGEFHEHPADCICAKSKGKTGQSRPHLVKGAGEAVESHSIDGELDWKDLDYGEHTPLGRDSSNETESDDIRVGGSDIPELEDMMSD

SEQ ID NO: 581 - DNA, 1560 bp, Sorghum bicolor
atggtgcgcttcctccggcgcggacacagccttgacaagaccggatcgcacaacagcagcaaccagcagcagcgagagcgccacctcgacaggagcggcagcgacacgggcgagatgcacgagtcccttggcaatggcgccggcggcacaccgccgcttcccaacggccgggctgcggcggccggcgcggcgcggacgcgcctgggccgcgacggcccaccctcagagctggacaccatgaaggagaagttcgccaagctcctgctgggcgaggacatgtccggcaccggcaagggcgtggcgtccgcgctggcgctgtccaacgccgtcaccaacctggcggcgtccgtcttcggcgagcaccgcaagctggagcccatggcgcccgacaccaaggagcgctggaagagggaggtgggatggctgctctccgtcaccgaccacatcgtcgagttcgtgcccacgcgccagaccgccgagaacgggacaacaatggagatcatgtccacggcgcagcggcgcgacctcgccatgaacatccccgcgctgcggaagctcgacgccatgctcatcggctacatggacaacttcgttgaccagaccgagttctggtacgagaagggcggtgacaacaagcgcgacgacgacaagtggtggatgccgacggtgaaggtgccgtcggaggggctgtcggacgtgacccgcaagtggctgcagtaccagaaggagtgcgtcaaccaggtgctcaaggcggccatggccatcaacgcgcaggtgctcgtggagatggagatcccggagatctacatcgagtcgctgccaaagaaagggaagacgagccttggcgacgcaatctaccgcagcatcaccgaggacacgttcgaccctctggagttcttggccggcatggacctctccacggagcacaaggtgctggacctcaagaaccgcatcgaggcctccaccgtgatctggaagcgcaagatgcagaccaaggactccaagtcctcgtggagctccatcgtcagcttcgagaagcgcgagcagttcgaggagcgcgccgagaccatcctccacctgctcaagatccagttcccggggacgccgcagtcgcagctcgacatctccaagatccagtacaacagggacgtgggttacgccctgctggagagctactcgcgcgtgctggagagcctggcgtacagcgtcatgtcgcggatcgaggacgtgctgagcgcggacgcggcggcgcagaacctgacggcgacggaggcggcgcggcggatgatggagtcggcggagctgcccgcggcgcggaagctggacgccaaggaggagctggagaagctgaacgaggcgccggcgtcgatgacgctcttcgacttcatgggctggcacttcgaccaggacgagctgatgaagcgcagggaggacggaacgctggacgccgacggcgaggccatgctcctcaagaaggcgccaagcatggcgcccaagaagttctcctacgtcgacagcctcgccgccggcggcatgaggagcccctcggcgcgccactga

SEQ ID NO: 582 - protein, 519 aa, Sorghum bicolor
MVRFLRRGHSLDKTGSHNSSNQQQRERHLDRSGSDTGEMHESLGNGAGGTPPLPNGRAAAAGAARTRLGRDGPPSELDTMKEKFAKLLLGEDMSGTGKGVASALALSNAVTNLAASVFGEHRKLEPMAPDTKERWKREVGWLLSVTDHIVEFVPTRQTAENGTTMEIMSTAQRRDLAMNIPALRKLDAMLIGYMDNFVDQTEFWYEKGGDNKRDDDKWWMPTVKVPSEGLSDVTRKWLQYQKECVNQVLKAAMAINAQVLVEMEIPEIYIESLPKKGKTSLGDAIYRSITEDTFDPLEFLAGMDLSTEHKVLDLKNRIEASTVIWKRKMQTKDSKSSWSSIVSFEKREQFEERAETILHLLKIQFPGTPQSQLDISKIQYNRDVGYALLESYSRVLESLAYSVMSRIEDVLSADAAAQNLTATEAARRMMESAELPAARKLDAKEELEKLNEAPASMTLFDFMGWHFDQDELMKRREDGTLDADGEAMLLKKAPSMAPKKFSYVDSLAAGGMRSPSARH

SEQ ID NO: 583 - DNA, 996 bp, Sorghum bicolor
atggcagcaccagaaatggcagctcttctcctgctttcgttcactgttatactgctgagaagttcctctgttcgtagtcaaggactgcagatcgggttctacgactcctactgtcctgacgccgaggatatcgtgaggtcgactgtcgagcagtactacgacagggatgccaccatcgccccaggcttgctcaggctacacttccatgactgctttgttcaggggtgcgacgcatcagtcttgatctctggatcatcttcagaaaggagtgcaccacagaattttgggctcagggggtttgaggtgatagatgacgccaagtcccagctagaagccgtgtgccctggggtggtgtcatgcgctgatatccttgctctcgccgcgcgtgacgctgttgatctgactggtgggccaagctggtcagtgccgctggggagaagagacgggagactctcgtcagcttctggcgccaacgccttgccatcgcctgccgatcctgtatccgttcagaggaagaagttcgcggaccagggactgacagaccacgacctcgtcacattggtaggcgctcacacgatcgggcagaccgattgccagttcttcagctaccggctgtacaacttcacggcgacgggcaacgcggacccgaccatcagccaggcgtcgctggcgcagctccgggcgctgtgcccaccgcccagcggcggcgacccggccgggcggcgggtggcgctggaccagggtagccctggcgcgttcgacgtgagcttcttcaagaacgtccgcgacggcggcgcggtcctggagtcggaccagcggctgtggagcgacgccgccacgcagggcgtggtgcagaagtacgccggcaatgttcggggactcttcggcctcaggttcgggtacgagctccccaaggccatggtgaggatgagcagcatcggggtgaagaccggcgggcagggcgagatcaggaggaggtgctccagggtcaactga

SEQ ID NO: 584 - protein, 331 aa, Sorghum bicolor
MAAPEMAALLLLSFTVILLRSSSVRSQGLQIGFYDSYCPDAEDIVRSTVEQYYDRDATIAPGLLRLHFHDCFVQGCDASVLISGSSSERSAPQNFGLRGFEVIDDAKSQLEAVCPGVVSCADILALAARDAVDLTGGPSWSVPLGRRDGRLSSASGANALPSPADPVSVQRKKFADQGLTDHDLVTLVGAHTIGQTDCQFFSYRLYNFTATGNADPTISQASLAQLRALCPPPSGGDPAGRRVALDQGSPGAFDVSFFKNVRDGGAVLESDQRLWSDAATQGVVQKYAGNVRGLFGLRFGYELPKAMVRMSSIGVKTGGQGEIRRRCSRVN

SEQ ID NO: 585 - DNA, 831 bp, Sorghum bicolor
atgggcatgattcatacaccatataccatgaagtttagcacaatgcgctgctgcgtgctgcttgtctccttggctctgctcccgctgggcatggccgcggactccatcggcagctactgctcaggaagccgctacgcgggcagcaacaaggccgtgaccagcatcaactccgtcctcgccgacctcgtcgccacggcctccaccggaggcggctacgccacgtccaccgccggcaagggcaacaacatcatctacggcctcgcgcaatgccgcggcgacgtctccgccagcgactgcgcggcctgccttgccgacgccgccaagcagctccccagcacttgcagctacagttccgacgccagaatatggtatgactactgcttcatgcggtacgagaacgccgacttcttcgggcaggcggacacgggcgcgggcgtgatcctggtgaacgtgcaggccatggacaacccgaaggcgttcgagaaggcggtgggaaaagtgatcggcaaggcgacggcgcaggcgtcggcggcgggcagcgcggggctcgggcgggacaaggatcagtacacgccgttcgtgtccatctacgggctggcgcagtgcacgcgggacctcgcgccgctgacgtgcgcgcagtgcctgtccacggcggtgtccaggttcggcgactactgcggcgcgcagcaggggtgccagatcaactacagcagctgcagggtgcgctacgagatctaccccttctacttcccgctcgccggcaacggcggcgccggcggccgcgccaccaccgatatgacgaagaacaccaagatcatcgtgcatccttga

SEQ ID NO: 586 - protein, 276 aa, Sorghum bicolor
MGMIHTPYTMKFSTMRCCVLLVSLALLPLGMAADSIGSYCSGSRYAGSNKAVTSINSVLADLVATASTGGGYATSTAGKGNNIIYGLAQCRGDVSASDCAACLADAAKQLPSTCSYSSDARIWYDYCFMRYENADFFGQADTGAGVILVNVQAMDNPKAFEKAVGKVIGKATAQASAAGSAGLGRDKDQYTPFVSIYGLAQCTRDLAPLTCAQCLSTAVSRFGDYCGAQQGCQINYSSCRVRYEIYPFYFPLAGNGGAGGRATTDMTKNTKIIVHP

SEQ ID NO: 587 - DNA, 1014 bp, Sorghum bicolor
atggagaaacgaagacgcaggcacttgctgcttgctgctgcagccgtggtgctggtggcagtggcagcaataccgctgccgtccgcggaggcgaagctgtccccagactactaccggtcgacgtgcccggacgtcgaggcgatcgtgcgggcagtggtggcgaagaaggtcaatgagaccttcgtcacggtcccggccacgctcaggctcttcttccacgactgcttcgtcgagggctgtgatgcgtcggtcatgatcgcgtcccgcgacaacgacgccgagaaggacgcgcccgacaacgtgtccctcgccggcgacggcttcgacaccgtggtgcgcgccaaggccgaggtcgagaagaagtgccccggcgtggtctcctgcgccgacatcctcgccatcgccgccagggacgtcgtcgccatgtcgtccggcccccactggaccgtccagcttgggcggcttgacgggctcgtctccaaggccggcaacgtcgcgggcaagttgccgggacccaacatgcgcgtcaaggacctcgccgccatgttcgccaagcacaacctcacgacgctggacatggtcgcgctctcgggcgcgcacaccgtcgggttcgcgcactgcacccgcttcacggaccgcctctaccgccacggcggcggcggcaatggcgcgtcggtggacccgtcgtacaaccctgcgtacgcgcggcagctcatgggcgcctgcccgccggacgtcggcgcggacatcgccgtcgatatggacccgatcacaccgaccgccttcgataacgcctactacgccaacctcgccggcggcctgggcctgttcgcctccgaccaggcgctgtacagcgacggcgcgtcgcggccggcggtgaggggcttcgctgggaaccagacgcgcttcttcgaggcgttcaaggacgccatggtgaagctgggcagtgttggggtgaagaccaccggcaggcacggggagatcagaagagactgcaccgcattcaacgagtag

SEQ ID NO: 588 - protein, 337 aa, Sorghum bicolor
MEKRRRRHLLLAAAAVVLVAVAAIPLPSAEAKLSPDYYRSTCPDVEAIVRAVVAKKVNETFVTVPATLRLFFHDCFVEGCDASVMIASRDNDAEKDAPDNVSLAGDGFDTVVRAKAEVEKKCPGVVSCADILAIAARDVVAMSSGPHWTVQLGRLDGLVSKAGNVAGKLPGPNMRVKDLAAMFAKHNLTTLDMVALSGAHTVGFAHCTRFTDRLYRHGGGGNGASVDPSYNPAYARQLMGACPPDVGADIAVDMDPITPTAFDNAYYANLAGGLGLFASDQALYSDGASRPAVRGFAGNQTRFFEAFKDAMVKLGSVGVKTTGRHGEIRRDCTAFNE

SEQ ID NO: 589 - DNA, 1386 bp, Sorghum bicolor
atgatcctccgcagcgcggcggctttcgcgctgctgctgctgctgctcgcgtccccggcggcgacggcgcaggagggcggcggggacgccgtctccgagccgtacgcgtcgtcgctggcgacccgcttcgacgcgccgccgtcgtgggcgttcccgaacgctcgcctccgcgcgtcctacgccgcgctgcaggcgtggaagcgcaccgccatcttctccgacccgtccaacttcaccgccaactgggtggggcccaacgtctgcgcctacaacggcgtcttctgcgcgccactcccgggctcccaccccggcgacgtcgtcgtcgccgggatcgacctcaaccacgccgacatcgccgggtacctcccggcgtcgctgccgctgggcgtccccgacctcgcactcttccacatcaactccaaccgcttctgcggcgtcgtcccacacacctttgcgcacctccacctcctccacgagcttgacctcagcaacaaccgcttcgtgggcgggttcccggaggtggtgctgtcgctgccggcgctccggtacctcgacctccgcttcaacgacttcgagggcagcatcccgccggcgctcttcgaccgcccgctcgacgccatcttcctcaactccaaccgcctccgcaacccgatcccggccaacctcggcaactcgccggcctccgtcgtcgtgctcgctcacaaccgcctcggcggttgcatcccgcccagcatcggacggatggccgacacgctcaacgagatcgtgctcatcgacgacgagctcacgggatgcgtcccgccgcaggtcggcttgctccggaagctcaccgtcttcgacgtcagcgacaaccacctgcaggggcagctcccggctgccatcgtgaacatggctgctgtcgaggagctcgacgtcgcacgcaaccgcttcgagggcgcggtgccggccggcgtctgcgcgcttgccagcctcaggaacttcacctacaccgacaacttcttcacctctcgcccgccttgcgccaaggccaccgctgacggcgcctggaattgcattcccggcgcgccggcgcagcgcccgccgtcgcagtgcgcggccgccgcggcgcacccgttcgactgcagcaaggcgcaatgccaggcagccccgggcggctacaccccaacgccgggaggcggcggaagaggtggccacggaaccggcaagcggccgcccacgccgtacagtgggcaggtgacggtgcgcggcggcagccagccagccagcagcacggtggtcggtggccggtgggtgagcagcatcgatgcggccatgcggggccaacaactactggggtcgcttgatcctgcacgaccgattcacattcacccggccgttaaccactga

SEQ ID NO: 590 - protein, 461 aa, Sorghum bicolor
MILRSAAAFALLLLLLASPAATAQEGGGDAVSEPYASSLATRFDAPPSWAFPNARLRASYAALQAWKRTAIFSDPSNFTANWVGPNVCAYNGVFCAPLPGSHPGDVVVAGIDLNHADIAGYLPASLPLGVPDLALFHINSNRFCGVVPHTFAHLHLLHELDLSNNRFVGGFPEVVLSLPALRYLDLRFNDFEGSIPPALFDRPLDAIFLNSNRLRNPIPANLGNSPASVVVLAHNRLGGCIPPSIGRMADTLNEIVLIDDELTGCVPPQVGLLRKLTVFDVSDNHLQGQLPAAIVNMAAVEELDVARNRFEGAVPAGVCALASLRNFTYTDNFFTSRPPCAKATADGAWNCIPGAPAQRPPSQCAAAAAHPFDCSKAQCQAAPGGYTPTPGGGGRGGHGTGKRPPTPYSGQVTVRGGSQPASSTVVGGRWVSSIDAAMRGQQLLGSLDPARPIHIHPAVNH

SEQ ID NO: 591 - DNA, 795 bp, Sorghum bicolor
atggcttctccctccacaggcacggccttcttggccctcgtcatcatcttcttggctttgctatgtgcggccaccacggcgaacgcgaggttcacggcgatgcagtggactccggcgcacgccaccttctacggcgacgagaccgcagcggagaccatgggtggggcgtgcggatatggcaacctgtacgcgaccgggtacggcacggacacggcggcgctgagcacgacgctgttcaaggacgggcacggttgcgggacgtgctaccagatccggtgcacgggttccccgtggtgctacgccggctcgccgtcgatcacggtgacggccaccaacctgtgcccgcccaactgggcgcaggacaccaacaacggcgggtggtgcaacccgccgcgcacccacttcgacctctccaagccggccttcatgaagatggcgcagtggcgcgccgggatcgtgcccgtcatgtaccgccgcgtgccctgcgtgcgcaggggcggcctccggttcgcgctccaggggaacccttactggctgctggcgtacgtgatgaacgtcggcggcgccggcgacgtcgtcgagatgtgggtgaagagcggcacgtcgtcctgcgcgtggatacggatgacccacaactggggcgccgcgtaccaggcgttcgcgcagctcggcggcaaggcgctcagcttcaaggtcacctcctacaccacccggcagaccatcgtcgccaccaacgtcgcgccggcgaactggggcctggggctcacgtaccaggcccgcgtcaacttctcctga

SEQ ID NO: 592 - protein, 264 aa, Sorghum bicolor
MASPSTGTAFLALVIIFLALLCAATTANARFTAMQWTPAHATFYGDETAAETMGGACGYGNLYATGYGTDTAALSTTLFKDGHGCGTCYQIRCTGSPWCYAGSPSITVTATNLCPPNWAQDTNNGGWCNPPRTHFDLSKPAFMKMAQWRAGIVPVMYRRVPCVRRGGLRFALQGNPYWLLAYVMNVGGAGDVVEMWVKSGTSSCAWIRMTHNWGAAYQAFAQLGGKALSFKVTSYTTRQTIVATNVAPANWGLGLTYQARVNFS

SEQ ID NO: 593 - DNA, 1386 bp, Sorghum bicolor; identical to SEQ ID NO: 589

SEQ ID NO: 594 - protein, 461 aa, Sorghum bicolor; identical to SEQ ID NO: 590

SEQ ID NO: 595 - DNA, 795 bp, Sorghum bicolor; identical to SEQ ID NO: 591

SEQ ID NO: 596 - protein, 264 aa, Sorghum bicolor; identical to SEQ ID NO: 592

SEQ ID NO: 597 - DNA, 933 bp, Sorghum bicolor
atggcgatggccaggaagcctacctgcgctctccctctcctccttgtagccttcctctgcttcacatgctctgtctttgctcacatccacgacgactacgacgatccgaggtacgggcctgggggtttcggccgtggtcccggcccgaaaggcggctatggacgcggtccgcgcttcggacgtggaccgtttggccgtgactgccgcttcggccgctgccgcggaggtggtggcgggcttggaggcggtggaggcttcggaggtggaggtggagctggcggtggtggtggccttggaggtggcggcgggctcggcggtggaggaggtggtggcctcggtggtggaggtggcgcgggtgctggaggaggctttggtggtggcgtcggaggtggtgcaggaggtgggcttggtggtggaggcggtggtggatttggaggaggcggcggcggtaagggtggaggttttggagccggcagtagtatgcgaggtggagctggcggaggtggcggccttggtggtggtggcggtggcggcataggcggtggtggtggcagtgggctaggcggtggtgctggaggaggattcggtggcggagcaggcggtggcgttggaggaggaggcggccttggtggtggcggcggcggcggtatgggcggtggtggaggcggtgggatgggcggtggcgccggcggcgggttcggtggcggagcaggtggaggactcggtcatggcggtggtctcggaggcggaggtggcctcggtggtggaggcggcgccggaggaggcctcgggcacggcgttggtctcggcggaggcggcggtggcggcctcggcatcggcattggtgttggcgtcggagtagggatgggcgcgggggcaggcggcggcgccggtgcgggtgcgggtgcgggtgctggcggcggcgggcgttga

SEQ ID NO: 598 - protein, 310 aa, Sorghum bicolor
MAMARKPTCALPLLLVAFLCFTCSVFAHIHDDYDDPRYGPGGFGRGPGPKGGYGRGPRFGRGPFGRDCRFGRCRGGGGGLGGGGGFGGGGGAGGGGGLGGGGGLGGGGGGGLGGGGGAGAGGGFGGGVGGGAGGGLGGGGGGGFGGGGGGKGGGFGAGSSMRGGAGGGGGLGGGGGGGIGGGGGSGLGGGAGGGFGGGAGGGVGGGGGLGGGGGGGMGGGGGGGMGGGAGGGFGGGAGGGLGHGGGLGGGGGLGGGGGAGGGLGHGVGLGGGGGGGLGIGIGVGVGVGMGAGAGGGAGAGAGAGAGGGGR

SEQ ID NO: 599 - DNA, 1191 bp, Arabidopsis thaliana
atgtattcagaggaaaagaaaagcagaaattatggttcaatctttgtctactgcttcttctgtttcgtactcattgtggaggttgcaagattcgcaaaaccttatatcaaccttcaaaacctaattgagacggaagcagtagtagaagaaggtttcatggcggtggggaactcagggaatcttccgtgtggctcgtcaaaacctagctctgcctctgttcgtgctcatgatgaacagaagctctcgcaagcagtaacaacagatacgagaactcgtcctccaaattcgtactgcgtgaagttccagtcttttgtcactatggcaaagcaggtcaaagaaaacggtggcaagtatgagtcacgtcctttctccgtcggtggatacaattggacgctcctaatctacccagtcatatacattccaacggactcgggtgggtacgtttcgatttacgtaagagtcgataactcaagcctcatcaccaatccaaaagatgtgtatgcagagatcacattcctcgcttataaaagcagtacagacaagtaccaaataagccaggagactgaggcccagcgatttcatttgtttaaacaacagtggggacttttacaatttctaccaatttactattttgaaaatccggcatatggatactttttcgagggcgaaagcgttgtgtttggcgttgacatcaacattgttaaaccctttgaaaattgggaagtgttctctaatgaacaaaacattcgtgaccctattttcgaatggagactcaccaaattctctacacgttttcttgactcttacacttctgattccttttcttccggaggaagaaactgggcattgaaagtgtatccaaatggagttggaaatgctacgggtaattcgttgtcactctatttgttgagtgatcagtcaaatgataagggttatgtggaagctaagttacgagttattgaccagatccaatccaacaatttcgagaaaaaagtggcggcatggcccaatgcaacggagaatggatggggtttcgacaggtttctatcatttgcagatatcaaaaacacatcaaaaggtttcctagtcaacgatactctcaaacttgaagtccagatcttgtccttctcgaaaaccgactactactctcatcaatcgtctcttaatgttttaacgggagatagtacttag

SEQ ID NO: 600 - protein, 396 aa, Arabidopsis thaliana
MYSEEKKSRNYGSIFVYCFFCFVLIVEVARFAKPYINLQNLIETEAVVEEGFMAVGNSGNLPCGSSKPSSASVRAHDEQKLSQAVTTDTRTRPPNSYCVKFQSFVTMAKQVKENGGKYESRPFSVGGYNWTLLIYPVIYIPTDSGGYVSIYVRVDNSSLITNPKDVYAEITFLAYKSSTDKYQISQETEAQRFHLFKQQWGLLQFLPIYYFENPAYGYFFEGESVVFGVDINIVKPFENWEVFSNEQNIRDPIFEWRLTKFSTRFLDSYTSDSFSSGGRNWALKVYPNGVGNATGNSLSLYLLSDQSNDKGYVEAKLRVIDQIQSNNFEKKVAAWPNATENGWGFDRFLSFADIKNTSKGFLVNDTLKLEVQILSFSKTDYYSHQSSLNVLTGDST

SEQ ID NO: 601 - DNA, 1470 bp, Sorghum bicolor
atggcgacgtgcgccacgaccctcgcgccgcttctgggcccggcggcggcgaacgcgacggagtacctgtgcaaccagttcgcggacaccacgtcggcggtggactcgacgtacctgctcttctcggcgtacctcgtcttcgccatgcagctcgggttcgccatgctctgcgcgggctccgtccgcgccaagaacaccatgaacatcatgctcaccaacgtgctcgacgccgccgccggcgcgctcttctactacctcttcggcttcgccttcgcgtacgggaccccgtccaacggcttcatcggcaagcacttcttcggcctcaagcgacttccccaggtcggcttcgactacgacttcttcctcttccagtgggccttcgccatcgccgccgccgggatcacgtcgggctccatcgccgagcgcacgcagttcgtcgcgtacctcatctactccgccttcctcaccggcttcgtgtacccggtcgtgtcccactgggtctggtccgccgacggctgggcctcgccgacccggacgtcggggaacctgctcttcggctccggcatcatcgacttcgccgggtccagcgtcgtccacatggtcggcggcatcgccggcctctggggcgccctcatcgagggcccacgcattggccggttcgaccacgcaggccgctccgtggcgctgcgcggccacagcgcgtcgctcgtcgtgctcggcaccttcctgctctggttcggctggttcggcttcaaccccgggtcgttcctcaccatcctcaagagctacggccccgccggaagcatccacgggcagtggtcggccgtgggccgcacggcggtcaccaccacgctcgccggcagcacggcggcgctcacgacgctgttcgggaagaggctccagacggggcactggaacgtggtggacgtctgcaacggcctcctgggcggcttcgcggccatcaccgcgggctgctccgtggtcgacccttgggcggccgtcatctgcgggttcgtgtcggcgtgggtgctcatcgggctcaacgcgctggccgccaggctccggttcgacgacccgctggaggccgcgcagctgcacggcgggtgcggcgcgtggggggtgctcttcacggcgctgttcgcgcgcagggagtacgtggagcagatctacggcacgccggggcggccgtacggcctcttcatgggcggcggcgggaggctgctggcggcgaacgtggtgatgatcctggtgatcgcggcgtgggtgagcgtcaccatggccccgctgttcctggcgctcaacaagctgggcctgctccgcgtctcggccgaggacgagatggccggcatggaccagacgcggcacggcgggttcgcgtacgcgtaccacgacgaggacatgagcttgagcagcagacccaagggggctcagagcacgcagatcgcggccgcgtccagcggcgagttctag

SEQ ID NO: 602 - protein, 489 aa, Sorghum bicolor
MATCATTLAPLLGPAAANATEYLCNQFADTTSAVDSTYLLFSAYLVFAMQLGFAMLCAGSVRAKNTMNIMLTNVLDAAAGALFYYLFGFAFAYGTPSNGFIGKHFFGLKRLPQVGFDYDFFLFQWAFAIAAAGITSGSIAERTQFVAYLIYSAFLTGFVYPVVSHWVWSADGWASPTRTSGNLLFGSGIIDFAGSSVVHMVGGIAGLWGALIEGPRIGRFDHAGRSVALRGHSASLVVLGTFLLWFGWFGFNPGSFLTILKSYGPAGSIHGQWSAVGRTAVTTTLAGSTAALTTLFGKRLQTGHWNVVDVCNGLLGGFAAITAGCSVVDPWAAVICGFVSAWVLIGLNALAARLRFDDPLEAAQLHGGCGAWGVLFTALFARREYVEQIYGTPGRPYGLFMGGGGRLLAANVVMILVIAAWVSVTMAPLFLALNKLGLLRVSAEDEMAGMDQTRHGGFAYAYHDEDMSLSSRPKGAQSTQIAAASSGEF

SEQ ID NO: 603 - DNA, 888 bp, Sorghum bicolor
atgatggctatgcagcagcagcagcagcagcacgcggggtcggcgtccgggtcggcgtccgggtcggcgtcgagctccagctcggggctgcaccttctcgcctcgccctcgtccttcggggacaccacccacaccaaggttttcgtgggcgggctcgcctgggagaccaacagcgacaggctccggcgcttctacgagcgcttcggggacattctcgaggccgtcgtcatcaccgaccgccactctggccgctccaagggatacggattcgtgacattccgtgaagccgattccgcgaggaaggcctgcgaggaccccacgccggtgatcgacggcaggcgggccaattgtaacctggcttcgttgggtcgagcccagcatcccgtgcctcctgggcggccaagatcagctgggtcctactttggtgtcccagttccaagggccttttatttagggggttatggccaccgaccgtttccacttgggtactaccaaggatttccagttccccagtacagttacccttcatatggaaccgaatacatctatccacagggtacattaaacccatattctggtcagcaatatcttcctatttatggagtctcagctgcagcaaacactggcaaccaaacatttagccagttgagtccatccatttctggtgggggcaatggttatttgtcggttcatagttacaacatgcctggaaatcaatatgtgcagctcactggatcaaacttcagcagtgcatcaccaacagctcgaccttccattcagactccttttctagtagcaacaccggttcccgcacatccacacctaataattccagccccctcaccccagtttacacaagctagtggttcagaccaaagagcaagctga

SEQ ID NO: 604 - protein, 295 aa, Sorghum bicolor
MMAMQQQQQQHAGSASGSASGSASSSSSGLHLLASPSSFGDTTHTKVFVGGLAWETNSDRLRRFYERFGDILEAVVITDRHSGRSKGYGFVTFREADSARKACEDPTPVIDGRRANCNLASLGRAQHPVPPGRPRSAGSYFGVPVPRAFYLGGYGHRPFPLGYYQGFPVPQYSYPSYGTEYIYPQGTLNPYSGQQYLPIYGVSAAANTGNQTFSQLSPSISGGGNGYLSVHSYNMPGNQYVQLTGSNFSSASPTARPSIQTPFLVATPVPAHPHLIIPAPSPQFTQASGSDQRAS

SEQ ID NO: 605 - DNA, 891 bp, Sorghum bicolor
atggccgtgtacatccgactcgatgacgccgtccgcgcgcgcctccgcggggacgccgcggggtgcaccatcaccagcagcggcagcgaccacgacgcgtccgcctgcctctccgagctcgtccaggcgttcctcgagacgggcgccggcgcggccgaggaaggcgtgcccggcccggcgcccaaggagtacgacgaatctggcgaggaagacgcgcccgggcgggcggccgccgccgcggcgtccgtgagggcactgctcgacccacccgcggaggaggacgtgttccggatcaggctggccgccgcggtggcgacggccatggaggtggaggccgcgctgcgggcgcacggcgcgtcgttccggcgcgcggtggttcggcggctgcgtggcgcagggtacgacgctggcgtgtgcaagtcgcggtgggaggcgtccggcggcatcactgccgggacgtacgagtacgtcgacgtggtcgcgccgctggcggcggacgggcggaagcgggccaggtacattgtggacgccgacttccgtgcggggctggaggtggcccgcgccacgcccgagtatgcggccgtcgtcgccgaggtgccggcgtcggcggtggtcgcaagggaggagtccgtcggccgcgccgtgcgcgtcgcgtccgacgccgcgcgccgctcgctccgcgcccacggcctccacgtcccgccctggcgcaagacgcggtacatgctcgccaagtggctcggcccctacaagcgctccaccgccacctcgctgccggcggcgaacgccggagcaatgccgatgaccggcggggccgggatggacatcaagtgccgcgccgtcgggttctttgcgcctccggccaccgcgccggcggccaggatcaagtag

SEQ ID NO: 606 - protein, 296 aa, Sorghum bicolor
MAVYIRLDDAVRARLRGDAAGCTITSSGSDHDASACLSELVQAFLETGAGAAEEGVPGPAPKEYDESGEEDAPGRAAAAAASVRALLDPPAEEDVFRIRLAAAVATAMEVEAALRAHGASFRRAVVRRLRGAGYDAGVCKSRWEASGGITAGTYEYVDVVAPLAADGRKRARYIVDADFRAGLEVARATPEYAAVVAEVPASAVVAREESVGRAVRVASDAARRSLRAHGLHVPPWRKTRYMLAKWLGPYKRSTATSLPAANAGAMPMTGGAGMDIKCRAVGFFAPPATAPAARIK

SEQ ID NO: 607 - DNA, 1971 bp, Arabidopsis thaliana
atgaattcaaattcagtcggtgtatttcgtgagaaggaaatcgatgggaaaccattccacacatacactttatcatctcaaacagacaccacaaccccttcttcttccggtgaaacagccattgatggcgacgaccatctctctcttcaacaacctcttttcctctgtccttctttacgtcttaaagctgacgagataaactattcttatagtgaaattctaccgttcaatatttccccgtacttccccagcataagaggcgctgatcaacaagtccagcatttgcttgattccgacagccaacaagtccatgatttgcttcattccgacaacagccatgatgatgatggtgatgaaatctgtaagctcccagttgtccctatctattggtgtaacagtaaagaaattgagttcgatcaattcaattgcggtgcatgtgaacgatcaaagattggcacagactattatatctgtctcacgtgtgatctaatgttccacaaagaatgcgtggagtctccccttgagatcaaacacccttcctatccctttctttcactcaaactttacactcgtcacgagcagctcatgagttgcatgtgctgtaaacacccttccaatcttattttttattattgtcccacctacaaattgagtttgcatcccgattgtgcgatgaagccaatatccatttttatagaccacccaaaaaggcatccccaccttctcaccttttttcccaaacaagcttccttactttgcgatgtttgtagcctcattaaagaagctttccccacctatgtgtgtcttcgatgtatctttgtagcccatcgagattgtatctatttcccgtatgtcattaaaatatgtcgtcaccaacaccgtatctcttttacctcttctcttccatctggaaaatggtcttgtggagtatgtcgtaaaaaggttgacaacaattgtggtgcatacacttgcaacaagtgtagccactattttgttcatacaagatgtgcgttacgggaagacttgtgggatggaaaggatctcgagggagtacctgaagaacctgaaataattctcgagccatttgagacgatagctgatggaataatactccatttttctcatggccatcatctgaaactcaagaccagtggagtttacaacgaaaacattatttgtcaagcgtgcatccttccaatctatgagggtaattattactcgtgtatggatcaatgcaacttcatcctccacgaagcatgtgcaaatgcttctcgcaagaaagatcatgccttacacagtcacccacttacgctaaaagttgtctctgatatacagaatgaatactttaaaggttacttcaggtgttccgcttgtgatcgtgaaagttgtggcttcatctatgaggaggatcaatacagcatagacatacggtgtgcctctgtttctgaaccatttgattatcaaggccatgagcatcccttattccaagctttagaccgaaaagaagaaagggaggcaatttgtcaaatttgccgaaaaaagtatggtcgaaaactaaattgcatcgaatgcaattatattatatgtttcagttgtgctactttaccatacaaggcaaagtataagcttgacaaacatttcctcacatttcgggaaggggaagagggaagtgatcagttagactggtgtgaggtatgcgaaaagaaattagaatactcaagagaaggtgggttctatgcgtgtgatgactgctgcaccactctccatgttgattgtttgcttggaaaagagatgtatatgttgaatcctggtcatactgtaatggcttataggtcaaacatttatattcttcccaacaataccatgactcgaccattctgccaacttcataaagaagatcgttgtccacacaaagtaattttcaattggcatgacatgacattttgctcttacagttgttcgatggattag

SEQ ID NO: 608 - protein, 656 aa, Arabidopsis thaliana
MNSNSVGVFREKEIDGKPFHTYTLSSQTDTTTPSSSGETAIDGDDHLSLQQPLFLCPSLRLKADEINYSYSEILPFNISPYFPSIRGADQQVQHLLDSDSQQVHDLLHSDNSHDDDGDEICKLPVVPIYWCNSKEIEFDQFNCGACERSKIGTDYYICLTCDLMFHKECVESPLEIKHPSYPFLSLKLYTRHEQLMSCMCCKHPSNLIFYYCPTYKLSLHPDCAMKPISIFIDHPKRHPHLLTFFPKQASLLCDVCSLIKEAFPTYVCLRCIFVAHRDCIYFPYVIKICRHQHRISFTSSLPSGKWSCGVCRKKVDNNCGAYTCNKCSHYFVHTRCALREDLWDGKDLEGVPEEPEIILEPFETIADGIILHFSHGHHLKLKTSGVYNENIICQACILPIYEGNYYSCMDQCNFILHEACANASRKKDHALHSHPLTLKVVSDIQNEYFKGYFRCSACDRESCGFIYEEDQYSIDIRCASVSEPFDYQGHEHPLFQALDRKEEREAICQICRKKYGRKLNCIECNYIICFSCATLPYKAKYKLDKHFLTFREGEEGSDQLDWCEVCEKKLEYSREGGFYACDDCCTTLHVDCLLGKEMYMLNPGHTVMAYRSNIYILPNNTMTRPFCQLHKEDRCPHKVIFNWHDMTFCSYSCSMD

SEQ ID NO: 609 - DNA, 930 bp, Sorghum bicolor
atggcagaccagttagggttttacactattagatcccatgggatgatattggcaagattgcacatgtatgactggataatacttctcctccttgctgtcatagacgggctgttgaatttaattgaaccatttcaccgttttgttggaaaagacatgatgactgacttgagatatcctatgaagggcaatacagtgccattttgggctgttccactgattggaattatactgccttgggccatctttgttggaatttacttcaaaaagaagaatttttatgatttgcaccatggcatactggggattctatactcagtgctcataactgcagtgattactgatgcgattaaggatggtgttggacggcctcgtccagattttttctggcgctgtttccctgatggaaatgatgtttatgataacattacaactggtgttatatgcaatggagtgaagagcgtaatcaaggaaggccacaagagcttccccagtggacacagttcatggtcttttgctggtttaggcttccttgcatggtacttagctgggaaaatcgcagcttttgatcgcaaaggacatgttgcgaagctatgcattgtgtttctgcctctccttactgctgcacttgtggctgtttctcgagtggatgactactggcatcattggcaagatgtatttgcaggggctcttataggtcttacagttgcttcattttgctatctgcaatttttcccgtatccttttgatggcgatgcttggtggcctcatgcatacacggtccaggtagcggaggaacggaacagcagacatgcaaactcgtacagtgtgagaccaaccgagatcgaaacagtcaatattccaggccacggtgggatgaccctaagagatactctaaacgatgtggagtctggcagtggcaggagattgtga

SEQ ID NO: 610 - protein, 309 aa, Sorghum bicolor
MADQLGFYTIRSHGMILARLHMYDWIILLLLAVIDGLLNLIEPFHRFVGKDMMTDLRYPMKGNTVPFWAVPLIGIILPWAIFVGIYFKKKNFYDLHHGILGILYSVLITAVITDAIKDGVGRPRPDFFWRCFPDGNDVYDNITTGVICNGVKSVIKEGHKSFPSGHSSWSFAGLGFLAWYLAGKIAAFDRKGHVAKLCIVFLPLLTAALVAVSRVDDYWHHWQDVFAGALIGLTVASFCYLQFFPYPFDGDAWWPHAYTVQVAEERNSRHANSYSVRPTEIETVNIPGHGGMTLRDTLNDVESGSGRRL

SEQ ID NO: 611 - DNA, 504 bp, Sorghum bicolor
atgttggtctaccaggatctgctctctggcgacgagctcctctccgactccttccagtataaggagatctttgacggcgtcctctgggaggtcgagggcaagtgggtcgtcaaaggagctgtcgatgtggatattggtgccaatccatctgccgagggtggtgaagatgagggtgttgatgaccagactgaaagggttgttgacattgttgacaccttccgcctccaggagcaacccacatttgacaagaaaacatttgtgactaacattaagcgctacatcaagaacctcactggcaagctggagccagagaaggcagatgaattcaagaagggcattgagggtgccaccaagttccttcttagcaagctcaaagatcttcagttctttgttggtgagagtatgcatgatgatggaagcctagtgttcgcttactacaaggaaggtgccactgacccgacattcctctattttgctcatggtctgaaggagattaagtgctag

SEQ ID NO: 612 - protein, 167 aa, Sorghum bicolor
MLVYQDLLSGDELLSDSFQYKEIFDGVLWEVEGKWVVKGAVDVDIGANPSAEGGEDEGVDDQTERVVDIVDTFRLQEQPTFDKKTFVTNIKRYIKNLTGKLEPEKADEFKKGIEGATKFLLSKLKDLQFFVGESMHDDGSLVFAYYKEGATDPTFLYFAHGLKEIKC

SEQ ID NO: 613 - DNA, 2871 bp, Sorghum bicolor
atggaggacaaggcgtccaacctggacgccgtgctcaaggaggccgtcgatctcgagaacataccgatcgaggaggtgttcgagaacctgcgatgcagcccgcagggtctctccacggagcaggccgagcagcgcctcgccatcttcgggcccaacaagctggaggagaagcaggagagcaagatcttcaagttcttgggattcatgtggaacccgctgtcctgggtcatggaggcggccgccatcatggccatcgcgctcgcgaacgggggaaacaagccgcccgactggcaggacttcgtggggatcattactctgctcatcatcaactccacaatcagcttcattgaggagaacaatgcgggcaatgctgccgccgctctcatggcgcgcctcgcccccaaggccaaggttctcagaaatggccggtggaccgaggaggaatcggcaatccttgtgccaggggacatcatcagtgtgaagcttggggatatcattccggctgacgctcgtctgcttgaaggggatccactgaaaattgatcagtctgcactcaccggcgagtcccttccggtgaccaaaggccctggtgatggagtgtactctggttccacttgcaaacagggtgagattgaggccgttgtcattgccactggtgtgcacacattctttggcaaggcagcacatcttgtcgattcaacaaaccaagttggtcatttccagaaggttctcactgccattgggaacttttgcatctgttcaattgctgtgggaatggtcgtggagcttatcgtcatgtaccctatccaacacaggggttacagaccaggaattgacaacctgttggtgcttctgattggaggaattccaattgccatgcccactgtcctttctgtgactatggcaattggggctcatcgcttggctcaacagggagcaattactaagagaatgacagcaattgaagaaatggctggcatggatgttctttgcagtgacaagactgggacattaaccttgaacaagttgactgtggacaagagtcttgtagaggttttccaaaaaggcattgaccaagatacagtaattctgatggctgccagagcttctcgtacagaaaaccaggatgccatagatgccacaatagttggtatgctggctgatccgaaggaggctcgtgctggtgttcgagagattcattttctgccatttaatccaactgacaaaagaactgctttaacctaccttgatggtgagggaagaatgcatcgtgttagcaagggagcaccagagcagatccttcatcttgcacacaacaagtcggatattgaaagaagggtcagagctgtgattgacaaatttgctgaacgtggtttgcgagcacttggtgtagcttaccaggaagtgccagatggtaggaaagagagtcctggaggaccatggcaattcattgggctcttgccacttttcgacccccctcgccatgatagtgcagaaactatcagaagggcactccatcttggtgttaatgtcaagatgattacaggtgatcagcttgctattgggaaggaaacagcacgtcgtttgggaatgggtactaatatgtacccttcatctgctttactcggacagaataaggatgagtcaattgcttctttaccaattgatgaattgatcgagaaggctgatggctttgctggagtctttccagaacacaagtatgagatcgtgaaacgcttgcaagcaagaaaacatatatgtggtatgactggggatggtgtaaatgatgccccagctttgaagaaggctgatatcggtattgcagtagcagactccaccgacgcagctcgtagtgcttctgacattgtcctaactgaaccaggccttagtgtgattattagtgctgtgctgacgagtcgggcaattttccaaaggatgaagaattacacaatctatgctgtatcaattaccatccgtattgtgcttggttttatgcttcttgctctgatatggaagtttgacttcccaccatttatggtcctgatcattgccatcctcaatgatggtaccattatgactatctcaaaggacagagtaaaaccatctccacaacctgatagttggaagttagctgagatttttgcaactggagttgtccttggtggttatttggccatgatgactgtcattttcttctgggcagcgtacaagactgacttcttcccgcgactgttccatgttgaaagccttgagaagactgcccaggatgattttcagaagcttgcgtccgctgtgtaccttcaagttagcacaatcagccaggcccttatctttgtgacacggtctcgcagctggtcatttgtggagcgccctgggttcttgcttgtctttgctttcttggtggcgcagctgattgctactctgatcgctgtatatgccaactgggcatttgcttcgatcaagggcattggatggggctgggccggtgtcatctggctctacaacctcgtcttctacttcccgctggatatcatcaagtttctcatccgttatgcgctgagtgggagagcatggaatctcgtccttgagcagaggattgcattcacaagcaagaagaatttcggtacggaagaaagggagcgcaagtgggcgcacgctcagaggactctccatggcctccagccacctgaggcatccatcttcgagaacaagacgaccttcaacgaactgaaccagctcgcggaagaggcccgtaggagagccgagatggcgaggttgcgagaagtgagcaccctgaaggggaagatggagtcggtggtgaagcagaagggtttggacattgagaccatccagcagtcctacaccgtgtga

SEQ ID NO: 614 - protein, 956 aa, Sorghum bicolor
MEDKASNLDAVLKEAVDLENIPIEEVFENLRCSPQGLSTEQAEQRLAIFGPNKLEEKQESKIFKFLGFMWNPLSWVMEAAAIMAIALANGGNKPPDWQDFVGIITLLIINSTISFIEENNAGNAAAALMARLAPKAKVLRNGRWTEEESAILVPGDIISVKLGDIIPADARLLEGDPLKIDQSALTGESLPVTKGPGDGVYSGSTCKQGEIEAVVIATGVHTFFGKAAHLVDSTNQVGHFQKVLTAIGNFCICSIAVGMVVELIVMYPIQHRGYRPGIDNLLVLLIGGIPIAMPTVLSVTMAIGAHRLAQQGAITKRMTAIEEMAGMDVLCSDKTGTLTLNKLTVDKSLVEVFQKGIDQDTVILMAARASRTENQDAIDATIVGMLADPKEARAGVREIHFLPFNPTDKRTALTYLDGEGRMHRVSKGAPEQILHLAHNKSDIERRVRAVIDKFAERGLRALGVAYQEVPDGRKESPGGPWQFIGLLPLFDPPRHDSAETIRRALHLGVNVKMITGDQLAIGKETARRLGMGTNMYPSSALLGQNKDESIASLPIDELIEKADGFAGVFPEHKYEIVKRLQARKHICGMTGDGVNDAPALKKADIGIAVADSTDAARSASDIVLTEPGLSVIISAVLTSRAIFQRMKNYTIYAVSITIRIVLGFMLLALIWKFDFPPFMVLIIAILNDGTIMTISKDRVKPSPQPDSWKLAEIFATGVVLGGYLAMMTVIFFWAAYKTDFFPRLFHVESLEKTAQDDFQKLASAVYLQVSTISQALIFVTRSRSWSFVERPGFLLVFAFLVAQLIATLIAVYANWAFASIKGIGWGWAGVIWLYNLVFYFPLDIIKFLIRYALSGRAWNLVLEQRIAFTSKKNFGTEERERKWAHAQRTLHGLQPPEASIFENKTTFNELNQLAEEARRRAEMARLREVSTLKGKMESVVKQKGLDIETIQQSYTV

SEQ ID NO: 615 - DNA, 519 bp, Sorghum bicolor
atgagtttcaaccagtctactgtcaaggggcagaccaggagggagaggcctagggctcgccctcatggcctgacgcagcagaagaggcaggaaataaaggaagcctttgatctgtttgatacagataactctggaaccattgatgcaaaagagctcaatgttgccatgagagccttgggatttgagatgactgaagagcaaattaggcaaatgattgctgatgttgacaaagatggcagtggagcaatcgactatgaggagtttgagcacatgatgactgccaaaatcggagaaagggatagtaaagaggagcttacaaaagcattccgcattattgaccaagatggaaatggaaagatttctaacattgatatccagaggattgccaaagagttgggtgtaaatctcaccctcgatgagatccaagacatggtgcaagaggcagatagaaatggtgacggtgagatagactttgatgagttcatcaggatgatgaggaggactagctatggctactag

SEQ ID NO: 616 - protein, 172 aa, Sorghum bicolor
MSFNQSTVKGQTRRERPRARPHGLTQQKRQEIKEAFDLFDTDNSGTIDAKELNVAMRALGFEMTEEQIRQMIADVDKDGSGAIDYEEFEHMMTAKIGERDSKEELTKAFRIIDQDGNGKISNIDIQRIAKELGVNLTLDEIQDMVQEADRNGDGEIDFDEFIRMMRRTSYGY

SEQ ID NO: 617 - DNA, 843 bp, Sorghum bicolor
atgagcttcgtcttccgagggagcagggccgacatcgaggccggtggcttcccggggttcgcccccgagcgccgcgccatgcgaattcatgcagggagcaggccggtgaatagcaattccttggcttttcttctaactgttcttgttttgttcatggtactgaactcacaccagatgtctcccaatcttttgctttggcttgtcttgggagtcttcctaatggccacaagccttagaatgtatgccacgtgccagcagcttgctcatgctgcagctgccaacaattttcttggacacactgagctgcgtgtgcatgtaccgccgaccattgcccttgctacgagaggccggttacagagccttagacttcaactggctcttcttgatcgtgaatttgacgatttagattatgacactctgagagcattggatgctgacaatagcccgcatactccttctatgagtgaagaagaaataaattctcttcctgtattcaaatataaagttcaggcgcagcaggggaatgcccctgcccagaaaagtgatgggccatctcagctatcggtttcttcaactggatctggcaatgagaagaagcaggatggtttaaaatcagatggaaccagcaaaactccagaggatgaactaacatgtagtgtttgcttagagcaagtcgccgtgggtgatctgttgagaagcctaccatgcttgcatcagtttcacgtaaactgcatcgacccatggctgcgccaacagggtacatgcccaatctgcaagcaccaggtgagtgatgggtggcatgccacaggcaacggtgaagaggatgcctcttacatggtgtaa

SEQ ID NO: 618 - protein, 280 aa, Sorghum bicolor
MSFVFRGSRADIEAGGFPGFAPERRAMRIHAGSRPVNSNSLAFLLTVLVLFMVLNSHQMSPNLLLWLVLGVFLMATSLRMYATCQQLAHAAAANNFLGHTELRVHVPPTIALATRGRLQSLRLQLALLDREFDDLDYDTLRALDADNSPHTPSMSEEEINSLPVFKYKVQAQQGNAPAQKSDGPSQLSVSSTGSGNEKKQDGLKSDGTSKTPEDELTCSVCLEQVAVGDLLRSLPCLHQFHVNCIDPWLRQQGTCPICKHQVSDGWHATGNGEEDASYMV

SEQ ID NO: 619 - DNA, 966 bp, Sorghum bicolor
atgggcgaggaggagaaggcgaaggaggcggcggccccggccgacaaggccaaggaggcggaggagaagaaggacgaggcggcaggaggggaggagaagaaggaggaggtcccgcctcttccgccgccgccgccgccggaggagatggtcatgcgggtcttcatgcactgcgagggctgtgcgcgcaaggtcaagaagattctcaagggatttgatggtgttgaagatgttattgcagatacaaaggcacacaaggtggtcgttaagggaaaaaaggcagctgctgacccaatgaaggtggtagaacgtgtgcagaagaagacaggccgcaaggtggagcttctttcgccaatgccaccaccgaaagaagagaagaaggaagaggagaaaaaggaagaacctgagccaccaaaacctgagaagaaagaggagcccacggtgctcgctgtggtggtcaaggtgcatatgcactgtgaggcctgcgctcaagtgatcaagaagagaatcctcaagatgaaaggagtgctatctgtagagtcagacctgaaggcttctcaagtcactgtgaagggtgtgttcgaggaggccaagctggctgattatgtgtataggcgcactggcaagcacgctgctatcgtcaagtctgagccggttgcagctgagaatgtcgatgatgggaatgccaaggacgacaagaaggcagccgaaggtggggaggacaagaaggatgatggcaaggaggaaaagaaagatggtggagatgcccgtggagacgagaaagaagcggataagcagaaggatgatggcaatgctggtgatgaagagaaagataaagaccctggcgccgttgctaacatgtatatgcactacccaaggttcaatcatccgagcggatacagttatgcctgccagtacccacctcagctcttcagcgacgagaacccaaatgcctgttctctgatgtga

SEQ ID NO: 620 - protein, 321 aa, Sorghum bicolor
MGEEEKAKEAAAPADKAKEAEEKKDEAAGGEEKKEEVPPLPPPPPPEEMVMRVFMHCEGCARKVKKILKGFDGVEDVIADTKAHKVVVKGKKAAADPMKVVERVQKKTGRKVELLSPMPPPKEEKKEEEKKEEPEPPKPEKKEEPTVLAVVVKVHMHCEACAQVIKKRILKMKGVLSVESDLKASQVTVKGVFEEAKLADYVYRRTGKHAAIVKSEPVAAENVDDGNAKDDKKAAEGGEDKKDDGKEEKKDGGDARGDEKEADKQKDDGNAGDEEKDKDPGAVANMYMHYPRFNHPSGYSYACQYPPQLFSDENPNACSLM

SEQ ID NO: 621 - DNA, 762 bp, Sorghum bicolor
atggccatggcgacctccaccttctccccgcgccccgccaccctcaacaagcccctgcgacctggcgccaagcccgccagcctcctacccttcccgtgccgccgtgccggcagactcgtctgcgccaccgctgccggggaggcgccgcccgtcgaggtcgagcagcgggacgaggcggagccggcccccgccgcggcctccaacggggccgccgtcaaggccgaggcgcccgccccaaaggccgtgcaggctgaggccccgccggcgcccgcgccggtcccggccttccgggacgccaggtgggtcaacggcacctgggacctcacccagttcgacaagggcggcgtcgtcgactgggacgccgtcatcgacgccgaggccaggagaaggaaatggcttgaagattatccagaggccactagcacagacgaggctgtcgtcttcgacacttcaattatcccatggtgggcatggatgaagcgattccaccttcctgaagccgagaagctaaatggtcgcgctgccatggttggcttcttcatggcatactttgtggatagcttgacgggcgtgggccttgttgaccaaatgggcaacttcttctgcaaaacgctgctgtttgttgccgtcgctggtgtactgctaatcaggaaaaatgaggacattgaatcactgaagaagcttatcgacgagactacgttctatgacaagcaatggcaggcaacctggcaagatgattccactgggggaccaaagaattag

SEQ ID NO: 622 - protein, 253 aa, Sorghum bicolor
MAMATSTFSPRPATLNKPLRPGAKPASLLPFPCRRAGRLVCATAAGEAPPVEVEQRDEAEPAPAAASNGAAVKAEAPAPKAVQAEAPPAPAPVPAFRDARWVNGTWDLTQFDKGGVVDWDAVIDAEARRRKWLEDYPEATSTDEAVVFDTSIIPWWAWMKRFHLPEAEKLNGRAAMVGFFMAYFVDSLTGVGLVDQMGNFFCKTLLFVAVAGVLLIRKNEDIESLKKLIDETTFYDKQWQATWQDDSTGGPKN

SEQ ID NO: 623 - DNA, 1992 bp, Sorghum bicolor
atggcgcctcccgcctctgcatcggcgcggccgctatccctccccctcaccgtccctctctcccgctaccggtcccacgtgctccccgcgacctgctctcgcctcctcccccggcgccgcgtcgcgctcgcgccggcccggcctggcgccgcggtcctatccagtctcagtgacgcgcgggaggaggagggtgaagaggaagaggaaggggatttctatgaggaggatgagcaacaggaatacgacgatgaggaggaacaggggtacgacggggagaacgaggagctggtcgaggtggggtacgtgtccggcgcgcacggggtgcgcggcgacgtcctcgtcacgccacgcaccgactttccggagctccgcctcgccacgccggggacgagatggctgagggctcgtgctgctgggaagcagcaggtcagggaattcgagcttgttcggggaagggcccacacggggaagaagagctggatcgtcagttttgatggcatcgataacctggatgaggctaggcaaatagttggttcggctgtacttgtcaaagctggagataggccagaaattgaggacgatgaattctattcacttgaccttgttggaatgagagttattgtcaaggatacaggcaaggtcgtaggaacagttggtcagattttcaattttggagggggagatcttctacaggtgatgattggctctgctgagggtactgctgtcgatccagattcagaaaatcaagattcaatttcatcacgtgagcatgtgtggattccatttgctgaagatattgtacctgatgttgatatggcgagcagagaaatgtggattacacctccgaaggggttacttgagctcaattctcgttctgataagagatcaaaaaaagaaaggcgtgcgatggagtggaaggacaggaagaggcttcaacgtcgtgtaattgcaggaaagaaggtgctctccgaaatggaccaagtccatgttctggaaggtttggtatcagggaacaaggtccaaaaggcatcacttgcagagcagattgggagcattgactttcaattgttccgacatgcagtgcattgtgttagcaagcagattgagagctcttcaaagattttgctcgctaactcttcactgtcaagaaaaaaagtgatcaaaataccatacaagactctcatcaaccttgaggacaaagctgaacatgcattcagtagtgaattcaaaaacggtcttgagattcttctgaagtccaaagcagccattgtacttgttagaaatggctctgactctgatgctgagtttctgggtttgctcaattcttttagtgagttaatgaaggttgtagaaaatcaagtttctcccccttttattatcgtttcaccagctggtcatgtggagtcagttcggaactgcctggtagagaatgactattttggtttggacactgaaaaggtgtgggtgctggaagagctggagcttccagttgttagtatatcctccgagggaaacaggaaaaaggttctgatgaagtctccctgggagataataaaaaggccagcaggatctgggggtatcttcagcttactggcatcaaacaagattttggaaaccctcaatgaaatgggtgtacagtatacacagatctgcagctcatccaacaaaccactcatcgggcatcctatgctctttggggctgtcgcttcccgcggggctgatgttggcatccagctctccaagactagtgaaacggaaaacgatttcgatgtgatcctttctatcgatcagctgaacaagatgtgccgagatgtcactcaggtcaggttctccgctcgctccgaagagaacgtgcacgtcgagcatgtcgacgggcagtgggtcgctgtccagccggaggtggctaattcccatcgtctgcacgccgaggttacgagtgtcttaaactcttgcgctcctgataaactgtgtgtcatggagattgttgagtaa

SEQ ID NO: 624 - protein, 663 aa, Sorghum bicolor
MAPPASASARPLSLPLTVPLSRYRSHVLPATCSRLLPRRRVALAPARPGAAVLSSLSDAREEEGEEEEEGDFYEEDEQQEYDDEEEQGYDGENEELVEVGYVSGAHGVRGDVLVTPRTDFPELRLATPGTRWLRARAAGKQQVREFELVRGRAHTGKKSWIVSFDGIDNLDEARQIVGSAVLVKAGDRPEIEDDEFYSLDLVGMRVIVKDTGKVVGTVGQIFNFGGGDLLQVMIGSAEGTAVDPDSENQDSISSREHVWIPFAEDIVPDVDMASREMWITPPKGLLELNSRSDKRSKKERRAMEWKDRKRLQRRVIAGKKVLSEMDQVHVLEGLVSGNKVQKASLAEQIGSIDFQLFRHAVHCVSKQIESSSKILLANSSLSRKKVIKIPYKTLINLEDKAEHAFSSEFKNGLEILLKSKAAIVLVRNGSDSDAEFLGLLNSFSELMKVVENQVSPPFIIVSPAGHVESVRNCLVENDYFGLDTEKVWVLEELELPVVSISSEGNRKKVLMKSPWEIIKRPAGSGGIFSLLASNKILETLNEMGVQYTQICSSSNKPLIGHPMLFGAVASRGADVGIQLSKTSETENDFDVILSIDQLNKMCRDVTQVRFSARSEENVHVEHVDGQWVAVQPEVANSHRLHAEVTSVLNSCAPDKLCVMEIVE

SEQ ID NO: 625 - DNA, 267 bp, Zea mays
atgatacaatggtactacctggacgacgaattctcaaaggtactcgtggagcgcgacgagcgagccgaaggtgacggcggtgtcggagcagacggcgtcgaagaagggccacagcgtggcggcggggaccacggcggcggggagagagagggggagaaggtgaggcggcggagtgtgcggagggagatggatgggagaggacagagacaaggtgcgcggcgagagagacgacgtgtgagggcacggacgcacgttacctctcagagc

SEQ ID NO: 626 - protein, 89 aa, Zea mays
MIQWYYLDDEFSKVLVERDERAEGDGGVGADGVEEGPQRGGGDHGGGEREGEKVRRRSVRREMDGRGQRQGARRERRRVRARTHVTSQS

SEQ ID NO: 627 - DNA, 966 bp, Sorghum bicolor
atggggcagagccagggcagaggaagaaccaaaccagagacgcggcacgcgacgcgggagggcgaggaggaagaggagcagcatcagcagcgcggcgacatcgcgaggccagacgcaacagccgaagagaaggggcagagtcgaccgccgggagtcccggccaccaccatggacaccttcttcctatcgcacggctcgcccacgctctccatcgacgacaagatcccggcgcggcacttcttcaagtcgtgggtgccggcgaaggtcgcgggcgaccaggcaccgcgcgccatcctcgtcgtgtcggggcactgggagacggccacgccggcggtcaacgtcatccgaggcagcaacgacaccatctacgacttctatggctttcccaagcccatgtaccagctcaagtacccggctcctggcgccccggacttggccctgcggaccaaggagctcctggagcaagccgggttcggccccgtgaaggaggaccacagccgcgggctggaccacggcgcgtgggtgccgctgatgctcatgtacccggacgccaacatccccgtgtgccagctatcggtacagagcgaccgcgacggcacgtaccactacaacctcggcaaggcgctggcgccgctgcgggaggaaggcatcctcatcgtcggctccggcagcgccacccacaacctgcgcaagatgggcccgttcgacgcgcccgtgccgcggtgggtcgccgagttcgacacctggctcaaggactcgctcctgggcggacggtacgaggacgtgaaccggtacgaggagaaggcgccgcacgggagggcggcgcacccgtggccggaccacttctacccgctgcacgtcgcgctcggcgccgccggggacgccgccaaggcggagcagatccaccactgctggaccaacgccacgctctcctacgcgtcctacaggttcaccaccaacagctga

SEQ ID NO: 628 - protein, 321 aa, Sorghum bicolor
MGQSQGRGRTKPETRHATREGEEEEEQHQQRGDIARPDATAEEKGQSRPPGVPATTMDTFFLSHGSPTLSIDDKIPARHFFKSWVPAKVAGDQAPRAILVVSGHWETATPAVNVIRGSNDTIYDFYGFPKPMYQLKYPAPGAPDLALRTKELLEQAGFGPVKEDHSRGLDHGAWVPLMLMYPDANIPVCQLSVQSDRDGTYHYNLGKALAPLREEGILIVGSGSATHNLRKMGPFDAPVPRWVAEFDTWLKDSLLGGRYEDVNRYEEKAPHGRAAHPWPDHFYPLHVALGAAGDAAKAEQIHHCWTNATLSYASYRFTTNS

SEQ ID NO: 629 - DNA, 213 bp, Sorghum bicolor
atgctggactgggcgccggtggtggtgggcgtcgtgctcttcgtgctgctctcgccgggcctgctcatcgagttccccggcctgcaccgctgggtcgacttcggcagcctccgcgtcaccggcaaggccgccaccgtccacaccatcctcttcttcgccatcttcctcatcgtcaccatggcgtgcaacctccacatctacaccggcgcctag

SEQ ID NO: 630 - protein, 70 aa, Sorghum bicolor
MLDWAPVVVGVVLFVLLSPGLLIEFPGLHRWVDFGSLRVTGKAATVHTILFFAIFLIVTMACNLHIYTGA

SEQ ID NO: 631 - DNA, 2307 bp, Sorghum bicolor
atggctactatccaagatataggactctctgcagctatcaacatactgggtgctgtagtgttcctacttgcatttgctttccttcggctgcagccaatcaatgatagggtttacttcccaaaatggtacctcaaaggcgcaagagagagtccaagtcatgggggtacatttgtccggaaatttgtcaatttggacatgcgttcatacttgaaattcttaagttggatgcctgctgctctcaaaatgcccgaggatgagttgattagccattcaggtctggattcagctgtgtatctgaggatttacttggttggacttaaaatatttgctccaatctcagttctagctttcattgttcttgtccctgttaattggaccaatgatactctgcaattctcgaaggtagagcacagcaacattgataagctctcaatatcaaacataccagttggatcaaaaaggtttatagcccacttggcaatggcttatgttttcacattttggacctgctatgtactattacgtgagtacggaatagttgcaaaaatgagactgcgatttctttcatcagagaaacgcagaccagatcagttcacggttcttgtgcgaaatataccgcctgatccagatgaatcaattagtgagcttgtggaacatttctttcttgtcaatcatcctgatcactatctgacgcatcaggttgtttacaatgcaaataagcttgctaaattggtgaaagagaaagcaaatatgcagaattggcttgactactatcagctgaagtttgaaagaaatgcatctaaaaggcctactactaagactggttttcttggttgttttggtacgaaggtggatgctattcaatactacacatcagaaattgagaggatagaaaatgaagaagcagaagagcgtgagaaaattgtaaaggatcccaaatcagttgttccagcagcatttgtttccttccgatcacgttggggtgcagcagtttgtgctcagacacaacaaaccagtaatccaactgtttggttgactgaatgggccccagaacctcgcgatgtgtactgggataatttgtctattccatttgtctcccttacagttcgaaggctgatagttgcagtggcattcttcttcctgaacttcttttatgtgatcccaatagcatttgttcagtctcttgcaaatattgaagggatcgagaaggcagctccatttctgaagcctctgattgaagagcctactattaaatcattcatccaaggtttccttccgggaattgctctgaagatcttccttatattgctcccaagcatattaatgtttatgtctaaggttgaaggattgacgtcaatatcttcactggagagaagatctgcatccaagtattatatcttcatattcttcaatgtgtttctggcaagcattattgcaggatctgctttagagcagctaaaaagctatattcatcagtcagcaaatgaaataccaaggacaattggtgaagcaattccaatgaaggcaaccttttttataacatatacaatggttgatggttgggctggggtagctggtgaaatattaagattgaagccactagtgatcttccacttgaaaaactttttcttggtcaagactgagaaagacagagaagaggccatggaccctggaagtattggttttgactcaagtgaacctcaaattcagctatatttcttacttggtcttgtctatgcagcagtgacaccatttttgctcccttttgtattgatattctttgggtttgcatacgttgtataccgccaccagataataaatgtgtataatcaagaatacgagagtgcagcagcattttggccaagtgttcatggacgtataatcacagcattgattgtatcacagtttcttctccttggattacttagcacaaaaggcgctgggcagtcaacacctgtgctccttgttcttcctgtcgtaaccttttatttccacaaatactgcaagaaccgctatgaaccgacttttgtaaaatgtccattgcaggaggcaatgaagaaggataccctagaacgtgccagagagccaggatttgatctcaaaggatacctaatgaatgcctacatccaccctgtgttcaaaggtgatgaggacgatgagaagttctcaatcgctgatgaaccagaaacagagcaagttctggtggcaaccaagcggcagtccaggcggaacacccctgtgcccagtaaatacaatgggtcggaatcaccttcgcttcctgaaattgtaaatgatcaacggctataa

SEQ ID NO: 632 - protein, 768 aa, Sorghum bicolor
MATIQDIGLSAAINILGAVVFLLAFAFLRLQPINDRVYFPKWYLKGARESPSHGGTFVRKFVNLDMRSYLKFLSWMPAALKMPEDELISHSGLDSAVYLRIYLVGLKIFAPISVLAFIVLVPVNWTNDTLQFSKVEHSNIDKLSISNIPVGSKRFIAHLAMAYVFTFWTCYVLLREYGIVAKMRLRFLSSEKRRPDQFTVLVRNIPPDPDESISELVEHFFLVNHPDHYLTHQVVYNANKLAKLVKEKANMQNWLDYYQLKFERNASKRPTTKTGFLGCFGTKVDAIQYYTSEIERIENEEAEEREKIVKDPKSVVPAAFVSFRSRWGAAVCAQTQQTSNPTVWLTEWAPEPRDVYWDNLSIPFVSLTVRRLIVAVAFFFLNFFYVIPIAFVQSLANIEGIEKAAPFLKPLIEEPTIKSFIQGFLPGIALKIFLILLPSILMFMSKVEGLTSISSLERRSASKYYIFIFFNVFLASIIAGSALEQLKSYIHQSANEIPRTIGEAIPMKATFFITYTMVDGWAGVAGEILRLKPLVIFHLKNFFLVKTEKDREEAMDPGSIGFDSSEPQIQLYFLLGLVYAAVTPFLLPFVLIFFGFAYVVYRHQIINVYNQEYESAAAFWPSVHGRIITALIVSQFLLLGLLSTKGAGQSTPVLLVLPVVTFYFHKYCKNRYEPTFVKCPLQEAMKKDTLERAREPGFDLKGYLMNAYIHPVFKGDEDDEKFSIADEPETEQVLVATKRQSRRNTPVPSKYNGSESPSLPEIVNDQRL

SEQ ID NO: 633 - DNA, 1260 bp, Sorghum bicolor
atgccgagcgtcggcgtgaagatctacagcgtcttcttcaagctcttcctccgccaccgcctccagtcgctggccgccgccgccgccgccgcgggggacaacctcgacagcgcggccttcggggtctcctgccgccccgacgaggccaccgcgccgcccaacccggccttctccgcctccgccgacggcgtcgcctccaaggacctccacatcgaccccaactcctcgctctccgtccgcatcttcctacccacgcccccgccgccgaccccgcacgcgcacctcctcgcgcacgcgccctcgcgccgcgccagcgaccccacaccgactccccccgcgcccgcagccggcgcgccgtaccgcgggtacctcccgcacgccgtcgcctcgccgcgcgccgccgtgtcggcgcgccggaggctgcccatcgtcgtgcagttccacggcggcggcttcgtcaccgggagcaacactgccgcggccaacgacgccttctgcaggagggtcgccaagctctgcgatgccattgtcgtcgcagtggggtacaggcttgcgccagagagccgctaccctgccgcgttcgaggacggggtcaaggtgctcaagtggatcgccaagcaggccaatctcgccatgatgaccaaggtcgggggtggtgtcgacacctttggtgcatccactgttgagccgtggattgctgcacatggtgatccagctagatgtgttctacttggtgcaagctgtggtgcaaatattgctgattatgtcactcggaaggtggttgaagatgggaaaccgtttgacccaattaaggttgttgcacaagtactgatgtatccctttttcatagggagtgttccgacacactcggaaataaggcttgcgaactcatacttttatgacaagtccacatgtttacttgcttggagattatttttgtcagagaaagagttcaatctagaccaccctgctgcgaaccctctggcgcctggcagaggagggcccccactgaagtgcatgccgccgaccttgacagttattgccgagcatgactggatgagggatcgagcaattgcttactctgaggaactccgcaaggttaatgttgactcgccggttcttgactacaaggatacagttcacgagtttgcaaccctggatgtgttcctaaaaacaccacaggcacaggcctgtgctgaggatattgccatatggatgaagaaatatatctccctccgagggcatgagttctcatattag

SEQ ID NO: 634 - protein, 419 aa, Sorghum bicolor
MPSVGVKIYSVFFKLFLRHRLQSLAAAAAAAGDNLDSAAFGVSCRPDEATAPPNPAFSASADGVASKDLHIDPNSSLSVRIFLPTPPPPTPHAHLLAHAPSRRASDPTPTPPAPAAGAPYRGYLPHAVASPRAAVSARRRLPIVVQFHGGGFVTGSNTAAANDAFCRRVAKLCDAIVVAVGYRLAPESRYPAAFEDGVKVLKWIAKQANLAMMTKVGGGVDTFGASTVEPWIAAHGDPARCVLLGASCGANIADYVTRKVVEDGKPFDPIKVVAQVLMYPFFIGSVPTHSEIRLANSYFYDKSTCLLAWRLFLSEKEFNLDHPAANPLAPGRGGPPLKCMPPTLTVIAEHDWMRDRAIAYSEELRKVNVDSPVLDYKDTVHEFATLDVFLKTPQAQACAEDIAIWMKKYISLRGHEFSY

SEQ ID NO: 635 - DNA, 1833 bp, Sorghum bicolor
atgagaccggaaggcgcagcgcggttggcgtggctgctcctgctcgccgccgcggccgcggggcatggcggcgtgcagccgctgtcgcgcatcgccatccaccgcgcacgcgtcgcgctggacgcgtccgccgcggtgcgggcctcgccggagctgctgggaaccaagggcgaagatactgcctgggtgaacgttgattttattactccccatccaagtgatgatgattggatcggcgtattttctccttcaaacttcaacgcgtccacatgccctggttctcacggatctggcccaggtcctgtgatatgctcagcaccaataaagtatcagtttgcaaattactcatcagattttggaaagtctgggaaaggggcactgaagttccagctgatcaaccagcggcaagacttttcatttgcactgttcaccggtggactctcgaatccgaaacttattgcagtgtcgaatgccattgcttttgcaaacccaaagtctccagtttatccacgcctagcacaaggaaaatcctggaatgagatgactgtatcatggacaagtggctatgatataaatgaggcatatccctttgtcgaatggggaataaaatggagccccgcggtacgcactgcagctggcaccgtcacttttgatcgtgatagcatctgcggagaacctgctcgatctgttggttggagagatcctggtttcatacacacagctttcctaacagacttatggccaaataaagagtactactacaaaattggtcatatgctgccagatggaaatgttgtttggggcaagttgtcgtccttcaaggcacctccttatcctggacagaagtcgctgcagcgtgttgttattttaggagatatgggaaaggctgagagggatggaagcaatgaatacgccaactaccagcctgggtcacttaacactactgatacactaatcaaggaccttgacaacatagacatagtgttccacattggcgacattagctacgccaatgggtacatttcacaatgggatcagttcacacaacaagtggaagagatcacttcacgagtcccttacatgattgcgagtgggaatcatgaacgagattggcccaacagtgggtcatacttcaatggaacagactctggaggggagtgtggtgtgttagctgagaccatgtactatacgccaacagaaaacagagcaaactactggtactctacagattatggcatgttccggttctgcgttgcggacagcgagcacgactggcgggaaggcacggagcagtacaaactcatcgagaactgcctcgcgacggtcgaccgaaagaaacagccgtggctgatattcatcgctcatcgcgtcctcggctactcctccggttacttctacggcagagacggatcgtttgctgagccaatgtcccggcaaagcctccagaagctctggcagaagtatagggtggacttggcgttctacggccatgtccacaactacgagaggacatgccctgtctatgaggaacaatgcatgagctcagagaagttccactactcgggcaccatgaacggcaccatccacgtagtcgttgggggcggcggcagccacctgagcaacttcacaatccaggtcccggcgtggagcgtatacagggagatggactacggcttcgtcaagctcacggcgttcaattactcgtcccttctgtacgagtacaaacggtccagcgatggcgaggtgtacgatagcttcactttgcacagagagtacagggacgtgttagcgtgcgtcaaggacagctgccctccgactttaaaatcgacatga

SEQ ID NO: 636 - protein, 610 aa, Sorghum bicolor
MRPEGAARLAWLLLLAAAAAGHGGVQPLSRIAIHRARVALDASAAVRASPELLGTKGEDTAWVNVDFITPHPSDDDWIGVFSPSNFNASTCPGSHGSGPGPVICSAPIKYQFANYSSDFGKSGKGALKFQLINQRQDFSFALFTGGLSNPKLIAVSNAIAFANPKSPVYPRLAQGKSWNEMTVSWTSGYDINEAYPFVEWGIKWSPAVRTAAGTVTFDRDSICGEPARSVGWRDPGFIHTAFLTDLWPNKEYYYKIGHMLPDGNVVWGKLSSFKAPPYPGQKSLQRVVILGDMGKAERDGSNEYANYQPGSLNTTDTLIKDLDNIDIVFHIGDISYANGYISQWDQFTQQVEEITSRVPYMIASGNHERDWPNSGSYFNGTDSGGECGVLAETMYYTPTENRANYWYSTDYGMFRFCVADSEHDWREGTEQYKLIENCLATVDRKKQPWLIFIAHRVLGYSSGYFYGRDGSFAEPMSRQSLQKLWQKYRVDLAFYGHVHNYERTCPVYEEQCMSSEKFHYSGTMNGTIHVVVGGGGSHLSNFTIQVPAWSVYREMDYGFVKLTAFNYSSLLYEYKRSSDGEVYDSFTLHREYRDVLACVKDSCPPTLKST

SEQ ID NO: 637 - DNA, 1236 bp, Sorghum bicolor; identical to SEQ ID NO: 523

SEQ ID NO: 638 - protein, 411 aa, Sorghum bicolor; identical to SEQ ID NO: 524

SEQ ID NO: 639 - DNA, 1560 bp, Zea mays
atgggtcgagttgagctcgacttccagtcgacatgcacatcgagggcgcggtcagatcaccatggtcgtggctgctacatcagcggtgtagagtgtgaggcttgtctgaggtggtctgaaggcttattggatctgctagctcgtggtgaagagtccatagttgataaggaaaccaagcgagttgccgatccagacatccatgatgagttacctcatgttaatagcactcagtttgctttagagcttcacgtgaatgctgcttctatggtgcctcttgaaaatgagatggtagagaacaaagatgcagagaaatttcgtgagaaaatgcctttcgataacatcgtatgggatgaggaactagcatcagatggcaacacacatgatggcttattgcagcagctagctgaggtggaggaccagacccagtacaagaaggtctgcacagtgttgtctgagagcgaggcacaggtgtatgatgaaatacttggcaaggttgtatgggacgaggaaatgtcatccgagcttgacatggacaatgacttattgggactgctggtttctggcggggagtacccagttgatgagcaggttgtggatgactcctcggatttcaaagagtttggattggtcgatgcagaccatgtttttgtggaagggctcgatgaagatagcaaagcagtttgcaaggcaagcatgagtgatgagctaactcttgagataaacactccttttctctttggggttgctatagatcacgtgaatgagatgcctgtcaacatcaatttgcaagatggcctatcacaggagcgagcaagtggtagagagtatgtgtatgatgataagatggaccctattgttgagcctgactttgatctcagttttgctgtcagtattcaagaggagtgggatattcaatcacttgtgagggtgccagaacaagatcttattctgaaaatttgtgagcagtaccatggaggacaacccattgttttgacctgtcaatatatgattcaaactgatcaccattttggtggtacaagaaaaggagacaatgagcagagaggagtatgctttgcaaggactcatgttgcatggggacaagctgtgttgcaaccatgggcaagaaatgctttcagtcctggacaagttgagcagctacatcaaattgattctgctgcacataaggtcgctctggagctgggtatcaatttaccatctgatccatcagttcggatgcaatgggatccgggcatcagtacggccacagcttggggacaagctgtgtttcgaggggccggtaaatgtcatgacccaagtgtggcccagaagaagcccagcctacctgcccatttgccaaggccgaagcccactctatccaacccaattgctgaagccaaagaccacgaggacaaagaggagctgaggcatcgatgcagaggacaggaaattattcagaaagaagaaagaccgaggaacacaggaagctcgtcttcctcctctggctgtgagatcctatccccctctcgatttcccctgcaattactcacgctcccggattga

SEQ ID NO: 640 - protein, 519 aa, Zea mays
MGRVELDFQSTCTSRARSDHHGRGCYISGVECEACLRWSEGLLDLLARGEESIVDKETKRVADPDIHDELPHVNSTQFALELHVNAASMVPLENEMVENKDAEKFREKMPFDNIVWDEELASDGNTHDGLLQQLAEVEDQTQYKKVCTVLSESEAQVYDEILGKVVWDEEMSSELDMDNDLLGLLVSGGEYPVDEQVVDDSSDFKEFGLVDADHVFVEGLDEDSKAVCKASMSDELTLEINTPFLFGVAIDHVNEMPVNINLQDGLSQERASGREYVYDDKMDPIVEPDFDLSFAVSIQEEWDIQSLVRVPEQDLILKICEQYHGGQPIVLTCQYMIQTDHHFGGTRKGDNEQRGVCFARTHVAWGQAVLQPWARNAFSPGQVEQLHQIDSAAHKVALELGINLPSDPSVRMQWDPGISTATAWGQAVFRGAGKCHDPSVAQKKPSLPAHLPRPKPTLSNPIAEAKDHEDKEELRHRCRGQEIIQKEERPRNTGSSSSSSGCEILSPSRFPLQLLTLPD

SEQ ID NO: 641 - DNA, 1992 bp, Sorghum bicolor; identical to SEQ ID NO: 623

SEQ ID NO: 642 - protein, 663 aa, Sorghum bicolor; identical to SEQ ID NO: 624

SEQ ID NO: 643 - DNA, 951 bp, Sorghum bicolor
atggcctcctccctcgccgcgcgccgcctcctctcccgcgccgccgcggtgcgccgtatccccgtccccttcgcctccgcccccgcctccgcgatggctccccgccgcttctcggccgacgcgggaccgcctccgccgctcccgccgccgccgctggagcccgtcgtcgagccgcccacgtcggagggcgcgggcacctcgtcttcctccaccaccgccggtgcaggaggcggcgcccacaggtcgtcgcctggagcctccgcgggggcgcggcgccagggtggtgcgggctacgaggaggaacaggagaaagtcctccgcgcgtcgctgctccacgtgccgcgcatggggtggagcgagtcggccatggtcgcgggggcgagggacgttggcgtttctcctgccatcgtgggtgcattcccaaggaaggaggccgcccttgtcgagtttttcatggatgactgcctccaacaactgatcgatcgaattgatgctggagaaggagagcagttgaagaacttgatactgagtgagagactctcaaaacttgtccggatgaggctggaaatgcaggcaccttatatatctaagtggcctcaagcactgagtatccaggctcaaccagcaaacgtctcaacaagcttgaagcagcgagctgtcctggtcgatgagatatggcatgctgctggagattctggatcagatattgattggtatgtgaaacgtacagtgcttggtggtatctactcaacctcagaggtgtatatgttgacagacaattctccagagttccgcgatacttggacgtttgtgaaccgcagaataaaggatgctcttgatcttcagaaaacattccaagaggccgcatacctggctgaagccgtgggagcaggcatgggcggcaccgtgcagggtgttctcaacagggtcttccagaaacgtagtggatga

SEQ ID NO: 644 - protein, 316 aa, Sorghum bicolor
MASSLAARRLLSRAAAVRRIPVPFASAPASAMAPRRFSADAGPPPPLPPPPLEPVVEPPTSEGAGTSSSSTTAGAGGGAHRSSPGASAGARRQGGAGYEEEQEKVLRASLLHVPRMGWSESAMVAGARDVGVSPAIVGAFPRKEAALVEFFMDDCLQQLIDRIDAGEGEQLKNLILSERLSKLVRMRLEMQAPYISKWPQALSIQAQPANVSTSLKQRAVLVDEIWHAAGDSGSDIDWYVKRTVLGGIYSTSEVYMLTDNSPEFRDTWTFVNRRIKDALDLQKTFQEAAYLAEAVGAGMGGTVQGVLNRVFQKRSG

SEQ ID NO: 645 - DNA, 729 bp, Sorghum bicolor
atggatcccaagccctctgccgacgcgcccgccgcggcggccgaggagcacgtggcgtacccgcggatgtctccggaggacatcgccccgccgccgccgcctgtcgtgccgccggccggcgccaacccctacgtgctctccgccccgtcgtccaacccgccctccaagggcgctagggagaatctgagggacatgttcggcatggtggggaagaagttcaacgaggccgcgcgcaagaccgagggcatcgccggcgacgtctggcagcatctgaaaactggacccagcattgctgatactgccatggggaggattgctcagatatccaaggttatatccgagggtggctacgacaagatatttcagcagacctttgagtgctcgcctgatgagaagctcaagaaggcatacgtgtgctacctatcaacgtcgcatggaccgatcatgggtgtcctatatctctcgactgtgaagattgcatttggtagcgacagccctgtcaaatatgtgactgaggacaacaaaactcagtcatccttttataaggttgttttaccacttcctcacctgagatcagttattcccacagcaagtcagcaaaaccctgcagagaggtacattcaggtcgtttcagttgacaaccacgagttctggttcatgggtttcgtgaactatgatagcgctgtaaagaatcttcaggaggctgttcgtggtgttcacggggcctag

SEQ ID NO: 646 - protein, 242 aa, Sorghum bicolor
MDPKPSADAPAAAAEEHVAYPRMSPEDIAPPPPPVVPPAGANPYVLSAPSSNPPSKGARENLRDMFGMVGKKFNEAARKTEGIAGDVWQHLKTGPSIADTAMGRIAQISKVISEGGYDKIFQQTFECSPDEKLKKAYVCYLSTSHGPIMGVLYLSTVKIAFGSDSPVKYVTEDNKTQSSFYKVVLPLPHLRSVIPTASQQNPAERYIQVVSVDNHEFWFMGFVNYDSAVKNLQEAVRGVHGA

SEQ ID NO: 647 - DNA, 318 bp, Sorghum bicolor
atggcaatggagcacgtggcgaggctggcgtcggagcgcgcggtggtggtgttcacggcgagcaactgcagcatgggcgacgtcgtgacgtcgctgctgagcagcctgggcgtgaacgcggcggtgcacgacctggacagggacccccggggcatggagatgcagcgggagctggccaggaggctcggcgccggcgccaccgtgccggcggtgttcgtgggcggcgacctcgtcggcgggaccagcagggtcatggcgctgcacctctccggcgagctcgtgcccatgctcaggaacgccggcgcgctctggttgtag

SEQ ID NO: 648 - protein, 105 aa, Sorghum bicolor
MAMEHVARLASERAVVVFTASNCSMGDVVTSLLSSLGVNAAVHDLDRDPRGMEMQRELARRLGAGATVPAVFVGGDLVGGTSRVMALHLSGELVPMLRNAGALWL

SEQ ID NO: 649 - DNA, 1737 bp, Sorghum bicolor
atggcgagcaacggcttgtcgctggtgcgccgagccgccgaggcggtgcgccgcacgccgcgatggaagaaggggctcgtcttcttcgccgtcggagctagcaccttaacttttgcttgtcaagataatcgggttcttcaaatttgtgatgggactggaaacaagaagaaggtggttatccttggaactggttgggcaggtgcaagtttcttgagaaatatcgacacatctttgtatgaggtccatgtggtatcacctcgcaattacttcaccttcactcctttgttgccaaatgtgacatgtggcacagtagaagcacgtagtatcgtggagccaattcgcaatatcgtgagaaagagaaatggtgcattccgattttgggaggctgagtgcttcaagattgatccagcaaacaaaaaagtccactgcagatcagatgttgggacgaacattaatggaaatggcgaatttgttgtggattatgattacttgattgtcagtgttggggctagacctaatactttcaacacccctggtgttactgagaattgccatttcctaaaggaagtagaagatgctcaaaagatcaggaagagtgtcatgaaatgttttgaaagagctgcccttccaaacctttctgaggaagagcgaaagaagaaccttcattttgttgtcattggtggtggcccaacaggggttgaatttgctgcagagttgcacgactttgtgaatgaagacttggcaaagctgtatcctgatgtaaagaagtatgtaaacatttcagtaattgaagcaggaggtcatatccttacaatgtttgacaaaagaatcacccaatttgctgaagagaagttcaagagggatggcatagatttgaaaacaaattttaaggtcgtgaaggtgtctgataacgatattaccatgaccaatactgctacaggagaggtcactgttccttatgggatggcagtttggtcaactggaattggaacccgtcccataattatggatttcatgaagcaagttggtcaggggaatcggcgtgtgctagctactgatgagtggcttagggttcaagggtgtgaggatgtatatgctcttggtgattgcgcaacaattgctcaaagaaaagttatggaagatgttgctgccatattccgagtagcagacaaggataactctggcactttaactgtgaagaaaataaaagatgttcttggagacatctatgagagatacccgcaagtggaattgtatcttaaatccaaccaaatgaagggcttccacgatctacttaaagactcggatggtagctccaaggagttgaaagaactggatatcgaacagttcaagaaggccctggctcaagtggactctcaagtcaagatgctcccagcaacagctcaggttgccttacaagagggacgttacctagcagactgcttcaacagaatgaagacgtgtgaagaatatcctgagggtcctataaggatcagaggtacagggcgccatcggttcaaacctttcaggtacaggcatcttgggcaattcgccccactgggtggagagcaaactgcttatcaattgcctggtgactgggtacatgttggacacagcacccaatggctttggtattctgtctatgcaagcaaacaattcagttggcgtacaaggatgctggtcgtatcagattgggggaagcggttcatctttggaagggactcaagtagcatatag

SEQ ID NO: 650 - protein, 578 aa, Sorghum bicolor
MASNGLSLVRRAAEAVRRTPRWKKGLVFFAVGASTLTFACQDNRVLQICDGTGNKKKVVILGTGWAGASFLRNIDTSLYEVHVVSPRNYFTFTPLLPNVTCGTVEARSIVEPIRNIVRKRNGAFRFWEAECFKIDPANKKVHCRSDVGTNINGNGEFVVDYDYLIVSVGARPNTFNTPGVTENCHFLKEVEDAQKIRKSVMKCFERAALPNLSEEERKKNLHFVVIGGGPTGVEFAAELHDFVNEDLAKLYPDVKKYVNISVIEAGGHILTMFDKRITQFAEEKFKRDGIDLKTNFKVVKVSDNDITMTNTATGEVTVPYGMAVWSTGIGTRPIIMDFMKQVGQGNRRVLATDEWLRVQGCEDVYALGDCATIAQRKVMEDVAAIFRVADKDNSGTLTVKKIKDVLGDIYERYPQVELYLKSNQMKGFHDLLKDSDGSSKELKELDIEQFKKALAQVDSQVKMLPATAQVALQEGRYLADCFNRMKTCEEYPEGPIRIRGTGRHRFKPFRYRHLGQFAPLGGEQTAYQLPGDWVHVGHSTQWLWYSVYASKQFSWRTRMLVVSDWGKRFIFGRDSSSI

SEQ ID NO: 651 - DNA, 138 bp, Zea mays
atgccatgctttggtgttggtgctgatgaagatgaaatgggatcccaaaacatattacaaagggaaaggatctctcatccgtcttgcgactcttgcagctcttgcaagctgtatgccttgctctgtagtgtagtgtag

SEQ ID NO: 652 - protein, 45 aa, Zea mays
MPCFGVGADEDEMGSQNILQRERISHPSCDSCSSCKLYALLCSVV

SEQ ID NO: 653 - DNA, 879 bp, Sorghum bicolor
atggggggagcgcagttcctcggcgacaacgacgtcgtcgcggcccgcgacggggaggcggtggaccaccgccgcgacgtcggcaagatggagcacgggtgcgagcattaccggcgcaggtgcaagatcgtggcgccgtgctgcaaccaggtgttcccctgccgccactgccacaacgaggctacggcttctggagatcggcatacaatagttcgtcaggatgttaaaaaagtagtttgcctactctgtgaaacagaacagccggtgtcacaagtgtgcataagctgtggagtcaatatgggagagtacttctgtgatatatgcaaattttatgatgatgatatagggaaagggcagtaccattgcaatgattgtggcatatgcagggttggtggcaaggaaaaattcttccactgtgtaaagtgtgggtcttgctattctgttgaactgcgtgataaccatcggtgcgtggagaactcaatgaggcagaattgcccaatctgttatgagtatctatttgactcattacaaggaacaagagttcttaactgtggacacacaatgcacttgacatgttttgaagagatggtggagcataacaaatacacttgtccaatatgctctaaaacagctcttgatatgacacgtcattgggagatgttggatcaagagatcgaagccacaatcatgcctcctgtatatcggtacaagatttgggtgctttgcaacgactgcaacaaggtctcagaggtgaacttccatgtgatcggccacaagtgcagccactgcagctcgtacaacacccgatcaacatcgcgccctgcagattcatcgggaagcagctcaccttcgacagactcatccgacaacaacatgtag

SEQ ID NO: 654 - protein, 292 aa, Sorghum bicolor
MGGAQFLGDNDVVAARDGEAVDHRRDVGKMEHGCEHYRRRCKIVAPCCNQVFPCRHCHNEATASGDRHTIVRQDVKKVVCLLCETEQPVSQVCISCGVNMGEYFCDICKFYDDDIGKGQYHCNDCGICRVGGKEKFFHCVKCGSCYSVELRDNHRCVENSMRQNCPICYEYLFDSLQGTRVLNCGHTMHLTCFEEMVEHNKYTCPICSKTALDMTRHWEMLDQEIEATIMPPVYRYKIWVLCNDCNKVSEVNFHVIGHKCSHCSSYNTRSTSRPADSSGSSSPSTDSSDNNM

SEQ ID NO: 655 - DNA, 960 bp, Sorghum bicolor
atggcagccacggcttcgttcccggtggtgaacatggagaagctggagaccgaggagaaggccacggccatggagatcatccgcgacgcctgcgagaactggggcttcttcgagctgctgaaccatggcatctctcacgagctgatggacgaggtggagcggctgaccaaggcgcactacgccaacttccgggaggccaagttccaggagttcgcggcgcggacgctggaggctggcgacaagggtgccgacgtcaaggacgtggactgggagagcaccttcttcgtccgccacctcccggcctccaacctcgccgacctccccgacgtcgacgaccactacaggcaagtgatgaagcaattcgcatcggagatccagaagctgtcggagaagctgctggacctgctgtgcgagaacctgggcctggagcccggctacctcaagtccgccttcgctggctccaacggccccacgttcggcaccaaggtgagcgcgtacccgccgtgcccgcgcccggacctcgtcgacggcctccgcgcgcacaccgacgccggcggcatcatcctgctgttccaggacgaccaggtcagcggcctgcagctgctcaaggacggcgagtgggtggacgtgccgcccatgcgccacgccatcgtcgtcaacatcggcgaccagctggaggtgatcaccaacggccgctacaagagcgtcatgcaccgcgtgctcacccgccccgacggcaaccgcatgtccatcgcctccttctacaacccgggcgccgacgccgtcatcttcccggcaccagcgctcgtcggcgccgccggcgccgaggaggagcgcgccggccaggccacgtacccgaggttcgtgttcgaggactacatgaacctgtacgtgcgccacaagttcgaggccaaggagccacggttcgaggccatgaagtcggccatcgccaccgcgtga

SEQ ID NO: 656 - protein, 319 aa, Sorghum bicolor
MAATASFPVVNMEKLETEEKATAMEIIRDACENWGFFELLNHGISHELMDEVERLTKAHYANFREAKFQEFAARTLEAGDKGADVKDVDWESTFFVRHLPASNLADLPDVDDHYRQVMKQFASEIQKLSEKLLDLLCENLGLEPGYLKSAFAGSNGPTFGTKVSAYPPCPRPDLVDGLRAHTDAGGIILLFQDDQVSGLQLLKDGEWVDVPPMRHAIVVNIGDQLEVITNGRYKSVMHRVLTRPDGNRMSIASFYNPGADAVIFPAPALVGAAGAEEERAGQATYPRFVFEDYMNLYVRHKFEAKEPRFEAMKSAIATA

SEQ ID NO: 657 - DNA, 531 bp, Sorghum bicolor
atggcggaggaagcagcagcgccggcggtggcggcggggacggaagccgcgccgccgccggggaagatgacgatggtggtcggggtggacgagagcgagcacagcttctacgcgctgcagtgggcgctgcagcacttcttcccgccgccgccacagccgcagcagtaccgcctcgtcgtcgtcaccgccaagccttccgccgcctccgccgtcggcctcgccggcccaggcgccgcggatgtgctgccgtacgtggaggcggacctcaagaaaaccgccctgcgcgtcatcgacaaagccaaagcactctgcgcacaggtgagcgacgccgtgtttgaggcggtggagggggacgctaggagtgtcctctgcgaggcggtcgagaggcaccacgccgagatgctcgtcgtcggcagccatggctacggagccatcaaaagggctgttcttggaagtgtgagcgactactgcgcccatcacgcgcactgcaccgtgatgatagtaaagaagccgaagcatcacaagcactga

SEQ ID NO: 658 - protein, 176 aa, Sorghum bicolor
MAEEAAAPAVAAGTEAAPPPGKMTMVVGVDESEHSFYALQWALQHFFPPPPQPQQYRLVVVTAKPSAASAVGLAGPGAADVLPYVEADLKKTALRVIDKAKALCAQVSDAVFEAVEGDARSVLCEAVERHHAEMLVVGSHGYGAIKRAVLGSVSDYCAHHAHCTVMIVKKPKHHKH

SEQ ID NO: 659 - DNA, 783 bp, Sorghum bicolor
atggcggccaacccctccatcggcgctgacgtccccgcggccccggcggcggtgcggctctcgtcggcggcgcaggcggccgcgatccagccctcctccccgcgcttcttcttctcctcgctggccgggaccaacccggcctccccgcaccggcgcatcgccatcgccgtcgatctctccgacgagtccgccttcgccgtcaagtgggccgtgcagaactacctccgccccggggacgccgtcgtgctgctccacgtgcgccccacctccgtgctctacggcgccgactggggctccatcccggtctccgtcgctgacgaggctgacgcggccgaggacgccgccgccgccgccgtcgagggcgggccctccgaggaggagctgcagaagaagcgggaggaggactacgacgccttcacctccaccaaggcgcaagacctcgcgcagccgctggtcgacgcccagatccccttcaagatccacgtcgtcaaggaccacgacatgaaggagcgcctctgcctcgaggcggagcgccttggcctctccgctatgatcatggggagccgcggtttcggggcatcccggaaaggtggcaaggggaggcttgggagtgtcagtgattactgcgtacaccactgtgtatgccccgttgtggttgttcgctaccctgatgatgctgcaggtgccggtggagatgcagcaggggcgacagatgagttgcacactgtaccagaggacgaacctgtttatcacgatgcgcctgaggtgcagaaagaaaactga

SEQ ID NO: 660 - protein, 260 aa, Sorghum bicolor
MAANPSIGADVPAAPAAVRLSSAAQAAAIQPSSPRFFFSSLAGTNPASPHRRIAIAVDLSDESAFAVKWAVQNYLRPGDAVVLLHVRPTSVLYGADWGSIPVSVADEADAAEDAAAAAVEGGPSEEELQKKREEDYDAFTSTKAQDLAQPLVDAQIPFKIHVVKDHDMKERLCLEAERLGLSAMIMGSRGFGASRKGGKGRLGSVSDYCVHHCVCPVVVVRYPDDAAGAGGDAAGATDELHTVPEDEPVYHDAPEVQKEN

SEQ ID NO: 661 - DNA, 255 bp, Sorghum bicolor
atggagagcgccgacgcaatctgcggcatggcgaacgaggacttcaagctgtgccagcccgcggcatcggtgagtgacccgacggacagcccgtcggcggagtgctgcgctgcgctgggcaaggctgaccttgggtgcatctgccgctacaagggtgtcgccggcatatggatgaggatctaccacatcgaccccagccgcgctatggcgctgccgggcaaatgtggccttacaatgcccagcaactgctcgtga

SEQ ID NO: 662 - protein, 84 aa, Sorghum bicolor
MESADAICGMANEDFKLCQPAASVSDPTDSPSAECCAALGKADLGCICRYKGVAGIWMRIYHIDPSRAMALPGKCGLTMPSNCS

SEQ ID NO: 663 - DNA, 876 bp, Sorghum bicolor
atgtcgtcgctgggtggtcagcagcagcagcacgggcacggcgaggccgccagggcgcggctcaggtggacacgccagctccacgaccgcttcgtgctcgccgtggcccagctcggcggcgcagacaaggcgacacccaagtccgtgctgagggcgatggccgtgccggggctcacgctgtaccacctcaagagccacctccagaagtaccggctggcggtgagccgaggcgtcgcctccccgctcggcgacaacggagatggcaccatcgagcggtcgtcgtcctcggagagccagccggacgagtacgacgacgacggcaccatcgccgagctgcatggtgattcttccaggaccatggcgcggatgcagagggaggtgcagaggaagctgcaggagcagatcgaggtgcagcggcacctacagctgaggatcgaggcgcaggggaggtacctgcagtccgtgctgcgccgggcgcaggaggtcctcgccgacgaccacagcctgggctcgccggccggcgcggaggccgccaagggagagctctcggagctggctgcctccgcggtggagacggccgggtgcctgtcctcctcctgctcctgctgctgctgctccccctcgccgtccccgacgcgccaccgctctgccgacagcagctgcgtcacgtcgtcctcctcctcggaggccgagagccaccaggcccccgccgccggcgccaagtggcggctccacacgtgtggcgctggtactacgcgcgactgctccgacgtcgaccagccggtgctgcaggccgaggagagtacattcctgcagaggcacgacgcagaggatgcagaggacggcacttcatcagagattgatctcaacaggtag

SEQ ID NO: 664 - protein, 291 aa, Sorghum bicolor
MSSLGGQQQQHGHGEAARARLRWTRQLHDRFVLAVAQLGGADKATPKSVLRAMAVPGLTLYHLKSHLQKYRLAVSRGVASPLGDNGDGTIERSSSSESQPDEYDDDGTIAELHGDSSRTMARMQREVQRKLQEQIEVQRHLQLRIEAQGRYLQSVLRRAQEVLADDHSLGSPAGAEAAKGELSELAASAVETAGCLSSSCSCCCCSPSPSPTRHRSADSSCVTSSSSSEAESHQAPAAGAKWRLHTCGAGTTRDCSDVDQPVLQAEESTFLQRHDAEDAEDGTSSEIDLNR

SEQ ID NO: 665 - DNA, 318 bp, Sorghum bicolor
atgagacttcaggtgttactcgtcacactgggtgttctagccgtcctggcagctctgccactcagcaaaggcgaggaggaaggaggagcagcgcgcgccaagggctcatggccgtgctgcgacaagtgcggcttctgctacaggtcgttcccgccacggtgccagtgcctagacttctcgcagcgcgggtgccatccggcgtgcaggagctgcctcaagttcaccaccggcggcatcgacgaaccacccatcttccggtgcgcggacatcctcgtcaacttctgcgatcgaagctgcacgccgcctgaagctctctga

SEQ ID NO: 666 - protein, 105 aa, Sorghum bicolor
MRLQVLLVTLGVLAVLAALPLSKGEEEGGAARAKGSWPCCDKCGFCYRSFPPRCQCLDFSQRGCHPACRSCLKFTTGGIDEPPIFRCADILVNFCDRSCTPPEAL

SEQ ID NO: 667 - DNA, 921 bp, Sorghum bicolor
atggagggagcaggcgcggcccggaagaggtcccggccggagtcggcgaacgggtatgccgccggcgggaagcgctccaaagacacggagtcatttcaaactggtcaatcaagcaaatcgaagccttgcaccaagtttttcagtaccattgggtgcccatttggtgagggatgccattttctgcactttgtccccggtggttacccagcagttgcaaaaatgctcaatctaggtagccctgctgtatctgcgccatcaagaactcatgtggatcatgccgctcttactggcgcctctcatcaagcttcgatgggcaagacacgcatgtgcaccaagtacaatacgacggaaggctgcaaatttggtgataagtgccactttgctcatagcgaaagagagcttgggaagccagcctacatgtctcatgaaggacctcctatgggtggtcgatatggaggccgacctgaacctctgcaacaagcttccatgggtcctccagcaggaaactttggtgcttcggcgactgccaagatcagtgtggatgcctctcttgccggtggcataatcggtaagggtggggtcaacactaagcagataagcagagttacaggcgtcaagctctccatccgcgaccacgagtctaaccccagccagaagaacattgagcttgaaggcaattttgaccagatcaagcaagccagtgacatggtgagggacctcattgcgaccatcagcgcaagcatgccggcaaaaaacctatctgcttccgctgctccagcaggaggccgaggcggtggtcttgggggcaggagcaactacaagacgaagctgtgcgagaacttcgtgaagggtgcctgcactttcggcgaccggtgccactttgcccatggcgagaccgagcagcggagaggtgctgcttga

SEQ ID NO: 668 - protein, 306 aa, Sorghum bicolor
MEGAGAARKRSRPESANGYAAGGKRSKDTESFQTGQSSKSKPCTKFFSTIGCPFGEGCHFLHFVPGGYPAVAKMLNLGSPAVSAPSRTHVDHAALTGASHQASMGKTRMCTKYNTTEGCKFGDKCHFAHSERELGKPAYMSHEGPPMGGRYGGRPEPLQQASMGPPAGNFGASATAKISVDASLAGGIIGKGGVNTKQISRVTGVKLSIRDHESNPSQKNIELEGNFDQIKQASDMVRDLIATISASMPAKNLSASAAPAGGRGGGLGGRSNYKTKLCENFVKGACTFGDRCHFAHGETEQRRGAA

SEQ ID NO: 669 - DNA, 219 bp, Sorghum bicolor
tatggcaatgctagctacgttgatgaaaggcaccaccacagatacgagttgaatcctgatgtggtcccagaatttgaaaaggcagggctttctttcgttggcagggatgaaagcggtaaacgcatggagattatcgaactacccaactataggttttccgtcgatgtacaatttcaccctgaattcaagtcaaggcctcaagccatctccacttttctt

SEQ ID NO: 670 - protein, 73 aa, Sorghum bicolor
YGNASYVDERHHHRYELNPDVVPEFEKAGLSFVGRDESGKRMEIIELPNYRFSVDVQFHPEFKSRPQAISTFL

SEQ ID NO: 671 - DNA, 3384 bp, Sorghum bicolor
atgggcttttgtctctcttgcagggccgacgaggaaagggagagggagagggagaggaaggagagggagaaggcgcgccgcgacagggagagggaggcgtcgggcaggggagatgaccgggttctggagatgatgcgtagtttcagcttcatgcaggcgaccgaggaggattacatggagggtatgaccgcgtacgactacaactacaacggcgttgacgccggcggcaccgcgcacgggcctgttgcccccgagccgtttgcgccgtcgccggcgtcgacggcggcgagcctcagcttcaagtttcagcaccagatgcatgaaattccaacggagccggcggctgtggtttcgagagaattcacggcagcgagagaagagacggcggctgtggtttcgagagaattcacagcagacagagaagaggatgaacgagaacgagaggaagagaaggaatcactggctccgttgcaatcggcagacaaacaagaacaccaacacgaagcagaggaaacagagttcgtggtggaagaggaggtagaagagcagagcagagaggttgtgcaggaggaggcagcgccaccgaagatcgtcgcgaccacgcacaactatcagttcttgacggagcgcgacttccgggggttcgtcagggagccggaggccatgacggtgcgcgtgcaggagtctttcgtgccgccgtcgccgcctccgtcgcaccaccagcccgaggagcgacaggttgtcgacgtcgtctcctcccgcagcggccggttcctcacggagagggacttccggccggcggatgagcccgacgtgtgcgagagcgtggcgtcgtccgggaagagggcgccgtcgctgaagccgaagcctgcgagctccatgtccgtcgcgtccatgggcggcggcggcgccgtcgccgccaggacgagcttcgcgtcggagttctccggtttcggcgactccgactccgagtccagcgccagcgacggctactcggtgaaggatctcgtcgtcgactccgacagcgactggttcctctcggagaaggacttcccgacgtctgcgcgcgactccggcaacctcaaaagttacaaggccaaggtgctcaaggccatcgaagccctggaggcggcgtccaagctggagccgtcttaccaggactcagcgacgacgactgtgtcgccgggctcggtccagcagggctcaccagacaccattcccgatggttctcccaagttccctgaggacatgtggtctcgcagcccttcgccggacgtcgagtacaaagaggacgaggagaaggtaacaagagaagctgaagcacagtatgacgaggacatcgaacggagaagcacggcggaagaggaggcgggcatcgacatgagcgacgatgacgagcactcatcgggcggcgagaaggtagaatctggaccagcctatgatctggctcctgttgctgacgactgtatggaccattcggagaaggaaatcatcactgtacatgatcactcaggaggtgaagctgcttctgatgctcaaagaagtccaaaggcagtctctgagagagaattagctgtcgtgccatcagatcaagatgctggcccagtcaagagaagtccggagccatcggagcaggaatttattggtatggttgatcattcacttgagcacagttctgacgaccggaaggaaactgccagcgaaagcgatcagtcatatgaaatagtatttgatgacaaaaggaggccggagcctccagagactggattcgttggtacgagagatcactcacatgagcttatttctgatgtttggaaagagattgtcagtagaaacgatcagccacgcctagcggctcatgctgatgaggaaggcctggatacaactgatcgttcaaacggtcttgtttcttatcagaagaaagtgactttcagtactacaaatgatcaggcatatgctgcattttctgatgagaagagcgtcccagagactccagagcaagaattcagtctaaccgaccgtcgaaatggagtagttcctgacgccaagaacatttcagagaccaaagaagatgaggaacaagacagtgcaaatgatgatttggacaatgcagctcgacaggcctacatttcagtcacggggaaggcaaaggtatatgacgaagatggggaggatccggaagcgaagtggaaggatttgacagacgaggaggaagacgagctggagtcactgtgggagcaccaagacctgatagagcagctgaagcttgagctgaaaaaggtccggtcgatcgggctgccgacgatccttgaggagtcggagacaccgaaggctccaatggaggacctcaagccttggaggatcgatgctaagttcctccgtgaagacccgatggacgagctgaacaagttctacaagagttacagggagaggatgaggaagtttgacattttgtgctaccagaagatgtatgcaatagatttcctacagctcagaggcccccagcagtccagcaactctctaaagtccctgtcgccaacggtggcgtccatcctgtcacacaatttccggtcatctcgtcggagatctcccgaggacccatcggagcggttcctcaaggagctccgctatgatctggagacggtgtacgtcgggcagatgtgcctgtcatgggagttcctccggtggcagtacgagcaggcccgtgacctcccggagtcggactcttaccacagccaccagtacaacgtggtggccggagagttccagcagttccaggtcgtggtgcagaggttcgtcgaggacgaatcgttcaaaggccctaggctgccgaactacatcaacaaccgatgcgttcttcgcaatctcttgcaagtgcccgtgattaaagaggacagcttgaaggacaggatggaggatcagcgcaaggggaactacgtgataaccagtgaggagctggaggacatcatggaagaggcgatgcacatcatgtgggagttcatcaaggctgacagagtcgaggcgacgacgacgacatcggtgctcaagggcttgtcgagcacccacgtcgagctccaggaccccatggatcatgatctcatggcgcacatccattccaccttacagaagaaagagaagaggctcaaggacctcctcaggacgggcaactgcatcgtgaagaagtttaagaagcccaaggaggacagatcgaaccagaacctcttcttctcgcaggtggacatgaaactggtggcgcgggtgctgaggatgccgaggatcaccagcgagcagctgcagtggtgcaaggcgaagctcgacaagatcatactggtagatcataggaagatccacagggaggcttcatttttgttgtttccctgttga

SEQ ID NO: 672 - protein, 1127 aa, Sorghum bicolor
MGFCLSCRADEERERERERKEREKARRDREREASGRGDDRVLEMMRSFSFMQATEEDYMEGMTAYDYNYNGVDAGGTAHGPVAPEPFAPSPASTAASLSFKFQHQMHEIPTEPAAVVSREFTAAREETAAVVSREFTADREEDEREREEEKESLAPLQSADKQEHQHEAEETEFVVEEEVEEQSREVVQEEAAPPKIVATTHNYQFLTERDFRGFVREPEAMTVRVQESFVPPSPPPSHHQPEERQVVDVVSSRSGRFLTERDFRPADEPDVCESVASSGKRAPSLKPKPASSMSVASMGGGGAVAARTSFASEFSGFGDSDSESSASDGYSVKDLVVDSDSDWFLSEKDFPTSARDSGNLKSYKAKVLKAIEALEAASKLEPSYQDSATTTVSPGSVQQGSPDTIPDGSPKFPEDMWSRSPSPDVEYKEDEEKVTREAEAQYDEDIERRSTAEEEAGIDMSDDDEHSSGGEKVESGPAYDLAPVADDCMDHSEKEIITVHDHSGGEAASDAQRSPKAVSERELAVVPSDQDAGPVKRSPEPSEQEFIGMVDHSLEHSSDDRKETASESDQSYEIVFDDKRRPEPPETGFVGTRDHSHELISDVWKEIVSRNDQPRLAAHADEEGLDTTDRSNGLVSYQKKVTFSTTNDQAYAAFSDEKSVPETPEQEFSLTDRRNGVVPDAKNISETKEDEEQDSANDDLDNAARQAYISVTGKAKVYDEDGEDPEAKWKDLTDEEEDELESLWEHQDLIEQLKLELKKVRSIGLPTILEESETPKAPMEDLKPWRIDAKFLREDPMDELNKFYKSYRERMRKFDILCYQKMYAIDFLQLRGPQQSSNSLKSLSPTVASILSHNFRSSRRRSPEDPSERFLKELRYDLETVYVGQMCLSWEFLRWQYEQARDLPESDSYHSHQYNVVAGEFQQFQVVVQRFVEDESFKGPRLPNYINNRCVLRNLLQVPVIKEDSLKDRMEDQRKGNYVITSEELEDIMEEAMHIMWEFIKADRVEATTTTSVLKGLSSTHVELQDPMDHDLMAHIHSTLQKKEKRLKDLLRTGNCIVKKFKKPKEDRSNQNLFFSQVDMKLVARVLRMPRITSEQLQWCKAKLDKIILVDHRKIHREASFLLFPC

SEQ ID NO: 673 - DNA, 1347 bp, Sorghum bicolor
atggagcggtaccatccctccgaggtgtacgagctcttcgtgcgccacatgaacaccccgagggtggtggtggacaacggcgtgtgcgcgacggcgacgctggtgcaggtgcacagcgcgaggaagcacggcgtgctgctcgaggcggtggcggctctgtccgaccacggcgtctgcgtccgcaaaggctacatctcctccgacgacggccgctggttcatggacgtcttccacgtcaccgacgcctcgggacgcaaggtggccgacgccgacgccctgctggcgcgcctcgagtcctcgctcaccgcggacgcattgccgccccgcacaccgcccgccgccgccgtggggaatggggctgggcccgcgatgcccaccctgctcgagctcgtcggtgccgaccgcccgggcctcctctccgaggtcttcgccgtgctgcacgacctccgctgcgacatcgccgacgccagggcgtggacgcacggcggccgcgtcgcggccctcgtgttcgtgcgcgacgtggagacgggcgcgcccatcgacgacgcggcgcgggtcaggcgcgtcgagtccaggctaaggcacgtcctccgcggcggcgcgctcggcgccaggatggtccgggaagacgccgcggccgtcaacatggaccggaggctccaccagcttctcaacgaggacggggaggcggagtgccgcgccgaccaggcggacgcgacggcggtcgccgtgcaggattggggggagagagggtactcggtggtcaccgtcagctgccgtgaccggcccaagctgctcttcgacgtcgtctgcaccttgacggacttggattacgtggtgtaccacggcacgttcgatacggacggcgatcacgcccagcaggagttctacatcaggcggttggacgggcggccaattagctcggcggccgagaggcggcgcgtgatccaatgcttgcaagcggccatcgagaggcgcgcatccgagggcgtgaggctggagctgcgcatcaccgaccgccgcgggctgctcgcctacgtcacgcgcgtgttccgggagaacagcctctcggtcacgcacgccgagatcaccaccaggggcgacaaggccatgaacgtgttccacgtcaccgacgtggccggccggcccgcggaccccaagaccatcgacgaggtgatccagaggatcggcacggagagcctccgggtggacgaggagcggtggccgcgcctgtgctcgacggagggcgacgcgggccgcggcggcggcggtgcggggatcttctcgctcgggagcctcgtgaagaagaacctggccagcctcggcctcataagatcctgctcgtga

SEQ ID NO: 674 - protein, 448 aa, Sorghum bicolor
MERYHPSEVYELFVRHMNTPRVVVDNGVCATATLVQVHSARKHGVLLEAVAALSDHGVCVRKGYISSDDGRWFMDVFHVTDASGRKVADADALLARLESSLTADALPPRTPPAAAVGNGAGPAMPTLLELVGADRPGLLSEVFAVLHDLRCDIADARAWTHGGRVAALVFVRDVETGAPIDDAARVRRVESRLRHVLRGGALGARMVREDAAAVNMDRRLHQLLNEDGEAECRADQADATAVAVQDWGERGYSVVTVSCRDRPKLLFDVVCTLTDLDYVVYHGTFDTDGDHAQQEFYIRRLDGRPISSAAERRRVIQCLQAAIERRASEGVRLELRITDRRGLLAYVTRVFRENSLSVTHAEITTRGDKAMNVFHVTDVAGRPADPKTIDEVIQRIGTESLRVDEERWPRLCSTEGDAGRGGGGAGIFSLGSLVKKNLASLGLIRSCS

SEQ ID NO: 675 - DNA, 900 bp, Sorghum bicolor
atgaattcgctcgctttccctggctgcccgtcaccactgacgcccgcctccaccgcccccggcctccatcccatcccatcgccgcgtataaagattcgcttccagcgactagaagatgcagctcatcaccacctccgcgctcgaagctccgcctcctcccgaacccgtaccgtcgccatggcatccggcttgcctgtaagctccaaggaagtgctgccgtctcccctgacctccgcctccgagccccctcccctcttcgatggcactaccaagttgtacgttgcctattattgcccgttcgcgcagcgcgcttggattgccaggaactacaagggtttgcaggataagattaagattgtcgccatcgatcttgctgacaggccagcatggtacaaggagaaggtttatccagaaaacaaggtgccttctctggaacacaacaaccaggtgaaaggagagagcttggatttggttaagtacattgacagcaacttcgaaggtccatcgttgctccctgaggatcctgcaaagaagcagttcgctgaggagctgcttgcatatactgatgcatttaacaaagcattatactcatctttactcagcaaggaagatgtgtctgaggaaactgttgctgctttggataaaatagaagacgccctggggaaatttaatgacggcccgttcttccttggtcagttcagtttggtggacattgcatatgtaccattcatcgagaggtttcagatattctattccaacataaaaaactatgatatcacaaagggcagacccaaccttcagaagttcattgaggaagtgaacaagatcgatgcatatacgcagactaaactggacccagattttttacttgagcagacaaagaagcggcttggggtatga

SEQ ID NO: 676 - protein, 299 aa, Sorghum bicolor
MNSLAFPGCPSPLTPASTAPGLHPIPSPRIKIRFQRLEDAAHHHLRARSSASSRTRTVAMASGLPVSSKEVLPSPLTSASEPPPLFDGTTKLYVAYYCPFAQRAWIARNYKGLQDKIKIVAIDLADRPAWYKEKVYPENKVPSLEHNNQVKGESLDLVKYIDSNFEGPSLLPEDPAKKQFAEELLAYTDAFNKALYSSLLSKEDVSEETVAALDKIEDALGKFNDGPFFLGQFSLVDIAYVPFIERFQIFYSNIKNYDITKGRPNLQKFIEEVNKIDAYTQTKLDPDFLLEQTKKRLGV

SEQ ID NO: 677 - DNA, 1737 bp, Sorghum bicolor; identical to SEQ ID NO: 649

SEQ ID NO: 678 - protein, 578 aa, Sorghum bicolor; identical to SEQ ID NO: 650

SEQ ID NO: 679 - DNA, 1572 bp, Sorghum bicolor
atgggtcacatccccttcacctggctacccatgaaccccgacgccgccgcagcaacgctcaccgccgacgccgccgtcccggccgcacctatccctatccctacccctaccaccaccactgatgccgccgccatgcaacactactacctcaactcgtggctgcacgcatctcttatgcagccggcggtcgtccaaaccgccaccgaggaagcaaggcggcgccaggaccaggaggaagaagctgcatccatccgcctggtccacctcctcatcacctgcaccggcgccatccaggccggtgactactccgtcgctcacggcaacctgactgaggcacgtgcgatcctcaagaagatcccgacttcaaccggcatcggccgtgtaggcacccacttcaccgacgcgctcgcgcagcgcctcttcccggcgtacccgcacgcggcagcgctaccgtcgtgtttgcctcctgcaacgccgccggcgacctacaaccatttctacgacgcagggccgtacctcaagttcgcctactccgcggcaaaccgagccatcctaaaggcgttcgagggttgcaaacgcgtgcacatcatcgactttgccctcatgcaggggctccagtggccggctctcatggaggagctttccaagcgtgagggcgggccgccggagctccgcatcaccggcatcggcccaaacccgacgagtggccgcgacgagctccatgaggtgggcgttcgcctcgccgagtttgcgcgctacatgaagattcccttcaccttccagggagtctgtgccgaccatctggatcatctgaccgcctggattcacctcaaactccgaccagatgaggcgttagccatgaactccatcctgcagctccaccgcctcctcgtcgacccggacgctgacgagtcgaccatgccagcgccgatagacatcctcctcaagctggtcgtgaagctgaagcccaagatcttcacggtggtggagcaggaagcggatcacaataagccacggctattggagaggttcaccaacgccctcttccactatgccaccatgttcgactccctggaggccgtgtgctcggccgtcaatgttagcgccgccgccgccagaagcagcaccaacaccagcaccaccagctcgctcgcggaggcgtacctccggggcgagatcttcgacatcatctgcggtgagggcaacgcccgccttgagcgccatgagctgtgtaccgcctggaatgagaggctcacccgtgcggggttcacccaggtggagttcaacctcagcgaggccaacatggagataactgaactgatcaacgagtcttccttctccggcgccgggttcgacatcctgcagggttccggcggcctcgcgttggcatggcaaggccgcccgctgtatgtggcgacggcttggcatgcgatgggcggaggaaacgctgccagtgctgccatagctcacaccaaagagggagacagctaccagaaaggtaagaacagtagcggcagtggcggcggcaagggcaaccgcggccgctgtggagtagccggaggaataaccttt

SEQ ID NO: 680 - protein, 524 aa, Sorghum bicolor
MGHIPFTWLPMNPDAAAATLTADAAVPAAPIPIPTPTTTTDAAAMQHYYLNSWLHASLMQPAVVQTATEEARRRQDQEEEAASIRLVHLLITCTGAIQAGDYSVAHGNLTEARAILKKIPTSTGIGRVGTHFTDALAQRLFPAYPHAAALPSCLPPATPPATYNHFYDAGPYLKFAYSAANRAILKAFEGCKRVHIIDFALMQGLQWPALMEELSKREGGPPELRITGIGPNPTSGRDELHEVGVRLAEFARYMKIPFTFQGVCADHLDHLTAWIHLKLRPDEALAMNSILQLHRLLVDPDADESTMPAPIDILLKLVVKLKPKIFTVVEQEADHNKPRLLERFTNALFHYATMFDSLEAVCSAVNVSAAAARSSTNTSTTSSLAEAYLRGEIFDIICGEGNARLERHELCTAWNERLTRAGFTQVEFNLSEANMEITELINESSFSGAGFDILQGSGGLALAWQGRPLYVATAWHAMGGGNAASAAIAHTKEGDSYQKGKNSSGSGGGKGNRGRCGVAGGITF

SEQ ID NO: 681 - DNA, 2376 bp, Sorghum bicolor
atgggtgccaaagagaatggagaagagagagatgatcattcaagtgatgtggaaagagatggtaaacacgggaaggaaactgaaacagactatgaaccagctagaaattccctttcatcacctggtgaggctaccaataatgaagacactaaagtgaaaagagtctcaagggttccaaagaagctagcaaggaaagagtctaaggaaaacagcccacgctcagcaagaagcatttccaatcgtcaaatccacaccaagctgcagtttatatcgtcaaacagtagccagaacaaatcgccaaaatcaaacaaagcagctaatggcgctaaaactgttgaaatgaagaagccagagactccgaaagctccttcttgttcttcatctgagatgtctgaggaaacagatgacaaagctattgaggatagacccacagatgacaaagcagttgaggacagagtcaaggatgatagcgctgttgaaggcagagccaccaatgatcaagccgttgatgacagagcgaagaatgataaggacattgaggacggaatgaaggatgataaggccattgaatgtgaagtcactgatgataaacctattgagagcaaagtaactgatgatattgccattgaggtagagattgaaggtaaagccattgaagaggcaaaggagatcgatatattggatgaagctccgaaatgtgatcagagtactggcactgatgatgaaattgctgatacggaagaaaacatagctgataatggcaactcagtttcatatgaaaataatgaggaattatatacaaaaattgagaagttggagcaggagctacgtgaagttgctgcccttgagatttctctctactctgtggtgccagagcacggttgttcatcacataagttgcatacaccagctcgccgtctatctaggatgtacattcatgcatcaaaattttggtcctcagataagaaagcttcagttgcaagaaattcaatttctgggcttgtgcttgttgcaaagtcttgtggcaatgatgtttcaaggttgacattttggctatcgaacacagttgtcctgagagaaatcattgcacaaacatttggtacttcacgacactcaagtccagttcggggtttcagcacaaatggtaatgcaaagaagcctgacaggagtttcgctccaacgcgatggaaaagtaactataatggcaagtatgcgaaacccaatatcatgcagctgccagatgattggcgggaaactagcacgctgctggatgcgttggagaagatcgaatcttggatcttttctcggattgttgagtctgtgtggtggcaggcaatgacaccccacatgcaagcccctgtagaagatttgtcaactccaaagattgggaagttattagggcattctttgggtgatcagcaacatgggaatttttctattgatctctggaaaactgcatttcatgatgcattcagcagaatctgtcctctccgtgctggtggacatgagtgtggatgtttaccagtgttggcaaaattggtgatggagcactgcatagcccgtttagatattgctatgtttaatgccatccttcgtgaatcagagaatgagatacctaccgatcctatatctgacccaattgtggactcaagagttctgccaattccagctggcgacttaagctttggatcaggcgcacagctgaagaactctgttgggaattggtccagatggttgactgatacatttggcatggatgctgccgaatctggaaaggatggtcaagatgtggaaagtaacggtgatgacagaagagatgcagctgaatcaacttgttttaagctacttaatgagttgagtgatcttttgatgctcccgaaggacatgcttctcgagaaaaccattaggaaagaggtctgtccttccattggccttccactagtaacaagaatactctgcaacttcactcctgatgagttctgccctgatcctgttcctggcatggttctagagcagctgaattctgagagtttgctggagcgattcacagagaaagacatgatcagcacattcccagtcaccgctgctccagtggtgtacagcccccctacgctggaggacgtcgcggagaaagtggctgacacagcttgtggcaatccagagctggaccggagggggtcaatggtgcagaggagagggtacaccagcgatgacgatctggatgacctggagttccccctggcatccctgtacgacaagagcaatcccccctccccgtgcaacaatggcgtcgcacatttcagcactcggcagggagcctccattgagaatgcgagacacgagctcctgcgagaagtatggtccgaacggcgatga

SEQ ID NO: 682 - protein, 791 aa, Sorghum bicolor
MGAKENGEERDDHSSDVERDGKHGKETETDYEPARNSLSSPGEATNNEDTKVKRVSRVPKKLARKESKENSPRSARSISNRQIHTKLQFISSNSSQNKSPKSNKAANGAKTVEMKKPETPKAPSCSSSEMSEETDDKAIEDRPTDDKAVEDRVKDDSAVEGRATNDQAVDDRAKNDKDIEDGMKDDKAIECEVTDDKPIESKVTDDIAIEVEIEGKAIEEAKEIDILDEAPKCDQSTGTDDEIADTEENIADNGNSVSYENNEELYTKIEKLEQELREVAALEISLYSVVPEHGCSSHKLHTPARRLSRMYIHASKFWSSDKKASVARNSISGLVLVAKSCGNDVSRLTFWLSNTVVLREIIAQTFGTSRHSSPVRGFSTNGNAKKPDRSFAPTRWKSNYNGKYAKPNIMQLPDDWRETSTLLDALEKIESWIFSRIVESVWWQAMTPHMQAPVEDLSTPKIGKLLGHSLGDQQHGNFSIDLWKTAFHDAFSRICPLRAGGHECGCLPVLAKLVMEHCIARLDIAMFNAILRESENEIPTDPISDPIVDSRVLPIPAGDLSFGSGAQLKNSVGNWSRWLTDTFGMDAAESGKDGQDVESNGDDRRDAAESTCFKLLNELSDLLMLPKDMLLEKTIRKEVCPSIGLPLVTRILCNFTPDEFCPDPVPGMVLEQLNSESLLERFTEKDMISTFPVTAAPVVYSPPTLEDVAEKVADTACGNPELDRRGSMVQRRGYTSDDDLDDLEFPLASLYDKSNPPSPCNNGVAHFSTRQGASIENARHELLREVWSERR

SEQ ID NO: 683 - DNA, 1263 bp, Sorghum bicolor
atggcgtacctccctccccacaagcgccactccagcaccacagcctccacgcccacccccgcgcccaacccgccacctccgtccctctcctcctccctccgctccctctccctctcctccccgcgaggccgcggccgcggcgccggcggacgccacccgcgcgcttctacttctacaaagatcatccacgccgccggatgcatctcccgttggtccccgctaccgcccttctcccctggcggcgacggcgaggagtacaccctccgcctcgagcccttcgcttgcgcccccatcgagcacaggaccggcgccaaaccccttgccctcgtcgtcgcctccaccccaggagaaggctcctccggatccactacggcggcggtcactgccatcgccgagaggttccttcccgatctccttgccgctgcggagaggaccaaggtagagggcgcgcctaaggatgagttggttaagctgagtctcgtggcaaggctgggaaaggtgctcttcgagtgccagcccggtggatcgcccgtctcactggacacactccgccaggcagcaaaagcaggggaagatggttccaagagccagttgcgtaaatcgttctacaccagtatgcctagtgagtgtctggatgatatggagcgatccatggtgaagagtatggggctggattttgattcgtccaaggagcactaccatgtgaaggtgtttgacaagaatcaaagtgattctacaatatcttgcaaatgcaccatggaggaagatggtagccttgctatccagaaggttgaattgaatcaggtacgccacttggtggaagacatatcctgtcttttcaaaggtcttgatctaaggctgatgttgtgtaagaaaaggatcctgaaaaacttagattctgaagtggaaaatgctgtaaagagcttggtgtctgctgctattattgatcctaatgtgaaaggggggattagatggccacttggaaaggagtcaattggtgagaggttcagcatagttggggtgtggcacacaaactacaaagctttcagaaatgaaaccatgaggctcaagctaaggcatgctgacagattcgatcaccggagctcgactggggaagtttcaaatgaagttacattcaaactaactgccatttctcgcaaactggaggaagatgacccggtggagaactctgtgaaggagatgctggagtctgcggtccaaatgatttgggacaatgcgctgaactaccagatcgtaccttga

SEQ ID NO: 684 - protein, 420 aa, Sorghum bicolor
MAYLPPHKRHSSTTASTPTPAPNPPPPSLSSSLRSLSLSSPRGRGRGAGGRHPRASTSTKIIHAAGCISRWSPLPPFSPGGDGEEYTLRLEPFACAPIEHRTGAKPLALVVASTPGEGSSGSTTAAVTAIAERFLPDLLAAAERTKVEGAPKDELVKLSLVARLGKVLFECQPGGSPVSLDTLRQAAKAGEDGSKSQLRKSFYTSMPSECLDDMERSMVKSMGLDFDSSKEHYHVKVFDKNQSDSTISCKCTMEEDGSLAIQKVELNQVRHLVEDISCLFKGLDLRLMLCKKRILKNLDSEVENAVKSLVSAAIIDPNVKGGIRWPLGKESIGERFSIVGVWHTNYKAFRNETMRLKLRHADRFDHRSSTGEVSNEVTFKLTAISRKLEEDDPVENSVKEMLESAVQMIWDNALNYQIVP

SEQ ID NO: 685 - DNA, 591 bp, Sorghum bicolor
atggcggccgcggcgcgcgcgatcatctgcgagctggcgccgcagaaggtgtcgtcgtcgacggcgtcggggcccgtggcgccgaagaagcgcgacgccgggacgaaagtggtgctccagccccggctctgcacgctgcggtcgtacggcgccggcagcggcgtggtgacgcggaggattctggccggggaggaagacggaagcggagccgccgactcgggcggctccgcggcgtcaccgttcttcgcctcgctcgccgactacatcgagagctcccgcaagagccaggacttcgagaccatctccggccgcctcgccatgctggcgttcgcggcggcggtggccgtggagacgacgacgggcagctcgctgttcaagaagctggacacgatggagatcgaggaggcggcgggggtgtgcgtggcggtggtcgcctgcgccgcggcgttcgcgtgggcctccagcgcgcgcaacaggatcggtcagatgttcacgctgggctgcaacgccttcgtcgactccctcatcgacaacatcgtcgaggcgctcttctccgagggcgagctgcaggactggtccgacgacatataa

SEQ ID NO: 686 - protein, 196 aa, Sorghum bicolor
MAAAARAIICELAPQKVSSSTASGPVAPKKRDAGTKVVLQPRLCTLRSYGAGSGVVTRRILAGEEDGSGAADSGGSAASPFFASLADYIESSRKSQDFETISGRLAMLAFAAAVAVETTTGSSLFKKLDTMEIEEAAGVCVAVVACAAAFAWASSARNRIGQMFTLGCNAFVDSLIDNIVEALFSEGELQDWSDDI

SEQ ID NO: 687 - DNA, 1401 bp, Sorghum bicolor
atggacaagagcggggcggcagccgacgacgtcgagcggggcgactacgagcaggagcacgacaggagagggacggtatggacggcgacggcgcacattgtgacggcggtgatcggctccggcgttctggcgctggcctggagtgtggcgcagctgggctgggtcgcggggcccctcgcgctcgccggcttcgcgtgcgtcacctactacacctccaccctgctcgccaacgcctaccgcgcgccacaccccgtcaccggcgacaggaaccgcacctacatggacgccgtcagatcctacctcagtcccagagaggtgctcatgtgcgggatcgcgcagtacgtgaacctgtggggcaccatggtcggctacaccatcactgcaaccataagcatggccgcgatcaggcagtccgactgcttccaccggaacggcgccggcgcgcgctgcgacgcgtcagggaccgtgctcatgctggcgttcagcgtggtccaggtggtgctgtcccagttccctggcctggagcacatcacctggctgtccgtcgtcgcggcggtcatgtcgttcgcctactccttcatcggcctcggcctctcggtggggcagtgggtgtctcacggtggcggcctcgggggcaggatcgcaggtgctaccgcggcgtcctccaccaagaagctctggaatgtgctccttgccctggggaacattgccttcgcttacacctttgcggaagtgctaattgagatccaggatacactcaagtcaccaccaccggagaacaagacgatgaagaaggcagcaatgtatgggattggagccaccaccatcttctacatctctgttggctgcgctgggtatgctgcatttggttcaaatgctccaggcaacatcctgacggcaggcgggttgggtcccttctggctggttgacattgccaacatgtgcctcattctccacctgatcggtgcataccaggtatatgctcagcctatctttgcttcagttgagaggtgggcagcctcccggtggccggaagccaagttcatcaacagcgcctacaccgtcagcatccccctcatgcagagaggatcggtgaccgttgcaccatacaagcttgtcctaaggactgttatagtcaccgcgacgactctagtggcactgatgataccattcttcaacgctgtgctggggctcctcggcgcattcagcttctggccgctgacggtttacttccccataagcatgcacattgcccagggcaagatcaccaaggggacgaagtggtaccttctgcaggctttgagcatgatttgtttgatgatttcagtggcggtgggaataggctctgtaactgacattgtcagtagcctgaaggtctcttccaaccctttcaaactgtaa

SEQ ID NO: 688 - protein, 466 aa, Sorghum bicolor
MDKSGAAADDVERGDYEQEHDRRGTVWTATAHIVTAVIGSGVLALAWSVAQLGWVAGPLALAGFACVTYYTSTLLANAYRAPHPVTGDRNRTYMDAVRSYLSPREVLMCGIAQYVNLWGTMVGYTITATISMAAIRQSDCFHRNGAGARCDASGTVLMLAFSVVQVVLSQFPGLEHITWLSVVAAVMSFAYSFIGLGLSVGQWVSHGGGLGGRIAGATAASSTKKLWNVLLALGNIAFAYTFAEVLIEIQDTLKSPPPENKTMKKAAMYGIGATTIFYISVGCAGYAAFGSNAPGNILTAGGLGPFWLVDIANMCLILHLIGAYQVYAQPIFASVERWAASRWPEAKFINSAYTVSIPLMQRGSVTVAPYKLVLRTVIVTATTLVALMIPFFNAVLGLLGAFSFWPLTVYFPISMHIAQGKITKGTKWYLLQALSMICLMISVAVGIGSVTDIVSSLKVSSNPFKL

SEQ ID NO: 689 - DNA, 1260 bp, Sorghum bicolor
atgcacgctgccggccaggcccccgctaccaccggcctgagtgtgagcccttttctgccggcagcgcccgtgcagctagtccggctgaggaagctgttgtacctgcaggcgtcaggtacggtgcttgccgccgccggcgaggtctccgacggcctgttgacaagcttcgtattactcatggcactactttgctgtgctggcgttgtcggcatctgtgtcctggggtggctgctgttctggcgccgcaaggccgtgacctccctcgagttcgatgaccaggaagtacttgacaacctttccgacaacaatataattggtcgcagtgagacaggagaccaactgtaccgggtccgtcttcaggacagcaatggcagcgggcgcttcaggttggtaaccgtgaagaagttggagaacgagataggaacggtggatgacaatcttaagaaccgatgccagtccgaggtaaacaagctgggcgtcatccgtcacgacaacatcatcagccttgtccactgtatcgagagggacgacatgatcctgctcttatacgagcacatggagaatggcaggcttgacgaatggctgctgcactaccagcccctggacctggaagccagcgagcggcggcggcatcgtccgccgctgcgctggcgtgaacggcgagccattgccgtcggcgtggccaaaggactctttcacttgcaccatggatgcaacaaacctatcatccaccgcaacatcaagccgagcaacatcttgctcgacggcgacctcaatgccaagatcgctggtttcgacctggcccagatcaaccttgctggactgagccagccgttgagaaactcggaacttccggctgattcctttgggtacacggctccagaatatgcgacggtcgaggtgagtgagaaggtggacgtgtacagctttggtgtgctgctgctggtcctcgttacggggagaccagccaacacaccaggagcgcgcggccacttggccacttgggcacgtggacaccacgacgaactgatcgctgctggggaatcctaccatgaagccttggggagatcagtcgacatggatatcccggatcgggccaggcagtacttgaaggagatggctgccgtgttcaggctcggtgtggattgcaccgtcgcggatccacagcagaggccgtccatgcagacggttctgagccgcctccagaggtcttggtggctgtggggacgactgggacaacaatgcgtcagcctatcgtga

SEQ ID NO: 690 - protein, 419 aa, Sorghum bicolor
MHAAGQAPATTGLSVSPFLPAAPVQLVRLRKLLYLQASGTVLAAAGEVSDGLLTSFVLLMALLCCAGVVGICVLGWLLFWRRKAVTSLEFDDQEVLDNLSDNNIIGRSETGDQLYRVRLQDSNGSGRFRLVTVKKLENEIGTVDDNLKNRCQSEVNKLGVIRHDNIISLVHCIERDDMILLLYEHMENGRLDEWLLHYQPLDLEASERRRHRPPLRWRERRAIAVGVAKGLFHLHHGCNKPIIHRNIKPSNILLDGDLNAKIAGFDLAQINLAGLSQPLRNSELPADSFGYTAPEYATVEVSEKVDVYSFGVLLLVLVTGRPANTPGARGHLATWARGHHDELIAAGESYHEALGRSVDMDIPDRARQYLKEMAAVFRLGVDCTVADPQQRPSMQTVLSRLQRSWWLWGRLGQQCVSLS

SEQ ID NO: 691 - DNA, 2625 bp, Sorghum bicolor
atgcatgatgaagctgttgtgcattacatagacatgattgatcagaccacacttggtcatcggatgatcaagaaacagttcaaaaagattccaagagctggctggcaaattgatccttttggtcattctgcagttcaagcttacttgcttggagcagagcttggtttcgattctgtacatttcgcaagaattgattaccaagatagggcaacgcgaaaagcaaataagggcctagaggttatatggcgtggctcaagaacttttggttcatcttcacagatcttcacgaatgtatttcctgaccattataatgcaccagatggcttcagcttcgaagttttggctgaaaatgtcatacccgttcaggatgacatgtcactctttgactataacgtccaagaacgtgtaaatgattttgttgctacagccatagcacaggcaaatgttacacgtacaaaccatataatgtggaccatgggggatgattttaactaccagtatgctgaatcttggtttcggaatatggacaaacttattcaatatgtgaacaaggatggccgagtgcatgcattatattctactccgtccatctacacagatgctaaacatgcatcaaatgaatcttggccagtaaaatatgatgattatttcccctacgctgattcaacaaatgcatactggactgggtattttacaagccgtccaacattcaagcgatacattcgagtgtacagtggatattacctggctgcacgtcaaatagaatttttaatcggtaggagttccttaggattgttcacttccagcttggaagatgcaatgggtattgcccagcatcatgatgcaatctcaggtactgcaaaacagcacacaactgatgactactcgaaacggattgctattggcgcatcaaaggtcgaaaaaggtgtaaacattgctctgacttgtcttaccaactccaacaaaacatgtgcatcctctacagtaaaatttagtcagtgtccacttctaaatataagctactgcccttcgactgaggaagcaatttcagcaacaaagcatttagttgtagttgcttacaatcctcttggatgggaacgtagtgacttcataaggcttcccgtcaatgatgaaaaccttgttgtcaaaagctttgatggaaatattgttgtgtcacaaatagttgaggttgataatgtgacaggcaatttaagaaagttatatgtgaaggcttttcttggagtcgcaacagacaaggcccctaagtattggctaacatttcaagcttctgtgccaccaatgggatggaattcttacttcattctgaaatcaactggagctggatacaacaatactgagtatgtcccagccgtggtttctccaagtaaccgcacaattgaagttggaccagggcatctaaagatgtccttttcttcagcatctggacaactagagaggataatcaattcggcctcaggagtggacttaccggttcaacaaagcttcctttggtatagatcgagtaaaggagattccttggacccacaggcatctggagcttatatatttagaccagatggtaatacaccaactattgtttcatcatcggtgactctcaaagttatccgtggacctctatttgatgaagtgcatcaacaattcagctcttggatttatcagattacacgactctacaagaacaaggagcatgctgaagttgaatacacgattggtccaatccctgttgatgatgacgtaggaaaggaggttatcacacagttgactgcaaatatgagtacaaacagtacattttatacagattccaatggaagggatttcctcaaaagggtgagaaactacaggaaggattggaatcttcaagtgactcaaccagttgcaggaaattactacccggtcaatctcggagtgtatatagcagataacaaatatgagttatctgtacttgtggaccgtgctatcggagcatcaagcattcaggatggtcagctagagattatgctacacaggcgtttacttaatgatgatggcagaggtgttgcagagccacttgatgaagtggtttgcgtggatcaacattgcgaagggcttacggccagaggcacttactatatcaatgtcgaaaagctagggcatggagctcactggcgtcgtacatatggccagcaagtctattctccttttctccttgcttttactcatgaggacgcgacaagcgcgaaatcttacaatgtggccaaagctactatgatggatgtgaattacagtcttcctgataatgttgcaattatcactttgcagaatcttgatgatggtaccacactactccgcttggcccatctttttcaagctggtgaggacccgaaatattcagtggtagcaaaggttgatctgaaaaaggtcttcggaaggagaactatcaaggaattgaccgagactaacctttccgcaaatcaaaagaagtcagagatgaagaagctcaagtggagggttattggggatatggaaaatggtactacctcagtaaaaggtggcccggttgattgtcgagctctagttgttgcgctgggacccatggagatacgcaccttcttgctgagattttaa

SEQ ID NO: 692 - protein, 874 aa, Sorghum bicolor
MHDEAVVHYIDMIDQTTLGHRMIKKQFKKIPRAGWQIDPFGHSAVQAYLLGAELGFDSVHFARIDYQDRATRKANKGLEVIWRGSRTFGSSSQIFTNVFPDHYNAPDGFSFEVLAENVIPVQDDMSLFDYNVQERVNDFVATAIAQANVTRTNHIMWTMGDDFNYQYAESWFRNMDKLIQYVNKDGRVHALYSTPSIYTDAKHASNESWPVKYDDYFPYADSTNAYWTGYFTSRPTFKRYIRVYSGYYLAARQIEFLIGRSSLGLFTSSLEDAMGIAQHHDAISGTAKQHTTDDYSKRIAIGASKVEKGVNIALTCLTNSNKTCASSTVKFSQCPLLNISYCPSTEEAISATKHLVVVAYNPLGWERSDFIRLPVNDENLVVKSFDGNIVVSQIVEVDNVTGNLRKLYVKAFLGVATDKAPKYWLTFQASVPPMGWNSYFILKSTGAGYNNTEYVPAVVSPSNRTIEVGPGHLKMSFSSASGQLERIINSASGVDLPVQQSFLWYRSSKGDSLDPQASGAYIFRPDGNTPTIVSSSVTLKVIRGPLFDEVHQQFSSWIYQITRLYKNKEHAEVEYTIGPIPVDDDVGKEVITQLTANMSTNSTFYTDSNGRDFLKRVRNYRKDWNLQVTQPVAGNYYPVNLGVYIADNKYELSVLVDRAIGASSIQDGQLEIMLHRRLLNDDGRGVAEPLDEVVCVDQHCEGLTARGTYYINVEKLGHGAHWRRTYGQQVYSPFLLAFTHEDATSAKSYNVAKATMMDVNYSLPDNVAIITLQNLDDGTTLLRLAHLFQAGEDPKYSVVAKVDLKKVFGRRTIKELTETNLSANQKKSEMKKLKWRVIGDMENGTTSVKGGPVDCRALVVALGPMEIRTFLLRF

SEQ ID NO: 693 - DNA, 1698 bp, Sorghum bicolor
atggcgtcggcggcggggtcgggcggcggggccggcgcgggggccggcgggctgaagacctacttcaagacccctgaggggcggcacaagctgcagtacgagaagacgcactcccccgccgtcgtgcactacaaccacagcggcaagaccgtctcccagatgacggtggcatatttgaaggagaagccagcaggccagggttccacgccttcaacaccaagtgctggtagtgggatgcggtctgcagctgcaaggctgctcggcactgggaatgggagccgggcacttagctttgggaacaatggtaccagcagggctgtctcaggaaacagccgcatgggtggaggcatcggtgtgtcgactagtgcgagtgcatcgcaagccatggcgaactatgatggaaagggcacgtacatcatattcaatactgcggatacacttttcatcagtgatctcaactcacacgacaaagatccaataaagtccatccacttcagcagctcaaacccgctttgccatgcatttgacccagaggccaaggatgggcacgatctgctcgttggggtgttctcaggagatgtctattcaatgtcactgaggcagcagttgcaagatcctggaaagaagcccgtttcatatcagcattttgttaataaagacaaagacaaagacaaagatccaagtcaaggtggcgctgccagcagtcggtgcacttgtgtggcatgggttccagagcgtgaaggaatttttgttgttagtcatgctgatgggaatctgtacgtgtatgacaaatccaaggatggaaatactgattggacatttccaactgtaaaggatcaaagccaggtgctgatttcacatgcaaagtcgagtaagggtaatccaattgcaaggtggcacatctgtcaaggtgcaatcaatggcatttccttttcaccagatggtgcttacttggcaactgttgggcgagatggttatttaagagtatttgactttgcgaaagaacaactaatatttggtgggaaaagttactatggtgcactgttgtgttgttcttggagtgcggatggcaaatatttgttatcaggtggtgaagatgatcttgtgcaagtatggagcatggatgaaagaaagatagttgcatggggcgaagggcataattcatgggttagtgcagtttcttttgatccatattggtccccaccaaattcagatgaaacggaagaaaatgtcatgtatcgctttgggtcagttggacaggatacccaactgcttctctgggatctggcattggaggagattgctgtccctctacgccatccttcaggtggctcaccgacattcagtagtggaagcccttctgcacactgggacaatgcatgccctccaaccggtgttctccagccttctccacggatgcgagatgtgccaaagctctcacctcttgttgcacaccgggtacatgtagatcccctatctggcgtggaattcactagtgaatcaatcctcactatatgccgtgaggggctaatcaaaatttgggcccgacccattcatagtgaaaacaaccagcagccagattcttctgaacaggttgtaggcaatgctactgctaaggataagatgttaacatcatcaaataaagcaggtgcttccagctccagcttcaagcaaccgccatctgttcttttcacatga

SEQ ID NO: 694 - protein, 565 aa, Sorghum bicolor
MASAAGSGGGAGAGAGGLKTYFKTPEGRHKLQYEKTHSPAVVHYNHSGKTVSQMTVAYLKEKPAGQGSTPSTPSAGSGMRSAAARLLGTGNGSRALSFGNNGTSRAVSGNSRMGGGIGVSTSASASQAMANYDGKGTYIIFNTADTLFISDLNSHDKDPIKSIHFSSSNPLCHAFDPEAKDGHDLLVGVFSGDVYSMSLRQQLQDPGKKPVSYQHFVNKDKDKDKDPSQGGAASSRCTCVAWVPEREGIFVVSHADGNLYVYDKSKDGNTDWTFPTVKDQSQVLISHAKSSKGNPIARWHICQGAINGISFSPDGAYLATVGRDGYLRVFDFAKEQLIFGGKSYYGALLCCSWSADGKYLLSGGEDDLVQVWSMDERKIVAWGEGHNSWVSAVSFDPYWSPPNSDETEENVMYRFGSVGQDTQLLLWDLALEEIAVPLRHPSGGSPTFSSGSPSAHWDNACPPTGVLQPSPRMRDVPKLSPLVAHRVHVDPLSGVEFTSESILTICREGLIKIWARPIHSENNQQPDSSEQVVGNATAKDKMLTSSNKAGASSSSFKQPPSVLFT

SEQ ID NO: 695 - DNA, 525 bp, Sorghum bicolor
atgccaagagtcgtcgtcggcggtggcaaggtcgccacctacaagggcggcatcaagggctactggaagcggcgcggctacgaccggctcgacgcggccgcggcgcagccccgcccgcgcctcccgaccgcggagctcggtggcggcggcgagggcgagggcgaggcgcagcctcagccgcagcggcaccgtcgccgcgggtggcgcgttcgccgccggcgcgcgggcgtcctgggccggcgcctcctgcgcgcgctctcgccgctccggctgctggcgcggctccgcgacgcctacgtgaacgccatgctccgcctcgcgtcctccgccgccgtggtcggctacggcgcctccacggggccgtactgcaccgcggccgccgacccgttcaaccggccgcgcccgctcaccagggactacgacgagaaggcgctcgtcgagatctacaggtccatcctcgcgcgcggcggcgaggccgggccggtgccggtgctcgccgccgcgcggctgcccgcggcggtctga

SEQ ID NO: 696 - protein, 174 aa, Sorghum bicolor
MPRVVVGGGKVATYKGGIKGYWKRRGYDRLDAAAAQPRPRLPTAELGGGGEGEGEAQPQPQRHRRRGWRVRRRRAGVLGRRLLRALSPLRLLARLRDAYVNAMLRLASSAAVVGYGASTGPYCTAAADPFNRPRPLTRDYDEKALVEIYRSILARGGEAGPVPVLAAARLPAAV

SEQ ID NO: 697 - DNA, 900 bp, Sorghum bicolor; identical to SEQ ID NO: 675

SEQ ID NO: 698 - protein, 300 aa, Sorghum bicolor
MNSLAFPGCPSPLTPASTAPGLHPIPSPRIKIRFQRLEDAAHHHLRARSSASSRTRTVAMASGLPVSSKEVLPSPLTSASEPPPLFDGTTKLYVAYYCPFAQRAWIARNYKGLQDKIKIVAIDLADRPAWYKEKVYPENKVPSLEHNNQVKGESLDLVKYIDSNFEGPSLLPEDPAKKQFAEELLAYTDAFNKALYSSLLSKEDVSEETVAALDKIEDALGKFNDGPFFLGQFSLVDIAYVPFIERFQIFYSNIKNYDITKGRPNLQKFIEEVNKIDAYTQTKLDPDFLLEQTKKRLGIA

SEQ ID NO: 699 - DNA, 690 bp, Sorghum bicolor
atgagccacccggagaacggaggagccagcaacgggcacgccgccgaggagcatcaggacgtgatgatggaggtggagccgaagcagcgccgggcgccgcggctcaacgagcggatcctctcgtcgctgtcgcggaggtccgtcgccgcgcacccctggcacgacctcgagatcggtcctgaagctccggccgtcttcaacgtcgtcgtggagatcaccaaggggagcaaggtgaagtacgagctggacaagaagacggggctcatcaaggtggaccgcgtcctctactcctccgtcgtctaccctcacaactacggcttcatcccccggacgctctgcgaggacaacgaccccatggacgtcctcgtcctcatgcaggaaccagtccttcccggcgccttcctccgcgccagggccatcggcctcatgcctatgatagatcagggggagaaggacgacaagatcatcgccgtctgcgccgacgatcccgagtaccgccactacaacgacatcagcgagctctctccgcaccgcctccaggagatccgccgcttcttcgaagactacaagaagaacgagaacaaggaggtggccgtcaacgacttcctgcccgccgcagctgcccgtgaagccatccagtactccatggacctgtacggtcagtacattatgcagaccctgcggcggtag

SEQ ID NO: 700 - protein, 229 aa, Sorghum bicolor
MSHPENGGASNGHAAEEHQDVMMEVEPKQRRAPRLNERILSSLSRRSVAAHPWHDLEIGPEAPAVFNVVVEITKGSKVKYELDKKTGLIKVDRVLYSSVVYPHNYGFIPRTLCEDNDPMDVLVLMQEPVLPGAFLRARAIGLMPMIDQGEKDDKIIAVCADDPEYRHYNDISELSPHRLQEIRRFFEDYKKNENKEVAVNDFLPAAAAREAIQYSMDLYGQYIMQTLRR

SEQ ID NO: 701 - DNA, 606 bp, Sorghum bicolor
atggagcccaaatccaccacccctcccccgcctccggtcatgggcgcgcccgtcgcgtaccctccgccccccggcgccgcgtaccccgccgggccgtacgcgcacgcgccggcagccgcgctgtaccctcctcccccgccgccgccggctcccccaacctcgcagcagggcgccgcggcggcgcagcagctgcagctcttctgggcggagcagtaccgcgagatcgaggccaccaccgacttcaagaaccacaacctgccgctggcccgcatcaagaagatcatgaaggccgacgaggacgtgcgcatgatcgccgccgaggcgcccgtcgtcttcgcccgcgcctgcgagatgttcatcctcgagctcacccaccgcggctgggcgcacgccgaggagaacaagcgccgcaccctgcagaagtccgacatcgccgccgccgtcgcgcgcaccgaggtcttcgacttcctcgtcgacatcgtgccgcgggacgaggccaaggaagccgactccgccgccgccatgggaccagccgggatcccgcaccccgccgccggcctgcccgccaccgaccccatgggctactactacgtccagccgcagtaa

SEQ ID NO: 702 - protein, 201 aa, Sorghum bicolor
MEPKSTTPPPPPVMGAPVAYPPPPGAAYPAGPYAHAPAAALYPPPPPPPAPPTSQQGAAAAQQLQLFWAEQYREIEATTDFKNHNLPLARIKKIMKADEDVRMIAAEAPVVFARACEMFILELTHRGWAHAEENKRRTLQKSDIAAAVARTEVFDFLVDIVPRDEAKEADSAAAMGPAGIPHPAAGLPATDPMGYYYVQPQ

SEQ ID NO: 703 - DNA, 807 bp, Sorghum bicolor
atgccccggctcctcgtcgtcctcctcctcctcgccctctcgctcgtcgcgtgcgtgagcgccgtgcccgctgtcatccgcatggtcccggccgaccccaccgcggcctcctctggcgcggtagacgacgcggacgcgctcttctgcgacagctggaggctgtctgtggagacggccaacgcggggccctggctcgccgtgcccgcgcgctgcggggatttcgtgcgggactacatggaggggcctcgctacgcctctgactccgccatcgccgccgccgacgccctagccttcgcctctgatgccctggccgccgccgccgagtggggcggctcggcgagcgcgaggccggcgtgggtgttcgacgtcgacgagacgctgctctccaacgcgccctactacgcggtcaacggatggggattacaggaattcaatgagacctcatttgatgaatgggtagatgctgcaaaggcaccagcattaccatcaagcttgaatttgtacaatcaacttcagggacttggtttccatgttatccttttgactggccggagtgaattccaacgtaatgccacagagtcgaatcttttgttttctggctacaactcatgggaaaaactcatattgaggcaatcttctgatattggcaagactgctgtacagtacaagtcagagagaagagcagcaatggaagcagaaggtttcaagatacttgggaactcaggggatcagtggagtgatttgataggatcaccaatggcaacgagatccttcaagctaccaaacccaatgtacttcatcagctga

SEQ ID NO: 704 - protein, 268 aa, Sorghum bicolor
MPRLLVVLLLLALSLVACVSAVPAVIRMVPADPTAASSGAVDDADALFCDSWRLSVETANAGPWLAVPARCGDFVRDYMEGPRYASDSAIAAADALAFASDALAAAAEWGGSASARPAWVFDVDETLLSNAPYYAVNGWGLQEFNETSFDEWVDAAKAPALPSSLNLYNQLQGLGFHVILLTGRSEFQRNATESNLLFSGYNSWEKLILRQSSDIGKTAVQYKSERRAAMEAEGFKILGNSGDQWSDLIGSPMATRSFKLPNPMYFIS

SEQ ID NO: 705 - DNA, 552 bp, Sorghum bicolor
atcggcctctccgagtccgagcggacgcgagccgcccacccacgcgagacgcgacctcagggtgcctctctctctgcctactgctcccgctgtacctttccttccccatggccaccgcctgccgcctcgccgcgccgctcggcctcgccccgttgccccgcggccgcgcctctgccggcgtcgtggccgtcgcccagtgcggtggctccaagatcccgagaggcgttgctgtcagggcgacgtccggcggcgagggcgccacggaggacgtgccggagatcgtcaaggctgcgcaggacgcagtgggacaaagttgaggacaagtacgccgtggccaccatcggcgtcgccgccatcgtcgcgctctggacggtagtaggtgccatcaaggccattgacaagattcctcttctgcctggtgtttttgagatagttggcatcggctatacagggtggttcacataccgtaacctcgtcttccagccagacagggaagctctgatcggcaaaatcaagagcacttacaaagaaatcactgggagcagcagctga

SEQ ID NO: 706 - protein, 183 aa, Sorghum bicolor
IGLSESERTRAAHPRETRPQGASLSAYCSRCTFPSPWPPPAASPRRSASPRCPAAAPLPASWPSPSAVAPRSREALLSGRRPAARAPRRTCRRSSRLRRTQWDKVEDKYAVATIGVAAIVALWTVVGAIKAIDKIPLLPGVFEIVGIGYTGWFTYRNLVFQPDREALIGKIKSTYKEITGSSS

SEQ ID NO: 707 - DNA, 360 bp, Sorghum bicolor
atggctcggcttgctgtggcgatcgccgtggtggcggcggcggcggtggtggtgctggcggcgacgacctcggaggcggccatctcctgcgggcaggtgagctcggccatcgcgccctgcctgtcctacgcccggggccagggctccgcaccctcagcaggctgctgcagcggcgtcaggagcctcaactccgccgcccgcaccaccgccgacaggcgcgccgcctgcaactgcctcaagaacgccgcccgtggcatcagcggcctcaacgccggcaacgccgccagcatcccctccaagtgcggcgtcagcgtcccctacaccatcagcacctccaccgactgctccagggtgaactaa

SEQ ID NO: 708 - protein, 119 aa, Sorghum bicolor
MARLAVAIAVVAAAAVVVLAATTSEAAISCGQVSSAIAPCLSYARGQGSAPSAGCCSGVRSLNSAARTTADRRAACNCLKNAARGISGLNAGNAASIPSKCGVSVPYTISTSTDCSRVN

SEQ ID NO: 709 - DNA, 378 bp, Sorghum bicolor
atgggcaactgcgtccagagcagcggcggtggcgttagcagctgcgccgtcgccgtagaagcagggcggcagcagcagcagctgctgctgcagcggaggaaaagcgctgccggtgatgaggaggaggaggtaataattgatcaaggggcggcggcgccgtcgtcggtcatgaaggtgaagatggtgctgacaaagggcgagctggggtggctggtggcgcagctcaaggccggcgaccgccgcctcgaggacgtgctccaggagatggcgcgcaagcgtgatggccgccgcagcgccgaagccgacgggtggcggcccagccttgagagcatcgtcgagtgcccagccgagacggcggccgccacctccgatgattag

SEQ ID NO: 710 - protein, 125 aa, Sorghum bicolor
MGNCVQSSGGGVSSCAVAVEAGRQQQQLLLQRRKSAAGDEEEEVIIDQGAAAPSSVMKVKMVLTKGELGWLVAQLKAGDRRLEDVLQEMARKRDGRRSAEADGWRPSLESIVECPAETAAATSDD

SEQ ID NO: 711 - DNA, 1008 bp, Sorghum bicolor
atgtgcggaggcgccatcctcgcggaactgatcccgccgacgcggcgcgtggcgccgaagccggtgaccgagggccacctctggccggcgagctccaagaaagccggcagcggcagcaacaagaggcaccaccacgaatacgccgacgacgacgattttgaggccgccttcgaggagttcgacgacgactttgacgtgcacgaagacgacgaggaccaccctgaccacttcgtgttctcgtccaaatccgctttctccccagcgcacgacggcaggcgcgatgcgcgagccgcggcgagccagaggacgaagcgcggccgccgccacttccacggcatccggcagcgtccctggggcaagtgggcggcggagatccgcgacccgcacaagggcacccgcgtctggctcggcaccttcaacaccgccgaggacgccgcccgggcctacgacgtcgaggcgcgccgcctccgcggcagcaaggccaaggtcaacttccccgcagccagcgcgcgcccacgcgcacgccgcggcaagggcaacccaagaaccgcgccgaaacctgcagcacaggcacagcccgctctgctccttcgaggggagaagggtctggaaggagttgccgtgaagcctgaaactactatggacatgttcgacgtgggcagcttcttcgacatgaccttccccaccttcccagccgcgccggcggcggccatggagagctccttcgctggcagcagcgccacgtcggagacccggagccccgggaagaagctgagatacgacgacggcgactcgtccgaggggagcggctgtggctccgcgctggagctcgctgacgagctggcgttcgatccgtttatgctactgcagatgccctactctggcgggtacgattccctggacggccttttcgccgcagaggccgtgcagcaggacgtgaacaacgacatgaacggcgtcagcctgtggagcttcgacgagttccccgtcgacggctatgttttctga

SEQ ID NO: 712 - protein, 335 aa, Sorghum bicolor
MCGGAILAELIPPTRRVAPKPVTEGHLWPASSKKAGSGSNKRHHHEYADDDDFEAAFEEFDDDFDVHEDDEDHPDHFVFSSKSAFSPAHDGRRDARAAASQRTKRGRRHFHGIRQRPWGKWAAEIRDPHKGTRVWLGTFNTAEDAARAYDVEARRLRGSKAKVNFPAASARPRARRGKGNPRTAPKPAAQAQPALLLRGEKGLEGVAVKPETTMDMFDVGSFFDMTFPTFPAAPAAAMESSFAGSSATSETRSPGKKLRYDDGDSSEGSGCGSALELADELAFDPFMLLQMPYSGGYDSLDGLFAAEAVQQDVNNDMNGVSLWSFDEFPVDGYVF

SEQ ID NO: 713 - DNA, 417 bp, Sorghum bicolor
atggatacgaagaagaagtcggcccccgccgccgccggagccgcggcgccgccgccggctagcgggtacttcagcaccgtcttctccgcgtcgcctgcggggagcgcaaatgacgcaaagcagtcggacttgtacacgatgctgaacaagcagagctccagaggacagaatggcagtagcattacagatggcaaatcccatggccgccctacttacaaggatggaaaacagtcttatccaaatgagtcatcagaatccccttactttggctcatccgtgcattacggtggtcgggagttctacagcagcactttacagaagcaaccagccaacgagccacatacaaactacaaggaggacaacccggatggctctgctactagaggtgattggtggcaaggttcgctgtattactga

SEQ ID NO: 714 - protein, 138 aa, Sorghum bicolor
MDTKKKSAPAAAGAAAPPPASGYFSTVFSASPAGSANDAKQSDLYTMLNKQSSRGQNGSSITDGKSHGRPTYKDGKQSYPNESSESPYFGSSVHYGGREFYSSTLQKQPANEPHTNYKEDNPDGSATRGDWWQGSLYY

SEQ ID NO: 715 - DNA, 183 bp, Sorghum bicolor
atggatgagccttcacagagcgaggacaggaagctgtcggccatggagcatgtcaagaagcgccatgaggagaagggcttcctctatgcctgcgccttcatgttttgctgctgcttctgctgctacgaggcctgcgagcactgcctggagtgcttctgctgctgcggcaagaaggacgagtaa

SEQ ID NO: 716 - protein, 60 aa, Sorghum bicolor
MDEPSQSEDRKLSAMEHVKKRHEEKGFLYACAFMFCCCFCCYEACEHCLECFCCCGKKDE

SEQ ID NO: 717 - DNA, 1317 bp, Sorghum bicolor
atgggcgaggtacacgaagctgacaagaatattgagatctggagggtcaagaagttaatcaaggcgcttgatgctgcaaggggcaatggcactagcatgatttctctcatcatgccacctcgtgatcagatttcacgcgtcactaagatgctgggtgatgagtatggaactgcctcaaacatcaagagcagagtcaacagacagtctgtgttggctgccataacctcggctcaacagaggttgaagctttacagtcgagttccccccaatggcttggtgctctatactggtaccattgtcaccgatgatggcaaagagaagaaggttacctttgactttgagccatttagacccattaatgcttccctgtatctctgtgacaacaagtttcacactgaggcactgaatgagcttctggcatctgatgacaaatttggtttcataatcatggatggcaatggaacactgtatggcacgctgagcggaaacagcagggaggttctgtacaagttcagtgttgatctcccaaagaagcatgggcgaggagggcaatctgcagtccgctttgcccgcttgcgcatggagaggcgacacaattacctgcgcaaggttgctgagcttgcgacacaatacttcatcaatcctgccaccaaccagccaaacatcgttgggcttattcttgccggttctgctgacttcaagaatgaacttggtaaatctgagatgtttgatccgcgtcttcaggccaaagtagtcaagatgattgacgtgtcttatggtggggacagcggcttcaaccaagccatcgagatgtccgctgaggttctttctgatgttaagtttgtccaagaaaagaagcttatcgggaagtactttgaggagataagccaagacacagggaagtatgtccttggcgtcgaggacaccatgacagccctggaaatgggcgctgtagaaatcctgattgtgtgggaaaaccttgatgtcaggcgttatgagctcaagaacagtgtcacaggagaaacagttgtgaagtacctgaaccccactcaggaggctgatcagagcaactttactgacgcggcgacatccggagatctggaggtcattgacaacacacagctgctggagtggtttgctgagaactaccaccagtttggctgctcgcttgagtttgtcaccaacaagtcccaggaaggttctcagttctgccggggatttggcgggatcggtgggatcctccgctacccagccgatgtcagtgcctaccaggatggtgacttgtctgatggggagtatgatgaagacttcgaatag

SEQ ID NO: 718 - protein, 438 aa, Sorghum bicolor
MGEVHEADKNIEIWRVKKLIKALDAARGNGTSMISLIMPPRDQISRVTKMLGDEYGTASNIKSRVNRQSVLAAITSAQQRLKLYSRVPPNGLVLYTGTIVTDDGKEKKVTFDFEPFRPINASLYLCDNKFHTEALNELLASDDKFGFIIMDGNGTLYGTLSGNSREVLYKFSVDLPKKHGRGGQSAVRFARLRMERRHNYLRKVAELATQYFINPATNQPNIVGLILAGSADFKNELGKSEMFDPRLQAKVVKMIDVSYGGDSGFNQAIEMSAEVLSDVKFVQEKKLIGKYFEEISQDTGKYVLGVEDTMTALEMGAVEILIVWENLDVRRYELKNSVTGETVVKYLNPTQEADQSNFTDAATSGDLEVIDNTQLLEWFAENYHQFGCSLEFVTNKSQEGSQFCRGFGGIGGILRYPADVSAYQDGDLSDGEYDEDFE

SEQ ID NO: 719 - DNA, 1470 bp, Sorghum bicolor
atggccgccgcgagggaggaggatgaggccacgcaggcgcggccgctgctgctgccgcggcggccggcgcaggaggaccagaagtggtggaggcggtgggcgcgcgaggccgggtgggtcgggtacctggccctgcccatggtggtggtgaacctgtcgcagtacgccgttcaggtctcctccaacatgatggtggggcacctccccggcgtgctcccgctctcctccgccgccatcgccacctccctcgccaacgtctccgggttcagccttctaatcggattagcaagcgcactggagacgctatgtggccaggcgtacggtgcaaaacagtaccataaactaggcctagacacttacagagcgatcgtcaccctcctggtggtctgcatccctctctcgcttctctgggtgttcatggacaagatcctggtcctcatagggcaagaccctctcatctcgcaaggcgccgggaggtacatgatctggatgatcccggggctctttgccaacgcggtgatccagccgctcaccaagttcctgcagacgcagagcctgatctacccgctgctgctgtcgtccgtggcgacggcggcgatccacatcccgctctgctacgtgatggtgttcaagactggccttgggtacacaggcgctgccctgacgataagcatatcgtactggctgaatgtggccatgcttgttgggtacatcgtgttctccagctcttgcaaggagacacgcgcacgcccgacgatcgaggtcttcaggggagtagatgcattcctgcgcctagccctgccttctgcactcatgatgtgtttcgaatggtggtcatttgagctccttactctcatgtcagggcttctgcccaacccagagctgcagacctcagtgctttcgatctgtctcacaagtgtaacattactcttcactataccttttgggctcggagctgctggaagcacacgagtggcaaatgaactgggcgctgggaaccctgacggagctcgatccgcggtccgcgtggtgctgtccatggcggggatcgacgcggttatcgtgagcggaactctcctagctgcacggcgcctcgtgggcttggcgtacagcagcgaggaggaggtcatatcttcggtcgccgccatggttcctctggtctgcatcactgtcataactgactgtctacaaggagttctctcaggcgtcgcccgcggttgcgggtggcagcacctgggcgcgtatgtgaaccttggctcgttctacctgctggggatcccgatggcgatcctcctcggctttgtgctgcacatggggtcgagggggctctggatgggcatcgtctgcggctccctgtcgcagaccacgctcatgtccgccatcacattcttcaccgactggcccaagatggctgagaaggccagggagagggtgttcagcgacaaggcacatgagtctgccgggccatga

SEQ ID NO: 720 - protein, 489 aa, Sorghum bicolor
MAAAREEDEATQARPLLLPRRPAQEDQKWWRRWAREAGWVGYLALPMVVVNLSQYAVQVSSNMMVGHLPGVLPLSSAAIATSLANVSGFSLLIGLASALETLCGQAYGAKQYHKLGLDTYRAIVTLLVVCIPLSLLWVFMDKILVLIGQDPLISQGAGRYMIWMIPGLFANAVIQPLTKFLQTQSLIYPLLLSSVATAAIHIPLCYVMVFKTGLGYTGAALTISISYWLNVAMLVGYIVFSSSCKETRARPTIEVFRGVDAFLRLALPSALMMCFEWWSFELLTLMSGLLPNPELQTSVLSICLTSVTLLFTIPFGLGAAGSTRVANELGAGNPDGARSAVRVVLSMAGIDAVIVSGTLLAARRLVGLAYSSEEEVISSVAAMVPLVCITVITDCLQGVLSGVARGCGWQHLGAYVNLGSFYLLGIPMAILLGFVLHMGSRGLWMGIVCGSLSQTTLMSAITFFTDWPKMAEKARERVFSDKAHESAGP

SEQ ID NO: 721 - DNA, 1158 bp, Sorghum bicolor
atggcccttcaggcggcgctcctcccttccactctctccgtccccaagaagggcagcctcgccgccgcggtgaaggacacggcattcctcagcgtcccccagaagaagctgcaggcggcgtcgctgtcggtgaggacgcaggtggcgacggcgcctgtggccacgccggggtcgagcacggcgaccaaggacgggaagaagacggtgcggcagggcgtggtggtgatcacgggcgcgtcgtcgggtctgggccttgcggcggccaaggcgctggcggagaccggcaagtggcacgtggtgatggcctgccgcgacttcctcaagacggcgaaggcggccaagggcgccggcatggcggacggcagctacaccatcatgcacctggacctggcctccctcgacagcgtgcggcagttcgtcgacaacttccgccgtgccgggatgccgctcgactcgctcgtctgcaacgccgccatctaccggcccacggcgcggacgccgacgttcacggcggacgggtacgagatgagcgtcggcgtcaaccacctgggccacttcctcctggcgcgcctgctcctcgacgacctgcagaggtccgactacccgtcccgccgcctcatcatcctcggttccatcaccggcaacaccaacacgctggccgggaacatcccgcccaaggccgggctgggcgacctccgcggcctcgcgggcgggctgcgcggccagaacggttccgccatgatcgacggctccgagagcttcgacggcgccaaggcgtacaaggacagcaagatctgcaacatgctcacgatgcaggagctgcaccggcggtaccacgaggacacgggcatcacgttcgcgtcgctctacccgggctgcatcgccaccacggggctgttccgcgagcacatcccgctcttccggctgctcttcccgccgttccagaagttcatcaccaaggggttcgtgtcggaggcggagtccggcaagaggctggcgcaggtcgtcagcgaccccagcctcaccaagtcgggggtgtactggagctggaacaaggactcggcgtcgttcgagaaccagctgtcgcaggaggccagcgacccggagaaggccaggaagctctgggagatcagcgagaagctcgtcgggcttgcctga

SEQ ID NO: 722 - protein, 385 aa, Sorghum bicolor
MALQAALLPSTLSVPKKGSLAAAVKDTAFLSVPQKKLQAASLSVRTQVATAPVATPGSSTATKDGKKTVRQGVVVITGASSGLGLAAAKALAETGKWHVVMACRDFLKTAKAAKGAGMADGSYTIMHLDLASLDSVRQFVDNFRRAGMPLDSLVCNAAIYRPTARTPTFTADGYEMSVGVNHLGHFLLARLLLDDLQRSDYPSRRLIILGSITGNTNTLAGNIPPKAGLGDLRGLAGGLRGQNGSAMIDGSESFDGAKAYKDSKICNMLTMQELHRRYHEDTGITFASLYPGCIATTGLFREHIPLFRLLFPPFQKFITKGFVSEAESGKRLAQVVSDPSLTKSGVYWSWNKDSASFENQLSQEASDPEKARKLWEISEKLVGLA

SEQ ID NO: 723 - DNA, 255 bp, Sorghum bicolor
atggggttccacctgcttgcgttcgtggcggcgagggggctcatgcaggtgttcaacctctcggcgccgctcaacctgcggctgccgctcgcgcgccaccttcccgaggccttcgccgtcctgtgcgtcgtgctcgcctcgcacgccgcgtgggtcaacgacgccctggcgcgcggcgccgcctggagccacagcgggagccggggcggcgtcgacgagtacgtccgctacgccatgctcagcatctccgactga

SEQ ID NO: 724 - protein, 84 aa, Sorghum bicolor
MGFHLLAFVAARGLMQVFNLSAPLNLRLPLARHLPEAFAVLCVVLASHAAWVNDALARGAAWSHSGSRGGVDEYVRYAMLSISD

SEQ ID NO: 725 - DNA, 1950 bp, Sorghum bicolor
atgccgacgccgaagatgctcaggcctcttcccctcttcgtcgtcgtcttcttgctggtccggtcgccggcggcggcggacggcggcgggaacgcgacgacggaatcgtgcccgctcgacctgagctacgtgcggacgttcccatgggaccctacgtcttgcgcgggggccgcgcccaacgtgaccgcctgctgccagacgctgctctccctgttcggcatcggcctcgccgagcgcctccgcgccacgggcaacttccgcctcccgtccgcggcggcctccacggcctgcgtcgagagcttcacggacaccgtctccgccgcgtcggcgggcctctcgggttcctccctggtgccggaatgcttcccggacccgagccagttcgccatcaccccgtcctactgcgccggcgtctccaccgcgacggagttcgcggccgccgtcgggaacgactccgtccaggccctcaactcctcctgcggccccgacctcgcctcgccggcgacctgcgcgctctgctacagcgccggcgtcgccgccaccgcgcatctcaccaccgccgcggccaacgacagcaagtcggaatcctgcttctacctctccgtcctctacgccgccggcatctccaactccgccggccccacctacccacccaccgccgcctgcgctcttggacttggcctcttgtcccctccccccacgtcctccaagtccagcaacgtggccgtctacgccaccaccatcccaatcgcattcgtgctcctcgcgtcgctcttcggcttctttctttggaggaggaagcgaacgcgtgccaatagcaagaagaagaaccacaagatctgcgaggaggggtccggggagcggcggtcgcacctgcggcccaacacagggtcgattctcttcgacattgtcgagctcgccaaggccacgggtggcttctccgagcgcaatctcgtcggtcgcggcgggttcggggccgtgtaccgcggcgtgctcgcggacgggtccgtggtcgccgtcaagaagatgctggacccggacatggagggcggggacgaggagttcaccaatgaggtggagatcatcagccatctcaggcatcggaatctggtgccgctccgcggctgctgcatcgccgacgaagacgtcgaggaagggaagcagagattcctcgtctacgacttcatgcccaacggcgcgctcgaggacttcatcttccatgacagggaaagggaggcggcggctacgaagcggcccccgttgacttgggcccagcggcggagcatcatcatggacgtcgcgaggggtctcgagtacctgcattacggcgtcaagccggcgatttaccacagggacatcaaggcgaccaacatcctgctggacggcgagatgcgcgcgcgcgtggcggacttcggcctcgcccggcggagccgcgaggggcagtcgcacctcacgacgcgcgtcgccgggacgcacggctacctggcgccggagtacgcgctgtacgggcagctgacggagaagagcgacgtctacagcttcggcgtgctgctgctcgagatcatgagcgggcggcgcgtgctggacatgtcggcgccagcggggcccgtgttgatcaccgactgggcgtggacgctcgtcaaggccgggcacgcgagggcggtgctcgacgaggcgctgtccaccgccgagagcccgcggagcggggtcatggaaaggttcgtgctggttggaatcctgtgcgcgcacgtgatggtggcgctccggccgaccatcggcgacgcagtgaggatgctggagggagacatggacgtgccagagctgcccgaccggccgctgccgtatgggcacagcgccatgttcagcgaagctgggagtaccttcagcatctcaccggccttcagtggtccgttgaccccgttcatcgacaatggggacatgctgaggtga

SEQ ID NO: 726 - protein, 649 aa, Sorghum bicolor
MPTPKMLRPLPLFVVVFLLVRSPAAADGGGNATTESCPLDLSYVRTFPWDPTSCAGAAPNVTACCQTLLSLFGIGLAERLRATGNFRLPSAAASTACVESFTDTVSAASAGLSGSSLVPECFPDPSQFAITPSYCAGVSTATEFAAAVGNDSVQALNSSCGPDLASPATCALCYSAGVAATAHLTTAAANDSKSESCFYLSVLYAAGISNSAGPTYPPTAACALGLGLLSPPPTSSKSSNVAVYATTIPIAFVLLASLFGFFLWRRKRTRANSKKKNHKICEEGSGERRSHLRPNTGSILFDIVELAKATGGFSERNLVGRGGFGAVYRGVLADGSVVAVKKMLDPDMEGGDEEFTNEVEIISHLRHRNLVPLRGCCIADEDVEEGKQRFLVYDFMPNGALEDFIFHDREREAAATKRPPLTWAQRRSIIMDVARGLEYLHYGVKPAIYHRDIKATNILLDGEMRARVADFGLARRSREGQSHLTTRVAGTHGYLAPEYALYGQLTEKSDVYSFGVLLLEIMSGRRVLDMSAPAGPVLITDWAWTLVKAGHARAVLDEALSTAESPRSGVMERFVLVGILCAHVMVALRPTIGDAVRMLEGDMDVPELPDRPLPYGHSAMFSEAGSTFSISPAFSGPLTPFIDNGDMLR

SEQ ID NO: 727 - DNA, 2439 bp, Sorghum bicolor
atggctcagatcctgctccacggcacgctccacgccaccatcttcgaggccgagtcgctctccaacccgcaccgcgccagcggcggtgcccccaagttcatccgcaagcttgtggaagggatcgaggataccgtgggtgtcggcaagggcagcaccaagatatatgctaccattgatttggagaaggcccgcgtcgggcgtacacgtatgatctccaacgagcccatcaatcctcgttggtacgagtccttccacatctactgcgcgcacatggccgccgacgtcatcttcaccgtcaagatcgacaaccccattggggcgtctctcatcgggagggcctacttgcctgtcacggacctcctggacggagaggagatcgacaagtggcttgaaatctgtgatgagaaccgcgagcctattggagacagcaagatccatgtgaagcttcagtactttgatgttttcaaggaccgcaattgggcgaggggtgttcggagcaccaagtaccctggtgttccttacaccttcttctcgcagaggcagggctgcaaggttactctgtaccaggacgctcatgtccccgacaatttcgttcctaagatcccgcttgctgatggcaagaactatgagccacacaggtgctgggaggatatctttgatgccataagcaaggcccagcatttgatttacatcactggctggtccgtgtacaccgagatcaccttggttagggacaccaacagaccgaaacctggtggtgacgttactcttggggagttgctcaagaggaaggccagtgaaggtgtccgggtcaatatgctagtgtgggatgataggacttcagttggtttgcttaagaaggatggcttgatggctacccatgatgaggagactgcaaattacttccatgacacagaagtcaactgtgttctgtgccctcgcaaccctgatgattctggcagctttgttcaggatctgcagatatcaactatgttcacacaccatcagaagatagtagtagttgaccatgagctgccaaacgagggctcccagcaaagaaggatagtcagcttcattggtggcattgacctttgtgatggaaggtatgatactcagtaccactccttgtttaggacacttgacagtgtccatcatgatgacttccaccagccaaactttgagggtggatcaatcaagaaaggtggtccaagagagccatggcatgatatccattcacggctggaagggcctattgcttgggatgttctttacaactttgagcagagatggaggaagcagggtggcaaggacctccttgtacgtctcagggatctttctgacatcattattcccccttctcctgtgatgttcccggaggacagagaaacatggaatgttcagctcttcagatccattgatggtggtgctgcttttgggttccctgagactcctgaggaagctgcaagagctggccttgtgagtggaaaggatcaaatcatcgatcggagtatccaggatgcatacataaatgccatccgaagggcgaagaacttcatctacattgagaatcagtacttccttggaagttcatatggctggaaggccgaaggcatcaagccggaagaaattggtgctcttcacttgattccgaaggagctctcattgaagattgtcagcaagattgaagctggggaacggtttactgtttatgttgtggtgccaatgtggcctgagggtgttccagaaagtgcttctgttcaggcaatccttgactggcaaaggagaacaatggatatgatgtacactgacatcacacaagctctccaagccaagggaattgaagcaaatcccaaggaatatctcactttcttctgcttaggtaaccgcgaggtgaagcaggagggagaatatgaacctgaggaacacccagaacctgacactgattacatccgggctcaagaggctaggaggtttatgatctatgttcataccaaaatgatgatagtggacgatgagtacatcatcattgggtctgccaacatcaaccagaggtccatggacggtgccagggactctgaaatcgccatgggcgcataccagccgtaccacctggcgaccaggcagcctgcccgtggccagatccacggcttccggatgtctctgtggtacgagcacctgggaatgctggatgatgtcttccagcgccctgagagtgtggagtgtgtgcagaaggtgaacaggatcgccgagaagtattgggatctatactcgagcgacgacctggagcaggatctcccaggccacctcctcatgtacccaatcggtgtcactgccgacggcaccgttactgagcttccggggatggagaacttccctgacacccgtgcccgtgtcctcggcaacaagtcggattaccttccacccatcctcaccacatag

SEQ ID NO: 728 - protein, 812 aa, Sorghum bicolor
MAQILLHGTLHATIFEAESLSNPHRASGGAPKFIRKLVEGIEDTVGVGKGSTKIYATIDLEKARVGRTRMISNEPINPRWYESFHIYCAHMAADVIFTVKIDNPIGASLIGRAYLPVTDLLDGEEIDKWLEICDENREPIGDSKIHVKLQYFDVFKDRNWARGVRSTKYPGVPYTFFSQRQGCKVTLYQDAHVPDNFVPKIPLADGKNYEPHRCWEDIFDAISKAQHLIYITGWSVYTEITLVRDTNRPKPGGDVTLGELLKRKASEGVRVNMLVWDDRTSVGLLKKDGLMATHDEETANYFHDTEVNCVLCPRNPDDSGSFVQDLQISTMFTHHQKIVVVDHELPNEGSQQRRIVSFIGGIDLCDGRYDTQYHSLFRTLDSVHHDDFHQPNFEGGSIKKGGPREPWHDIHSRLEGPIAWDVLYNFEQRWRKQGGKDLLVRLRDLSDIIIPPSPVMFPEDRETWNVQLFRSIDGGAAFGFPETPEEAARAGLVSGKDQIIDRSIQDAYINAIRRAKNFIYIENQYFLGSSYGWKAEGIKPEEIGALHLIPKELSLKIVSKIEAGERFTVYVVVPMWPEGVPESASVQAILDWQRRTMDMMYTDITQALQAKGIEANPKEYLTFFCLGNREVKQEGEYEPEEHPEPDTDYIRAQEARRFMIYVHTKMMIVDDEYIIIGSANINQRSMDGARDSEIAMGAYQPYHLATRQPARGQIHGFRMSLWYEHLGMLDDVFQRPESVECVQKVNRIAEKYWDLYSSDDLEQDLPGHLLMYPIGVTADGTVTELPGMENFPDTRARVLGNKSDYLPPILTT

SEQ ID NO: 729 - DNA, 732 bp, Sorghum bicolor
atggacggcgcagatcccccgattccctcccctccgtctccctccttttttaaccaccccacacggctccagactccagagcctgagctgagccactcgccccccttgccactccggattcccccctccgctcccaaagaagacggcgagaccaaaccgccgccgccgtcgctaccctaccaccgggagatccgtccgtccgaggtgaccatgtctacgcggaagcgtcccaggaacaacaacggctccacctccacgccggcgtcgtccgcggggcggagcggcggcggcggctcgacgacgtcgtcgtcctcgtcctcgtccgcgatgcgtcggacgacgagcctgtcggacctcgcgccacctccggagattccaggtaggccccagacgcgggcggcgaggggagatgcggtggtggcgggggcgggcaccgtgtgggtgggtgccgagatgatgaggaggcactcgggggacttcctcccagccatggagacggcagccttcctcaaggcctgcggcctctgcaagcgccgcctcggccctggccgtgacaccttcatctacatgggtgaggtggccttctgcagtcaggagtgtaggcagcagcagatgaacctggacgagctcatggagaagaagtgctccactccggctggcggcagcggcggcggtggcggcggtggcagctcagatcagtccggcaaaagcagcaccgttgcggccgcctag

SEQ ID NO: 730 - protein, 243 aa, Sorghum bicolor
MDGADPPIPSPPSPSFFNHPTRLQTPEPELSHSPPLPLRIPPSAPKEDGETKPPPPSLPYHREIRPSEVTMSTRKRPRNNNGSTSTPASSAGRSGGGGSTTSSSSSSSAMRRTTSLSDLAPPPEIPGRPQTRAARGDAVVAGAGTVWVGAEMMRRHSGDFLPAMETAAFLKACGLCKRRLGPGRDTFIYMGEVAFCSQECRQQQMNLDELMEKKCSTPAGGSGGGGGGGSSDQSGKSSTVAAA

SEQ ID NO: 731 - DNA, 1464 bp, Sorghum bicolor
atgaagacccggagctcagcgagaggggagccgaggcggctcgggaatgcggctctcctggcgctcatgctctgctccgtcgtcgcgctctccctcatccgggggaggttcgccccaattggagacgccatcaaatccgaggacgacgctgctgcagcggcggtggcggtcagcaaggcggctgctgtcaacgttgacaccggcgacggcgccgacgaggccgccgctgaagctgctgctgaggagaaagacaaggaggaggtccagccgaagccagccgccgacggttcccgcggcggcgcagccaagccggtgtgctacgagacgagccgccgctccgacacctgcgaggcggctggcgacgtgcgcgtgttggggagctcccagacggtgtacgtcgactcgctggaccgggagtggaagaccaagccgtactgccggaagcacgacaacttcgcgctcgcccacgtcaaggagtggtccctcaagccgctcccctccggcgctgcgccgcagtgcacggtgaacagctcggccaccgcgttcgtgctctccacgggcggcttcacgggcaacccgttccacgactacacggacgtgctgatcccggccttcatcacggcgcacccgctccgcggcgaggtccagttcctggtcagcagctacaagtcgtggtggatgaaccgctacatccagatcttccagcagatgagccggcacgaggtggtggacatcgacgccgacgacgaggtccgctgctaccggaacgtggtggtggggccgacgttccaccgtgagctcggcgtggacgcgtccaagtccccgtcgccggggtactccacggccgacttccgcaagatgctgcgcgacgcgttcgggctggagcgcgccacggccacgcccagcggcgaccggtgggacatccggcgccggccgcggctgctcatcatctcgcgccgcccgtcccgcgggcgcgccttcatgaacgagcgcgccatggcggacatggcggcgagcctcgggttcgacgtgcggatcggggagcccgacagcagcaccgacacgtccaagttcgcgcggctggtgaactcgtgcgacgtgatggtgggcgtccacggcgccgggctcaccaacatggtgttcctgccggccggcgccgtggtggtgcaggtggtgccgtacgggcggctggagtggctggcccggaacacgttcgcggagccgtcggcggggatggaggtccactacctggagtacgtggtgcagctggacgagacgacgctgagcgagcagtacccgagcgatcacccggtgctgagggaccccatggccatccacaagcaggggtggaacgcgctcaagaccacgtacctggacaagcagaacgtgcgcccgcacctgggccgcctcaagaacaccttcctacaggcgctcaagatgctgccgcacggccgggacgattga

SEQ ID NO: 732 - protein, 491 aa, Sorghum bicolor
MKTRSSARGEPRRLGNAALLALMLCSVVALSLIRGRFAPIVTTAGDAIKSEDDAAAAAVAVSKAAAVNVDTGDGADEAAAEAAAEEKDKEEVQPKPAADGSRGGAAKPVCYETSRRSDTCEAAGDVRVLGSSQTVYVDSLDREWKTKPYCRKHDNFALAHVKEWSLKPLPSGAAPQCTVNSSATAFVLSTGGFTGNPFHDYTDVLIPAFITAHPLRGEVQFLVSSYKSWWMNRYIQIFQQMSRHEVVDIDADDEVRCYRNVVVGPTFHRELGVDASKSPSPGYSTADFRKMLRDAFGLERATATPSGDRWDIRRRPRLLIISRRPSRGRAFMNERAMADMAASLGFDVRIGEPDSSTDTSKFARLVNSCDVMVGVHGAGLTNMVFLPAGAVVVQVVPYGRLEWLARNTFAEPSAGMEVHYLEYVVQLDETTLSEQYPSDHPVLRDPMAIHKQGWNALKTTYLDKQNVRPHLGRLKNTFLQALKMLPHGRDD

SEQ ID NO: 733 - DNA, 1035 bp, Sorghum bicolor
atgtcgaaggcgggagccctggatcttgcatctggcctcggagggaagatcaacaaggaggaagtcaaatcggcagtcgatgagtatgagaaatatcatggatattatggagggaaggaggaagcaagaaagtccaactacactgatatggttaacaaatattatgatcttgccactagcttctatgagtatggttggggtgaatccttccactttgctcacagatggaatggagaatccttgcgtgaaagcatcaagcgtcatgagcattttcttgccctgcagcttggcttgaaaccaggaatgaaggttttggatgtgggctgcggaataggtggaccgctgagagagattgcaagatttagctcaacttcagttactggattgaataacaatgaataccagataaccaggggaaaggagctcaatcggttggcaggagttagtggaacctgtgattttgtcaaggcagacttcatgaagatgccatttgatgataacacttttgatgctgtttatgcaattgaggcaacatgtcatgcacctgatccggttggctgctataaggagatataccgtgtgttgaagcccggtcagtgctttgctgtatatgagtggtgcattactgatcactatgatccaaacaacgcaacccataaaaggatcaaggatgaaattgagcttggcaatggcctaccagatatcagaagcactaggcaatgtcttcaggcagtcaaagatgcaggttttgaggttgcttgggataaggatctagctgaggattcccccttgccctggtacttgcctttggatccgagccgattttccttgaatagtttccgtttgacgtctgtgggacgcatgattactcgcactatggtcaaggcattggaatacattggtcttgccccacaaggcagtgagagggtctccaatttcctagagaaggctgcagaaggtcttgtagagggtgggaagaaggagatcttcacaccaatgtacttctttcttgctcggaagcctctttcagaataa

SEQ ID NO: 734 - protein, 344 aa, Sorghum bicolor
MSKAGALDLASGLGGKINKEEVKSAVDEYEKYHGYYGGKEEARKSNYTDMVNKYYDLATSFYEYGWGESFHFAHRWNGESLRESIKRHEHFLALQLGLKPGMKVLDVGCGIGGPLREIARFSSTSVTGLNNNEYQITRGKELNRLAGVSGTCDFVKADFMKMPFDDNTFDAVYAIEATCHAPDPVGCYKEIYRVLKPGQCFAVYEWCITDHYDPNNATHKRIKDEIELGNGLPDIRSTRQCLQAVKDAGFEVAWDKDLAEDSPLPWYLPLDPSRFSLNSFRLTSVGRMITRTMVKALEYIGLAPQGSERVSNFLEKAAEGLVEGGKKEIFTPMYFFLARKPLSE

SEQ ID NO: 735 - DNA, 525 bp, Sorghum bicolor
atgtctagggacccattggtcgtcgggcatgtcgtgggggatattgtggatccattcatcacaactgcatcactgagggtgttctacaacaataaggagatgacaaatggttctgaccttaagccatctcaagtgatgaatgagccaagggtccacatcagtgggcgtgacatgaggactctctacacacttgtcatggtggacccagatgcaccaagccccagtaaccccactaaaagagagaaccttcactggttggtgacagacattccagagacaactgatgccagtttcgggaatgaaatagttccatatgagagcccacgtccaactgccggaatccatcgctttgcattcgtcttgttcaggcagtcagtcaggcagaccacctatgcgccggggtggagatcaaactttaacacaagggacttcgcagccatctacaaccttggctcccctgtcgctgcagtgtacttcaactgccagagagagaacggctgtggtggaagaaggtacataaggtga

SEQ ID NO: 736 - protein, 174 aa, Sorghum bicolor
MSRDPLVVGHVVGDIVDPFITTASLRVFYNNKEMTNGSDLKPSQVMNEPRVHISGRDMRTLYTLVMVDPDAPSPSNPTKRENLHWLVTDIPETTDASFGNEIVPYESPRPTAGIHRFAFVLFRQSVRQTTYAPGWRSNFNTRDFAAIYNLGSPVAAVYFNCQRENGCGGRRYIR

SEQ ID NO: 737 - DNA, 2376 bp, Sorghum bicolor
atggacgataatgcatctattcgccaccacactactccctcctccacataccatcgcagaaaccccgtcatggcagcgcatgtttcagtgctcctcctggtgccggcgttgctgatgagagtggcagtggccggagcaccgccgttctcgtgcggcccgtcgtcgccgtcgaaggggttaccgttctgcaacatgaagctccccgcgtcacagcgtgcggcggacctggtgtcgcggatgacgcccgccgagaaggcgtcccagcttggggatatcgccaacggggtgccgcgacttggcgtcccctcgtacaagtggtggaacgaggccctgcacggggtggccatctccggcaaggggatccacatgaaccagggcgtacgctcggccaccagctttccgcaggtgctgcacaccgccgcgtccttcaacgacaacctctggttccgcatcggccaggcgaccggcaaggaggctcgggcattctacaacatcggacaggcggaggggctcaccatgtggtccccgaacgtgaacatcttccgggacccgcggtggggccgcggccaggagacccccggcgaggaccccgcggtggccagccggtacggcgccgccttcgtccggggcttgcagggcagcagcagcaacaccaaatccgtgccgccggtgctgcagacctcggcttgctgcaagcacgccacggcatatgacctggaggactggaagggagtgtcgcggtacagcttcaaggccaccgtgacgatccaggacctggcggacaccttcaacccgccgttccggagctgtgtggtcgatggaaaggccagctgcgtcatgtgcgcctacacgatcgtcaatggcgtgccgtcgtgcgccaatggcgacctgctcaccaagaccttcaggggcagctggggactcgacgggtatgtcgccgcggactgcgacgcggtggccatcatgcgtaactcacagttctatcgcccgacagcggaggacaccgtcgcggccacgctcaaagccggattggacatagactgtggtccatacatccagcagtacgccatggccgcgatccagaaggggaagctgacgcagcaggacgtagacaaggccgtcaagaacctcctcaccacccgcatgcggctgggccacttcgacggcgaccccaagaccaacgtgtacggcaacctcggagccggccacatctgcacggcggagcacaagaacctagcgctcgaggcggcgctggacggcatcgtcttactcaagaacagcgcgggcgtcctcccgcttaaacgagggacggtcaactctgccgccgtcatcggccacaacgccaacgacgttctcgctctcctcggcaactattggggcccaccgtgcgcgccgaccacgcctctccaggggatccagggctacgtgaagaacgtcaagttcctggccgggtgcaacaaggcggcctgcaacgtcgccgcgacgccccaggcgaccgcgctggcgagctcgtcggatgccgtgatcctgttcatgggactgagccaggagcaggagagcgaagggaaggacaggacgacacttctccttccgggtaaccagcagagcttgatcaacgccgtcgccaacgcagcgaagcggccagtgatcttggtgcttctcactggcggcccggtggacatcacattcgcccaggcgaaccccaagatcggcgccatcctgtgggccggctaccctggccaggctggcggcctcgccattgcaaaagtcctgttcggcgagaagaaccccagtgggaagctgccgaacacgtggtacccggaggagttcacgaggatccccatgacggacatgcggatgcgcgccgcgggcagctaccctggccggacttaccggttctacaatggcaagaccatctataagttcggctacggcctcagctactccaagttctctcaccgtgtagtcaccgggcgcaagaacccggcgcacaacacgagcctactcgccgccggcctcgcagcgatgaccgaggacaacttgagctaccatgtcgagcacatcggcgacgtcgtgtgcgatcagctcaaattcttggcagtggtcaaggtgcagaaccacgggccaatcgacgggaagcacacggcgctcatgttcctccggtggcccagcgcgaccgacggccgaccaacgaggcagctgatcgggttccagagccagcacatcaaggcaggggagaaggcgaacctgaggtttgaggtgagcccgtgtgagcatttcagcagggtgaggcaggacggcagaaaggtgatcgataaagggtcacatttcctcaaggttggcaagcatgagctggagattagttttggggcatga

SEQ ID NO: 738 - protein, 791 aa, Sorghum bicolor
MDDNASIRHHTTPSSTYHRRNPVMAAHVSVLLLVPALLMRVAVAGAPPFSCGPSSPSKGLPFCNMKLPASQRAADLVSRMTPAEKASQLGDIANGVPRLGVPSYKWWNEALHGVAISGKGIHMNQGVRSATSFPQVLHTAASFNDNLWFRIGQATGKEARAFYNIGQAEGLTMWSPNVNIFRDPRWGRGQETPGEDPAVASRYGAAFVRGLQGSSSNTKSVPPVLQTSACCKHATAYDLEDWKGVSRYSFKATVTIQDLADTFNPPFRSCVVDGKASCVMCAYTIVNGVPSCANGDLLTKTFRGSWGLDGYVAADCDAVAIMRNSQFYRPTAEDTVAATLKAGLDIDCGPYIQQYAMAAIQKGKLTQQDVDKAVKNLLTTRMRLGHFDGDPKTNVYGNLGAGHICTAEHKNLALEAALDGIVLLKNSAGVLPLKRGTVNSAAVIGHNANDVLALLGNYWGPPCAPTTPLQGIQGYVKNVKFLAGCNKAACNVAATPQATALASSSDAVILFMGLSQEQESEGKDRTTLLLPGNQQSLINAVANAAKRPVILVLLTGGPVDITFAQANPKIGAILWAGYPGQAGGLAIAKVLFGEKNPSGKLPNTWYPEEFTRIPMTDMRMRAAGSYPGRTYRFYNGKTIYKFGYGLSYSKFSHRVVTGRKNPAHNTSLLAAGLAAMTEDNLSYHVEHIGDVVCDQLKFLAVVKVQNHGPIDGKHTALMFLRWPSATDGRPTRQLIGFQSQHIKAGEKANLRFEVSPCEHFSRVRQDGRKVIDKGSHFLKVGKHELEISFGA

SEQ ID NO: 739 - DNA, 849 bp, Sorghum bicolor
atggatccttgtcaccaatccatagagaccgcaggcgcgaaggactacagtgacccacccccagcaccattggtcaacgccggcgagctgggcaagtggtccctctaccgcgccgccatcgccgagttcgtcgccacgttgctcttcgtctacgtcacgctggccaccgtcatcgggcacaagcgccaggccgagtcccagccgtgcggcagcgtcggcgtgctgggcatcgcgtggtccttcggcggcatgatcttcgtgctcgtctactgcaccgcgggcatctccggcggccacatcaacccggcggtcaccttcggccttctgctggcgcgcaaggtgtcgcttgtgcgcgccgcgctctacgtggtggcgcagtgcctgggcgccatgtgtggcgctggcctcgtcaaggccttccacggggcccattggtaccttcactacggcggcggcgccaacgagctctccgccggctactccaagggagccggtctggccgccgagatcgtgggcaccttcgtcctcgtctacaccgtgttctcggccaccgaccccaagcgcaaggtcagggattcgcacgtcccggtcctagcgccgctgcccatcggattcgcggtgttcatggtgcacctggccaccatccccgtcaccggcacgggcatcaacccggcaaggagcctggggccggccgttgtgtacaaccagcgaaaggcgtgggaagatcagtggatattctgggtcggccccctcattggcgctgccgccgccatgatctaccaccagttagttctccgcgccggcgcagccaaggccttggcatccttacgcaacaactaccatatctga

SEQ ID NO: 740 - protein, 282 aa, Sorghum bicolor
MDPCHQSIETAGAKDYSDPPPAPLVNAGELGKWSLYRAAIAEFVATLLFVYVTLATVIGHKRQAESQPCGSVGVLGIAWSFGGMIFVLVYCTAGISGGHINPAVTFGLLLARKVSLVRAALYVVAQCLGAMCGAGLVKAFHGAHWYLHYGGGANELSAGYSKGAGLAAEIVGTFVLVYTVFSATDPKRKVRDSHVPVLAPLPIGFAVFMVHLATIPVTGTGINPARSLGPAVVYNQRKAWEDQWIFWVGPLIGAAAAMIYHQLVLRAGAAKALASLRNNYHI

SEQ ID NO: 741 - DNA, 405 bp, Sorghum bicolor
cccgcccaaccctatacccacaactcgcggggatggaatctggacacgtacctggagcaggagctggaccgcctcctgcgcctctgggaaaccccgcacgaccgccgtggtgaattcctctgtgcccacgcctcgtcgattagggtcgtggtcaccggcggcgacgcggaccttatcgacgcggctccagatcatcgcgccgtcggcttcgaccgcgtcgacctcaccaggtgccgcgagcacgggttccgggtcactaacacccctgacgtgctcaccgacgacgtcgcggaccttgccgtgggactcgccatcgccgctctccgcaggatcccacacgccgacagctacgttcgcgccggcctgtggaaggccaaccatggctactatggtctcaccactcgg

SEQ ID NO: 742 - protein, 135 aa, Sorghum bicolor
PAQPYTHNSRGWNLDTYLEQELDRLLRLWETPHDRRGEFLCAHASSIRVVVTGGDADLIDAAPDHRAVGFDRVDLTRCREHGFRVTNTPDVLTDDVADLAVGLAIAALRRIPHADSYVRAGLWKANHGYYGLTTR

SEQ ID NO: 743 - DNA, 249 bp, Sorghum bicolor
atgttggctcaatccgaaggaaattatgcggaagctttgcagaattattatgaagctacgcgactagaaattgatccctatgatcgaagttatatactatataacataggccttatacacacaagcaatggagagcatacaaaggctttggaatattatttccgggcgctagaacgaaaccccttcttaccgcaagcttttaataatatggccgtgatctgtcattacgtgcgactatctccactatag

SEQ ID NO: 744 - protein, 82 aa, Sorghum bicolor
MLAQSEGNYAEALQNYYEATRLEIDPYDRSYILYNIGLIHTSNGEHTKALEYYFRALERNPFLPQAFNNMAVICHYVRLSPL

SEQ ID NO: 745 - DNA, 2070 bp, Sorghum bicolor
atggcctttgctcgtgctgtggctgctgggtttgacattgacaacttgggttacttgattgcatttgcagagcgctttggtgctgcacgtctgatgaaggcatgttcacatttcatcgaactgtggaagcagaagcatgaaactggacaatggattgaagttgaacctgaagcaatgtctacacgctctgaatttcctccatttaacgcatctggcattgtgttcatgggagacaacatgaagccaaatctggaatcagggtctattaatggagaggcgaatggcgaggatggagctaaatctgatcagaagcccatgggatctcatgctgcatatcctccatgggcaatgcatcctccatctggtgcagttgtttacccaccttatcctatgcaaggcatgcctttctatcctggggtgaatccgtactaccctccatatcctccagtggatgatcctaggtaccactactcaggaaggaaatcttcgaggaagcactcctcggatagtaaggactcagaaactcttgatgttgaaagtgaccatagcaattcagatagaggaagttctcatggtcgcaagtcacatagaaaggggaagaggtccggaaagaagaagcctagtgtagttgttatcaagaatgtgaatgtaacatctaaaaagcatggctcatcagagagcgaatcacaatcaagttctgaagttgagtctgtggacagtgacaattcgcactccaaatcaagagaaaggaagcataaaagctcaaactcaaagaaaaaggagggtaggagaactacttttgactcaggagatgaatatagcaaggatgaaacgtcgaatggccacgatgctgagcaaggtaactggagtgcatttcaaaatttcttgttgagagcagaagaaaaaacaagatctagtgatgcagacctgtttgctggtgagaaagaacccccatcaaggagaaaacaaaatgtaaacacaacagatcctattcttttagctgagagagatggaggcaatgtccatgagcggaacagggtaggttttgattcagccaatgggaggactagagctatccgggtcatgtccaatgatgaacttgttatgtctggagaagggagaagctatatggatggtgaaataaaggagattgaagctggtggaggaaggtacaggagagggacagctgatgacttcatggtttatggtcagagaagtcagatagagagacatagtttgttggatcctcttgcagaggcccagtacaagaatcccgttcagcaggacaagaatagatatggtgtggcggatgagtccttcatgattcctcttaggtccagctcacaggataatattggagcagaaagcagaactactattgacatagatgttgagcttccttctagcattcataaagcatcagatgaaaaggctgggcatcagcttttttacgaacctgacgaattggtgccagagcgtggatttgaagatgtttcatttggatatgatccagcaatggattatgatagccacatgcagactattgtgaaggtggaagatgcaaaaacagaggatgtcttgccagttactgacggtgatgtacagaaggtagagaaagagaagctaaggaatgcaaaggatggttcagataagcgaaggaaagatgccttattgaggaggctatcagcgccaaggaccccactgaatgatgcacaaaaacgtgcacagaacctgcgtgcatataaagcagaccttcagaaactgaagaaagaacaggaagaagagcaaataaagcgattggagaggcttaaattggagaggcaaaagaggatcgccgcaagaggtggaaagggtccagggaatgatgctcctaaggggaatggtatgaatggacttagtaaatcagttccaaccttgactgggttgaaaaaggagaaaaatggaacaactgaatcactcagcgatcgactgaagaggctttctgaacccaaaagcattgctggggcagagcattcttcgaatccaaagtcaactggagcagaccattcacgaagaagaagtatggcatga

SEQ ID NO: 746 - protein, 689 aa, Sorghum bicolor
MAFARAVAAGFDIDNLGYLIAFAERFGAARLMKACSHFIELWKQKHETGQWIEVEPEAMSTRSEFPPFNASGIVFMGDNMKPNLESGSINGEANGEDGAKSDQKPMGSHAAYPPWAMHPPSGAVVYPPYPMQGMPFYPGVNPYYPPYPPVDDPRYHYSGRKSSRKHSSDSKDSETLDVESDHSNSDRGSSHGRKSHRKGKRSGKKKPSVVVIKNVNVTSKKHGSSESESQSSSEVESVDSDNSHSKSRERKHKSSNSKKKEGRRTTFDSGDEYSKDETSNGHDAEQGNWSAFQNFLLRAEEKTRSSDADLFAGEKEPPSRRKQNVNTTDPILLAERDGGNVHERNRVGFDSANGRTRAIRVMSNDELVMSGEGRSYMDGEIKEIEAGGGRYRRGTADDFMVYGQRSQIERHSLLDPLAEAQYKNPVQQDKNRYGVADESFMIPLRSSSQDNIGAESRTTIDIDVELPSSIHKASDEKAGHQLFYEPDELVPERGFEDVSFGYDPAMDYDSHMQTIVKVEDAKTEDVLPVTDGDVQKVEKEKLRNAKDGSDKRRKDALLRRLSAPRTPLNDAQKRAQNLRAYKADLQKLKKEQEEEQIKRLERLKLERQKRIAARGGKGPGNDAPKGNGMNGLSKSVPTLTGLKKEKNGTTESLSDRLKRLSEPKSIAGAEHSSNPKSTGADHSRRRSMA

SEQ ID NO: 747 - DNA, 528 bp, Sorghum bicolor
atggtgagcggaaatctgctctcccggaggaagcgctcgtggcgtgccgatgagttcgtgagccgcagcacgctgcaattgctggactttgatgatggctcaccaccagagcatgcatggagaaggaaactaagtagtcatgctaatagattgaaggagttcaatgtcacattcagagaagcaattagaatgatgaaacttggtctccgactttggtcatacattcgggaagaagcttctcatggaaggaaagcaccaattgatccattcactagagagggcaacagaccctcagcctcacaaggagtacctcttggtgggatggggaaatctattgatgatggtatatcgtcctgggactggaaattaaagggcgatcgttcaacatatcatgctttgtttcctcgtgcatggactgtttatgatggaggactttcacatcattctgggggtcacgtaaatgagccattcataggaaaaaatggagtttctggtgttcttctacatcacaagcaagtcaataactga

SEQ ID NO: 748 - protein, 175 aa, Sorghum bicolor
MVSGNLLSRRKRSWRADEFVSRSTLQLLDFDDGSPPEHAWRRKLSSHANRLKEFNVTFREAIRMMKLGLRLWSYIREEASHGRKAPIDPFTREGNRPSASQGVPLGGMGKSIDDGISSWDWKLKGDRSTYHALFPRAWTVYDGGLSHHSGGHVNEPFIGKNGVSGVLLHHKQVNN

SEQ ID NO: 749 - DNA, 678 bp, Sorghum bicolor
aagcaagcaaagccccttccctatgctcacacatccaacaccatgaaccccaccttgccatctatctccttccaatctccttgtttcaagatccaaccagatcctcagcggagccactggcctcctcggcaacagagcacaaggaaaccagggctgtctctaaagcttatacgcgcaacactaggaccagacgccaatggcggactccacaatgctgaccgcagaggtgccaccttaccatcttcgcccctgtcagatgtagttcaggagttttactcctccctcaatgaaaagaacagcaaacgactcgataagttgatggcccctgattgcatcgtcgaggatactgcttattataagccactggatgccaagtgtacccgtatctacttcaaacgattgatggaatccatgggaaagaaggtcaaatttgccattgacgaggtttgtcaaggtgcagggcggaccgctgcagtaatgtggcaccttgaatggaatggatacatcatcccctttacgaagggctgcagcttctacatatgctcagcaaatggagcagcgcttcttatcaggaaaattcacatcttcgatgagtcaccactgaagccaggaaagtgggcattggaaatactcaacattgttaccaacttgatcaacatgttccccaaactagctgaa

SEQ ID NO: 750 - protein, 226 aa, Sorghum bicolor
KQAKPLPYAHTSNTMNPTLPSISFQSPCFKIQPDPQRSHWPPRQQSTRKPGLSLKLIRATLGPDANGGLHNADRRGATLPSSPLSDVVQEFYSSLNEKNSKRLDKLMAPDCIVEDTAYYKPLDAKCTRIYFKRLMESMGKKVKFAIDEVCQGAGRTAAVMWHLEWNGYIIPFTKGCSFYICSANGAALLIRKIHIFDESPLKPGKWALEILNIVTNLINMFPKLAE

SEQ ID NO: 751 - DNA, 1137 bp, Sorghum bicolor
atgacgacgccgccgacgccgctcctcctcctcctcctgctgctggtggcggcggcgaggggctgccatgggtcgtcgtcgtcgtcgtcgtactcgtaccagccgcagcagtacaagatgatgatgaacgcgtcatcgtcggggcgccgcccggcggtggtgacggcggtgatcgtgttcggcgactccattgttgacccggggaacaacaacgacctgcacacgctgatcaaggccaaccatccgccctacggcaaggacttgttcaaccacgaggccacgggacgctactccaacggactcattcccagcgacctcattgcccagcagcttggtgtgaagcagctggtgccggcctacttgggcgttgatctgagccccgaggatctgctcaccggtgtcagcttcgcatccggcgccacgggattcgacccgctgacgcccgtggtagtgagcgtgatctccatggatcagcagctggcctacttcgacgagtaccgcgggaagctggtggacatcgccggcgaggaggagacggcgaggatcatcgacggggcgctgttcgtggtgtgcgcgggcaccgacgatgtggccaacacctacttcacgacgccgttccgcagcgtggagtacgacatccccagttacgtggagctgctggtgagcggcgccgaggagttcctccgcaaggtcagcgccaggggagccaggaagatcggcttcgtggggatgccgccggtggggtgcgtgccgtcgcagcggacgctgggtgggggcctcgccagggcgtgcgagcccagccggaacgaggcggcgcagctatacaacgccaggatccaggagatgatcgccgggctgaacgcggagcaaacgcagactctggtggtgttcctggacatctaccgcatcctggacgacctcatggagcacggggacaagtacggcttcgccgacaccaccaggggctgctgcggcaccggcaccatcgaggtcaccggactctgcgactcccgcttcgtctccgtctgcgacgacgtctccaagcacgtcttcttcgacagctaccaccccaccgagcgagcctacaggatcatcgtcaacgacgtgtttgacaactacggccaagtgctcttctga

SEQ ID NO: 752 - protein, 378 aa, Sorghum bicolor
MTTPPTPLLLLLLLLVAAARGCHGSSSSSSYSYQPQQYKMMMNASSSGRRPAVVTAVIVFGDSIVDPGNNNDLHTLIKANHPPYGKDLFNHEATGRYSNGLIPSDLIAQQLGVKQLVPAYLGVDLSPEDLLTGVSFASGATGFDPLTPVVVSVISMDQQLAYFDEYRGKLVDIAGEEETARIIDGALFVVCAGTDDVANTYFTTPFRSVEYDIPSYVELLVSGAEEFLRKVSARGARKIGFVGMPPVGCVPSQRTLGGGLARACEPSRNEAAQLYNARIQEMIAGLNAEQTQTLVVFLDIYRILDDLMEHGDKYGFADTTRGCCGTGTIEVTGLCDSRFVSVCDDVSKHVFFDSYHPTERAYRIIVNDVFDNYGQVLF

SEQ ID NO: 753 - DNA, 810 bp, Sorghum bicolor
atggtgctcctcctcctcctgctcctcgtcgccgtcgcctcctcctccctatcccatgatggcgtcgtcgtcgccgacgtgccgccgtccaacaagctgatcttcatcctggcggggcaatccaacatggccggccgcggcggggtggtggcgaaccgctgggacggcgtggtgccgggcgactgcgcgccgtcccccgcggtgctccgcctctcgcccgacctgcgctgggaggaggcgcgggagccgctgcacgcgggaatcgacgccgaccaccacgccgtcggggtcgggcccgggatggcgttcgccaacgcgctgctgcggtcgggccacgcggggagccccgtggtggggctcgtcccctgcgccgtcgggggcacgcggatggcccagtggggcaagggcaccgacctctacgccgagatgctgcgccgcgccagggtcgccgtcgagaccgggggacgcatcggggcgctgctgtggtaccaaggggagagcgacaccgtcaggtggtctgacgccaccgagtacggccgacggatggccatgctcgtccgcgatctccgcgctgatctcggcatcccgcacctcctcgtcatccaggtagggttagcatcaggcctaggacagtatactcaagtcgtaagggatgctcagaaagggatcaaacttcgcaacgtcagattcgttgatgcaatgggattgccattgcaagacggccatctgcatctaagcacccaagctcaagtccagcttggacatatgctggctcagtcctatttgaattatggtacatcccagctctag

SEQ ID NO: 754 - protein, 269 aa, Sorghum bicolor
MVLLLLLLLVAVASSSLSHDGVVVADVPPSNKLIFILAGQSNMAGRGGVVANRWDGVVPGDCAPSPAVLRLSPDLRWEEAREPLHAGIDADHHAVGVGPGMAFANALLRSGHAGSPVVGLVPCAVGGTRMAQWGKGTDLYAEMLRRARVAVETGGRIGALLWYQGESDTVRWSDATEYGRRMAMLVRDLRADLGIPHLLVIQVGLASGLGQYTQVVRDAQKGIKLRNVRFVDAMGLPLQDGHLHLSTQAQVQLGHMLAQSYLNYGTSQL

SEQ ID NO: 755 - DNA, 417 bp, Sorghum bicolor
gaccaggaggatagtcttacagcttctaaccaatctggtggcaagcgatcatcacccccttcgcgtaatatgagacacagcaaaaaaatgttgcaagaaaaggagtcagctgtaccaagtaaatctggaaaaggtattgcaaagcaggatcaacacatgcctacttcaccaaggaaaagaagttatgtacgcccgcaaaagcgctactccaatcctcttgcaccaaatagtagacgcaaaagagtcaattggacaaaagaagaagaagctattttgagggaagcgatggaaaaattcactccacaggatgatgcgcgaattccatggattcagatacgagaatatggccgtcatgtgtttcacgaggagcgcctgccagatgatttgagggtcaagtggaggagcatgaagggcaag

SEQ ID NO: 756 - protein, 139 aa, Sorghum bicolor
DQEDSLTASNQSGGKRSSPPSRNMRHSKKMLQEKESAVPSKSGKGIAKQDQHMPTSPRKRSYVRPQKRYSNPLAPNSRRKRVNWTKEEEAILREAMEKFTPQDDARIPWIQIREYGRHVFHEERLPDDLRVKWRSMKGK

SEQ ID NO: 757 - DNA, 1701 bp, Sorghum bicolor
atggcggaggcgctgcggttcccgggggtagtcgcgggggagtctctggacgcgcccatcgccgcctccaagctcggaagggagcggcactcggtctccgcgagcgcgaggccgggagcgcaatgctggaggcggaggaagggtctggcggtgagctgccagacgggcgccgccccggctgttctcaggacggaggagaccacggccgcggcggcggcggggagcaatgctcaggcggagttcaccgttgtcatgaagttcggcggctcttcgctcgcgtcggccgagcggatgcgggaggtggccgatctcatccttagcttccccgacgagacccccgtcgtcgtcctctccgccatggggaagaccaccaataacctcctcctggccggagagaaggcggtgagctgcggcgcccccaaggcgtccgaaatccctgagctcgccgtcatcaaggacctgcatcttaggacggttgatgagctcgggttagataggtcgattgtttcaggtttattggatgaattggagcaacttcttaaaggagttgctatgatgaaagagctgactcttaggacaagagattatcttgtttcctttggtgaatgtatgtctacaagaatatttgctgcatatttgaataaacttgggaaaaaggcacgccagtatgatgcatttgatattggctttataaccactgatgatttcacaaatgcggatattcttgaagtcacttatcctactgttgcaaagaggctacatagagactggatggataaccctgctattcctatagtcactggttttcttgggaagggatgtaaatcatgtgctgtcaccactttaggcaggggtggtagtgacttgacagctacaaccattggcaaagccttgggattaagagaaatccaggtttggaaggatgtagatggtgtgttgacgtgtgatcctaatatttatgcaaatgctatacccgtgccctacttgacttttgatgaagctgctgagcttgcctactttggggcacaggttttgcatccccaatcaatgcgaccggctagggatggtgatataccagtgagagttaagaactcatacaatcgtcatgcacctggtactgtcatcactaaatccagagatatgagcaagagcatattgaccagcattgtgttgaaatcaaatgttaccatgctggatatagtgagcacacggatgcttggccagtacggatttttagcaaaggtcttctcaatatttgaagatttgggcatctctgttgatgttgtggctactagtgaagtcagcatctcgttgactctagatccatcaaaactatggagccgtgaactgatccagcaggaacttgatcatgttgttgaagagcttgaaaaattttctgttgttcatctgctccagcgtagatcaatcatctcactgatagggaatgtacagagatcatcattggttcttgaaaaggcattcaatgttctacgtagaaatggtgttaatgtccagatgatctcacaaggggcgtccaaggtgaacatttccttggtagtcaatgacagtgaggcaaaacagtgtgtacaagccctccattcggcattctttgagaatggcttcttgtcagaagtagagggagctgatgttccccagaacggctcctctctgaactcaaatggcgctatctatgcaaactag

SEQ ID NO: 758 - protein, 566 aa, Sorghum bicolor
MAEALRFPGVVAGESLDAPIAASKLGRERHSVSASARPGAQCWRRRKGLAVSCQTGAAPAVLRTEETTAAAAAGSNAQAEFTVVMKFGGSSLASAERMREVADLILSFPDETPVVVLSAMGKTTNNLLLAGEKAVSCGAPKASEIPELAVIKDLHLRTVDELGLDRSIVSGLLDELEQLLKGVAMMKELTLRTRDYLVSFGECMSTRIFAAYLNKLGKKARQYDAFDIGFITTDDFTNADILEVTYPTVAKRLHRDWMDNPAIPIVTGFLGKGCKSCAVTTLGRGGSDLTATTIGKALGLREIQVWKDVDGVLTCDPNIYANAIPVPYLTFDEAAELAYFGAQVLHPQSMRPARDGDIPVRVKNSYNRHAPGTVITKSRDMSKSILTSIVLKSNVTMLDIVSTRMLGQYGFLAKVFSIFEDLGISVDVVATSEVSISLTLDPSKLWSRELIQQELDHVVEELEKFSVVHLLQRRSIISLIGNVQRSSLVLEKAFNVLRRNGVNVQMISQGASKVNISLVVNDSEAKQCVQALHSAFFENGFLSEVEGADVPQNGSSLNSNGAIYAN

SEQ ID NO: 759 - DNA, 1338 bp, Sorghum bicolor
atgacgctcctcgatgtctccacgactccaccacgtcccgacgaagcccacgaggccgagcccgcacgacgcgacacggccacctcacctcaccaatgcccctgcgccgggccgggcgtcgtctcgtcgctctcccgggaggctctccctatatactcgagcgcgagcgaggcaaaccagatgagccgatgcccccccgcccccgctggcagcgtcacgccagtgcgtcactccggcccccgcgactcgagcactcgtcgggcgggcaggccggccggagcgtctagatcgccggcaccggcgcgatgctcgctgcctccgcctcgtccgatggccgggctctacgttccgcgccgctcgccgattcctccgctcctcgcccgccgcggccgcctgctccctcggcgcccggccgcgctgcttccccgcgcccgcgacccggccctccgccccaccgccgctgccgccgcgtctccgccgcccccgtccgccgactccgcgataaataatctgtgggagattgtgccggcagaacctggtgataggtttctaagcatgcttccaccatggcatgcatatgagcgtgcttgtgagtacttcatcttctcgtacgggatccagcaagtttacactactgttaagtacctgaaggctggtattagtggcggtggaagtcttccgatgcatgttgataagttttttgaggccattggcattaaagtacaaaacggctatggtcttactgagacttctcctgttgttgctgctagacgaccattctgtaatgttcttgggacaattggccacccaataaagcatactgagatcaaggtttttgacatagagactggtgaggtgcttccagatggttcaaaggggattgtgaaaattaaaggaccgcaaaatccattggctacaaatgaagcttttgaccaagagggttggttcagcactggagatataggtgaaaatgttgaacctgctgagatcgaggaagcagccggcaggagtaacttgattaatcagatagttgtgatcggccaggatcaacggcgtcttggtgccataattgttcccaacaatgacgaaattctggcagaagcaaaaaggaagtccatccttggtgagaatggcgacctagccaaagataaggtcatgaacatgctgtatgatgaattgaaaacctggaccatgcattgctctttccgagtcgggccaattatgattgtcgacgaaccatttacgattgacaatggtctgatgacacccaccatgaaaataagaagggacaaagtgacagacaagtacagaagggagatcgaagcgttgttcaagtga

SEQ ID NO: 760 - protein, 445 aa, Sorghum bicolor
MTLLDVSTTPPRPDEAHEAEPARRDTATSPHQCPCAGPGVVSSLSREALPIYSSASEANQMSRCPPAPAGSVTPVRHSGPRDSSTRRAGRPAGASRSPAPARCSLPPPRPMAGLYVPRRSPIPPLLARRGRLLPRRPAALLPRARDPALRPTAAAAASPPPPSADSAINNLWEIVPAEPGDRFLSMLPPWHAYERACEYFIFSYGIQQVYTTVKYLKAGISGGGSLPMHVDKFFEAIGIKVQNGYGLTETSPVVAARRPFCNVLGTIGHPIKHTEIKVFDIETGEVLPDGSKGIVKIKGPQNPLATNEAFDQEGWFSTGDIGENVEPAEIEEAAGRSNLINQIVVIGQDQRRLGAIIVPNNDEILAEAKRKSILGENGDLAKDKVMNMLYDELKTWTMHCSFRVGPIMIVDEPFTIDNGLMTPTMKIRRDKVTDKYRREIEALFK

SEQ ID NO: 761 - DNA, 507 bp, Sorghum bicolor
atgccggaaaatgatgtgctctctgtcatggaatctgatggttttacccataagattgtaacccactgcctcaacagatttggcacaaaggtagagcaggaagctaggagtttttggagccttgatgagaagcgtgtatgcttacagtttgctcagagagcacttggtgcaggaaagatgaagcttgctaactttatggacaaatgggagagaagcattccttcaggaatgcatgctgatcttcagatgctggaaggggaagtgttgtgtgaaaagcttggagctgagacctgggtgcatgcttttagtgttgctgatttgccactggcacctgctgacaggtttgcggcacttttccgtgagcgccctaagtgggaatggaaagatctgcagccctatatcagggatttgcgcttaccaggtgtctcatcagaaggattgcttataaagtataccagaagaacccaaccaagcgctgaagctgaacctatttttactgcaagataa

SEQ ID NO: 762 - protein, 168 aa, Sorghum bicolor
MPENDVLSVMESDGFTHKIVTHCLNRFGTKVEQEARSFWSLDEKRVCLQFAQRALGAGKMKLANFMDKWERSIPSGMHADLQMLEGEVLCEKLGAETWVHAFSVADLPLAPADRFAALFRERPKWEWKDLQPYIRDLRLPGVSSEGLLIKYTRRTQPSAEAEPIFTAR

SEQ ID NO: 763 - DNA, 832 bp, Sorghum bicolor
aagcgcgggcgccggcgtggcctagcgatggagagccccacgtcgacggcgtcgcgccccgacttctacgacttcctcgaccgcatgcgccgccccgccgccgccgacctcttccgctccatcaagagcttcctcgtgtccttctccttccacgcgcccaacgccgaggaggacggctgcaaggtccaggccttcttcacggagatggagagcgccatcagggaccatccgctctgggccaacgccaccaaccaggagatcgaccacgcgctcgagggcctggagaagtacgtcatgaccaaattgttcgaccgcacgtttgggacctccactgaggatgctgttaccgacatggagatatcagagaagattggtctcttgcagcagtttgttaagcctcatcacttggatatacccaagatcctgcataacgaggcatcgtggctgcttgcagtgaaagagttgcagaaggttaattccttcaaagcaccacgtgagaagcttctgtgcatcatgagctgttgtcaagtcatcaataacttgcttctgaacatatcaatgtcaaatgatcgaacattatctggggctgatgaattccttcctattcttatctatattactatcaaggccaatcctcctcagctgcactccaatctgaagtttgttcagctctttagaagagaaacaaagctaatttcggaagttgaatactatctgacaaacctcatttcagcaaagatgtttataatagatgttaatgctagctcattatcgatggagggaagcgagtttcagaaacatatggaatcggcaagactagcactcaagtatc

SEQ ID NO: 764 - protein, 278 aa, Sorghum bicolor
  misc_feature (278)..(278): Xaa can be any naturally occurring amino acid
KRGRRRGLAMESPTSTASRPDFYDFLDRMRRPAAADLFRSIKSFLVSFSFHAPNAEEDGCKVQAFFTEMESAIRDHPLWANATNQEIDHALEGLEKYVMTKLFDRTFGTSTEDAVTDMEISEKIGLLQQFVKPHHLDIPKILHNEASWLLAVKELQKVNSFKAPREKLLCIMSCCQVINNLLLNISMSNDRTLSGADEFLPILIYITIKANPPQLHSNLKFVQLFRRETKLISEVEYYLTNLISAKMFIIDVNASSLSMEGSEFQKHMESARLALKYX

SEQ ID NO: 765 - DNA, 654 bp, Sorghum bicolor
atggcgttctacgagggctggtgcagcggcaagaacggcggaggctgctgctccgactgcagctggacgcggatcgccatctggaccgtcgccatcctcgtcgtgtgcgccgtcatcatcgtcctcgtgctggccttcggcgtggtgcgcccacccaaggccaccgccgacgacgccgtgctgcagcggttcgctctgtccccggccgacccggcgtccaactccaccgtctcctacaacctcaccgccacggtgtcgctccggaaccccaacatgtaccgcgccatcgactacggcgcgctcgccgtggccttctccttcaacggcacccgcttcgacgactccgcgtccgtcccggcgttccagcacaagccacggaagacggcgacggtgcgcgtgaccgtcggcggcgtcgacaagcccatcaagctcgcgaaggccggggtgggggagttccggacggagaacgacacgggcaagttcgccgtggagatgcggctcgacacggtgctccagtacaagggccggtccgccaagtgcccgctcgtcgtcatctgcccgcttcagctccagctcgtcgaccctgacgtcgctgccaccgcgttccagcggaccaagtgcaccatcctccgggccaagaagtccggctgctag

SEQ ID NO: 766 - protein, 217 aa, Sorghum bicolor
MAFYEGWCSGKNGGGCCSDCSWTRIAIWTVAILVVCAVIIVLVLAFGVVRPPKATADDAVLQRFALSPADPASNSTVSYNLTATVSLRNPNMYRAIDYGALAVAFSFNGTRFDDSASVPAFQHKPRKTATVRVTVGGVDKPIKLAKAGVGEFRTENDTGKFAVEMRLDTVLQYKGRSAKCPLVVICPLQLQLVDPDVAATAFQRTKCTILRAKKSGC

SEQ ID NO: 767 - DNA, 2631 bp, Sorghum bicolor
atggatgtggagaaacctgcttccaaggggcatggtttctttgccctcttcgattggggaaagaagtctaagaagcgccagttcgtcgggagcaccagcagttctccaaatctgaagaatgctggagatgggaaggatattgatgatagtacaccaagcacacggtcaaattcgatccttgaagacgccccaagcttgaaggaaagcagtgaacatagctgctcatcttcagtaattgatgaagaagctcagtcaaggaggagtccgacggttgttgctaggcttatgggattggattctatgcctgcggcaagctcacccgaatccaatcccttgccattaactgtgcaaccacctttgcaaaccaacagccatgaggatttgattggcagaagctatgttggtagtccccttaagatgccgggtagtcctattgatcggtataaaatggaagcactgcctccaagacttgccaagaggacactatctgttgcacagtatcagttgttgtctcccatgaaaaaccctaaccatatatccagcaggaatgcagctgatataatggaagcagcatcgaggatcatcaggcctggagtagaaaatataagttcttacagagttcatgatgttgggagtgcaaatgctgcacgtgcttacaatcctggagagatcataggaatccaacaaaggtcacagaagcttaatgaagcaatgaggaaacgtgatggccctgcatcttttaggccgcaaagtggaaaaccttcagatggaagattgagaggttcagagggtgcctcgtcttccaggatctcacagtcaaatggatgtgctccagttggtccaaaagtcaaagctggtaatagattagacactgctcgggctatgcatgcccaagaaaaagggggcatgagaaaaggtggtagaaagcttgaaacttgcaagaaccctgaaaatagcatggctgaaagaactgggttgaaccgacaaaaggatagtaaccaaatgggcacaacaagttcgtccagtgtgcctgtgacaaacaacagaaaacagaatgctacggtcaccaaacataaggtgaattcaaacccagcaacccctagtagacaacggagcaatattcaccaaataaatgcccatcccagaaaggtgagggcggccagcacatttgctggaaacagtagtcaaagtagcagaaaggtggacttgcggccaaatgctcatgcaaatgtaagaaatagttctataccaaaagcaataccgaagccaagaagattacaagacaggagagtgtgctctgatacaagccagtcaagtgatagtattagttctgacagaagccagaggcggattcggcacaatattgtgattgatgagcaatcatctttttcaacaaacaaaaagaaagtcagcactgagattgtttcattcacatttacctcaccagttgataagtcactacatggcacccacttccccaatcattcagtggaaaaacaatttatagggaatctgagcgctatgtcaacttcaagcaatacatcaaacactaaacttgatgtaattgatggtgattttttgggactcctgttggagcagaaattgagagagctgtcatctggtgtgagatcgccctacactaagcaagccaaaggtgttcaccacacttcaactgctttggaagatatggcatcagcatgtgaaacatctagcattgcttctactgattatgatagggaatcattacagtctttcagtgatgtaaaagctactctcccccagacagatcttgctactagaagtgtccagtcatctcagcctgtgaagtatgatcatgatgtcacggatcgagcagagcttgagcatcatggccgaagtccccttttcacatgggaggcttcagtttcaactgaaacctgcagctcatcagagagctggaggagtgcaaatggaacaagattgtttagttcaactgaaggagtgacaacttctgattcgacacgcttcaacaaattcctagaagcggatgcctcttcagaatattctgacacagcctcatcaatcacagtggctacagcagaaatccctcgatcagaaagtagcagctcatgtcatatggataatagacaagaggtggagtttataagagaaatactgaatgctggctctcctgtccggcacattttctcttatctggagcggtttggcaattcgggtattctggatccacatctattggaggaattaaatggcaatattaggttgttagctggtgaagagggcaaaggttacagattgaggcggaggctgctctttgattgtgttaatgagttaataagtgtgaaatgcgcttactacttcaatgctggctacagcttatggtttatggggatggcggttctgcagaacttgtcagcggaagaaatctatcgagagatgaccagcctgaaggttgctgaggagtggatggtggatgagcttgtgtacagggaaatgagtagtcctctggggagctgggttgatttcaagatggaatcacaccaagccggcggagatatagcggtggagttgttaggttccttgatcgatgaagtggttgctgatcttctgactggtggctcatcttcgtag

SEQ ID NO: 768 - protein, 876 aa, Sorghum bicolor
MDVEKPASKGHGFFALFDWGKKSKKRQFVGSTSSSPNLKNAGDGKDIDDSTPSTRSNSILEDAPSLKESSEHSCSSSVIDEEAQSRRSPTVVARLMGLDSMPAASSPESNPLPLTVQPPLQTNSHEDLIGRSYVGSPLKMPGSPIDRYKMEALPPRLAKRTLSVAQYQLLSPMKNPNHISSRNAADIMEAASRIIRPGVENISSYRVHDVGSANAARAYNPGEIIGIQQRSQKLNEAMRKRDGPASFRPQSGKPSDGRLRGSEGASSSRISQSNGCAPVGPKVKAGNRLDTARAMHAQEKGGMRKGGRKLETCKNPENSMAERTGLNRQKDSNQMGTTSSSSVPVTNNRKQNATVTKHKVNSNPATPSRQRSNIHQINAHPRKVRAASTFAGNSSQSSRKVDLRPNAHANVRNSSIPKAIPKPRRLQDRRVCSDTSQSSDSISSDRSQRRIRHNIVIDEQSSFSTNKKKVSTEIVSFTFTSPVDKSLHGTHFPNHSVEKQFIGNLSAMSTSSNTSNTKLDVIDGDFLGLLLEQKLRELSSGVRSPYTKQAKGVHHTSTALEDMASACETSSIASTDYDRESLQSFSDVKATLPQTDLATRSVQSSQPVKYDHDVTDRAELEHHGRSPLFTWEASVSTETCSSSESWRSANGTRLFSSTEGVTTSDSTRFNKFLEADASSEYSDTASSITVATAEIPRSESSSSCHMDNRQEVEFIREILNAGSPVRHIFSYLERFGNSGILDPHLLEELNGNIRLLAGEEGKGYRLRRRLLFDCVNELISVKCAYYFNAGYSLWFMGMAVLQNLSAEEIYREMTSLKVAEEWMVDELVYREMSSPLGSWVDFKMESHQAGGDIAVELLGSLIDEVVADLLTGGSSS

SEQ ID NO: 769 - DNA, 2040 bp, Sorghum bicolor
atgctgtgctgctgcgccaccgcatccctctcgtctccgtctcctccctcgcatgccgccgacccccacgcgcgcctcagggcggcggcagcatgctccgacctgccgggcgctatcgccgccttcgcctccatgtcatcctccgccgccgccaacgcggccgcgcgccccgtcctccgcaccttcaccgcgctcctcaagctctgcgcggcgcgcgccgacctcgccacgggccgcgccgtccacgcgcagctgaccgcgcgggggctcgcctccgagtccctcgccgccacggcccttgccaatatgtacttcaaatgccgccgccccgtggacgcgcgcagggtgttcgaccgcatgcccgccagggaccgcgtcgcctggaacgcactcgtggccgggtacgcgcggaacgggctccccgcgctcgcgatggaggcggtcgtccggatgcagggggaggagggcggggagcagcccgactccatcacgctcgtgtcggtgctgccggcctgcgccgacgcccgggtgctcggcgcttgccgagaggtccacgcattcgcgctccgtgcggggctcgatgagctcgtcaatgtctccacggcggtccttgatgcctactgcaagtgtggtgcggttgaggcggcgagggcggtcttcgattggatgcctgtcaggaactccgtgtcttggaatgccatgattgatgggtatgctgagaacgggaacgcctcggaggctctggctttgttctggaggatggtccaggagggtgtggatgtgacggatgcagctgtgttggcagcattgcaagcgtgtagggagcttggatgcctcgacgaggcaaggcgtgtccatgagctacttgtgagggttggcttgaagtccaatgtgtcggtgatgaacgcgcttatcaccacgtactccaagtgcaagagggcagaccttgctgcccatgcgttcaatgagctgggcatcaagaagacacggatctcgtggaatgccatgatcctcggcttcacacagaatggatgctccgaggatgctgagaggctcttcgctagaatgcagttggaaaatgtgaaaccagattcgttcaccttagtcagcgtgattcctgcagtcgcggatatttctgacccgctgcaggcaagatggatccatgggtattctatcaggcaccaactagaccaggatatctatgtcctgacggcccttatcgacatgtactccaaatgtggccgtgttaccatagccagaaagctcttcgattctgcaagggacaggcatgtcatcacctggaatgcaatgatccatggttatggttcgcatggttttggccaggttgcagttgagctatttgaagagatgaagggcactggcagtttgcccaacgagacaactttcctctcggtccttgcagcttgcagtcatgctggtttggttgatgaagggcggaaatattttgctagcatgaaggactatgggcttgaacctggaatggagcactatggtaccttggtggatcttcttggacgagctgggaaggtagatgaagcttggtctttcatccaaaacatgcctatagaacctggcattagtgtttacggtgcaatgttaggtgcttgcaagttgcacaagaatgttgaattggctgaagaatcagcacagaaaatctttgagctgggcccagaggagggggtgtaccatgtcctcttggcaaacatttatgcaaacgcttcaatgtggaaggatgttgcgagggtgaggactgctatggagaagaaaggactccagaagactcctggatggagtattatccagctcaaaaatgaggtccataccttctactccggaagcacaaatcaccagcacacaaaggaaatatatgcaaggctggctaagctcattgaagagatcaaagctgtgggatatgtgccagacactgattcgatacatgatgtggaagatgatgtcaaggcacagctgcttaacacccacactagatgtgtacatgatgagattagcactggtaactga

SEQ ID NO: 770 - protein, 679 aa, Sorghum bicolor
MLCCCATASLSSPSPPSHAADPHARLRAAAACSDLPGAIAAFASMSSSAAANAAARPVLRTFTALLKLCAARADLATGRAVHAQLTARGLASESLAATALANMYFKCRRPVDARRVFDRMPARDRVAWNALVAGYARNGLPALAMEAVVRMQGEEGGEQPDSITLVSVLPACADARVLGACREVHAFALRAGLDELVNVSTAVLDAYCKCGAVEAARAVFDWMPVRNSVSWNAMIDGYAENGNASEALALFWRMVQEGVDVTDAAVLAALQACRELGCLDEARRVHELLVRVGLKSNVSVMNALITTYSKCKRADLAAHAFNELGIKKTRISWNAMILGFTQNGCSEDAERLFARMQLENVKPDSFTLVSVIPAVADISDPLQARWIHGYSIRHQLDQDIYVLTALIDMYSKCGRVTIARKLFDSARDRHVITWNAMIHGYGSHGFGQVAVELFEEMKGTGSLPNETTFLSVLAACSHAGLVDEGRKYFASMKDYGLEPGMEHYGTLVDLLGRAGKVDEAWSFIQNMPIEPGISVYGAMLGACKLHKNVELAEESAQKIFELGPEEGVYHVLLANIYANASMWKDVARVRTAMEKKGLQKTPGWSIIQLKNEVHTFYSGSTNHQHTKEIYARLAKLIEEIKAVGYVPDTDSIHDVEDDVKAQLLNTHTRCVHDEISTGN

SEQ ID NO: 771 - DNA, 1368 bp, Sorghum bicolor
atgggccgtgcgccagcgaacggtaagcactcactgccgccgccgcctcctcctccaggacgttgccacttctggctccccaacaagcgccgccactgcgccaactcccctctcccgtcctctcagtattgcggaaaccacctccctgagtccgcttccggggccggccgccgcgtcccctgccccgtcgacccctcccacacggtgctcgaggagaacctggaggcgcacgtcggcaagtgccccctgaagaagcaggtcgccgcgctcaccgcgcagccgtactactccaagggcatcaactccggcgcgggtgaggcgggctgcgttgtgacgtcggcggagaagcgcgcggccgtgtacaggcttaccgaggaggagttccggtgtctgctcgggaagatccggtcggtgcatgtggccaccgctgcggccatacgggagtcctacctgatcaccggtgctaccgataagtggatgaacggccaggtcgataggaagatgccgtaccaagagaagcatgtcgctcagcaggcatccattgttggaaacatggaggcatttggcctgctgcggaagggtagcgatgaggtggttgatggggagaatgcggcggtgagtgctcaagcagttgtggagtttggagctggaagagggtacttgactcaggtgctggtggactgttatgggatcacgaatgtgttcttggttgagaggcggtcctacaagcttaaggccgatcgaagcttgcgtcaaaacgaagatgttaccttggagcgtttgagaattgatattgaggatttgaaactgcacggagtagaggcattgaggggactccagtatctagcaattggaaaacatctgtgtggacctgccacagatatgaccatgatgtgctgtcttcctgaacgatatgaacaaacagaagaaaacagcaaacatagtcttcaaggccttgctctagctacctgctgccaccatctttgccaatggaagcattacacaaataaatcgttcctcttgggactaggtatcacagaggaagaatttcatgccatgacatggtttagcagctgggctgtggacggtgatcatagctacccagattccccagtgggggctgaagaaatgtcctctgaagtcagagaactagagaagcctgatcaggacgccatcggaattgagagaataatccgaagtataccagcaggggagagggcctctctgggatccatgtgtaaagatatcattgatacggggaggctattatggcttgggcagaagggtctagttgctgatcttgtaagctatgttccatccaaaatttcaccagaaaaccatctactcatcgcaaaatgtacatcttga

SEQ ID NO: 772 - protein, 455 aa, Sorghum bicolor
MGRAPANGKHSLPPPPPPPGRCHFWLPNKRRHCANSPLPSSQYCGNHLPESASGAGRRVPCPVDPSHTVLEENLEAHVGKCPLKKQVAALTAQPYYSKGINSGAGEAGCVVTSAEKRAAVYRLTEEEFRCLLGKIRSVHVATAAAIRESYLITGATDKWMNGQVDRKMPYQEKHVAQQASIVGNMEAFGLLRKGSDEVVDGENAAVSAQAVVEFGAGRGYLTQVLVDCYGITNVFLVERRSYKLKADRSLRQNEDVTLERLRIDIEDLKLHGVEALRGLQYLAIGKHLCGPATDMTMMCCLPERYEQTEENSKHSLQGLALATCCHHLCQWKHYTNKSFLLGLGITEEEFHAMTWFSSWAVDGDHSYPDSPVGAEEMSSEVRELEKPDQDAIGIERIIRSIPAGERASLGSMCKDIIDTGRLLWLGQKGLVADLVSYVPSKISPENHLLIAKCTS

SEQ ID NO: 773 - DNA, 2301 bp, Sorghum bicolor
atggcgtccctcctcacgctccccgccctcgccctctccaaccccgccaccgcctccgacgccgtcaggctacgctccgcggccttccgctgctgggcgctccggcggcgcgggtgggcggcggtggccgccgtggcctcgcccaactccgtgctcagcgagcacgccttcaagcggcttcagctcgggagcgacgacgaggacgaggaggggacctacgggagcgacgccaacgaggggttcgaggccggggaggggttccagggggacgaggaggagctcgccattgccaggctcggcctgcctgacgagctcgtcgccacgctcgagaagcgcgggattacgcacctgttccccatccagagggctgtgttgattcccgctcttgagggccgtgacctgattgctagagcaaagactggaaccggaaagacactagcctttggtattcccatgatcaagcaattaattgagcaagacaatggtcaaattacaaggcgaggtcgcactcctcgggttctggttctagcacctaccagagaattagccaaacaagtcgagaaggaaataaaggaatcagcacccaagctcggcacagtgtgtgtttatggtggtgtctcgtataatgtccagcagaatgcactctcccgtggtgtcgatgttgttgttggaacacctggccgcataattgatttgataaatggcggaagcctccagttgggagaagttcagtatttagtcctggatgaggctgaccaaatgcttgcagtggggtttgaagaagatgttgaaacaatattacaacagcttcctgcgaacaggcaaagcatgctgttctctgcaacgatgcctagttgggtgaagaaactgtccaggcggtacttgaacaaccctttgacaattgacttggttggtgatcaagatgaaaagcttgctgaaggaatcaaactctatgctatcccactcacagctacatcaaagcgcaccattcttagtgatctaattacggtttatgcaaagggtgggaaaaccattgttttcactcgtacgaagaaagatgcagatgaggtatcattggcactgacaaacagtattgcttctgaggcacttcatggtgatatttcacagcatcagcgtgagcggacactaaatggatttcgtcaagggaaatttactgttctagtagctacagatgttgctgctcgtggtcttgatataccaaacgttgatttggttatccattacgaattgccaaatgatccagaaacttttgtccatcgttctggacgcactggacgtgctgggaaagcaggaactgcaatcttgatgtttaccagcagccagaaaaggacagttaagtctcttgagcgtgatgttggttgcaagtttgagtttataagccctccgtccatgggagaagtgctggagtcatctgctgagcatgtcattgctacattgcgaggggtgcacccagagtcaactcagtactttcttggagcagctgagaaattaacagaagaattaggacctcatgctcttgcttctgcactggcacatctgagtgggttttctcagccaccttcttcacgttctctgatcagtcatgagcagggatgggtcacattgcaactaactagagaacaaggatatggcagaggcttcttttctcctagatcagttactggttttctgtctgatgtttattcagctgctgcagatgaagttggcaaaatatacctaatagcagatgagaacgtccaaggagcagtcttcgatttgcctgaggaaatttccaaggacctgcttgctatggagctccccccaggaaacaccttaatgaaaatatcaaagctgcctgcgttgcaagatgatggtcctgccactgatagctatggtcgtttttccaacgaccgaggttccaggaacaggcgttccaggggtggaggtgctgcaagaggccggggtggttgggacactgatggtgaggatcgttccaggggtggaggcgctgcaagaggccggggtggttgggacactgacagtgaggatcgattccgccgtggtggcaggagctttaggtctgacaacgatagttggtcagatgatgactggtcaagcggtgggagaaaatcaaaccgttcctcgtcctttggtagccgctcatcatcttatggcagccgtggctcaccatccttcggtggtcgctcatcatccttcggtggtagggagagaagcttcagtggcgcttgtttcaactgcggtgaatccggtcaccgtgcatcagactgcccaaacaagtag

SEQ ID NO: 774 - protein, 766 aa, Sorghum bicolor
MASLLTLPALALSNPATASDAVRLRSAAFRCWALRRRGWAAVAAVASPNSVLSEHAFKRLQLGSDDEDEEGTYGSDANEGFEAGEGFQGDEEELAIARLGLPDELVATLEKRGITHLFPIQRAVLIPALEGRDLIARAKTGTGKTLAFGIPMIKQLIEQDNGQITRRGRTPRVLVLAPTRELAKQVEKEIKESAPKLGTVCVYGGVSYNVQQNALSRGVDVVVGTPGRIIDLINGGSLQLGEVQYLVLDEADQMLAVGFEEDVETILQQLPANRQSMLFSATMPSWVKKLSRRYLNNPLTIDLVGDQDEKLAEGIKLYAIPLTATSKRTILSDLITVYAKGGKTIVFTRTKKDADEVSLALTNSIASEALHGDISQHQRERTLNGFRQGKFTVLVATDVAARGLDIPNVDLVIHYELPNDPETFVHRSGRTGRAGKAGTAILMFTSSQKRTVKSLERDVGCKFEFISPPSMGEVLESSAEHVIATLRGVHPESTQYFLGAAEKLTEELGPHALASALAHLSGFSQPPSSRSLISHEQGWVTLQLTREQGYGRGFFSPRSVTGFLSDVYSAAADEVGKIYLIADENVQGAVFDLPEEISKDLLAMELPPGNTLMKISKLPALQDDGPATDSYGRFSNDRGSRNRRSRGGGAARGRGGWDTDGEDRSRGGGAARGRGGWDTDSEDRFRRGGRSFRSDNDSWSDDDWSSGGRKSNRSSSFGSRSSSYGSRGSPSFGGRSSSFGGRERSFSGACFNCGESGHRASDCPNK

SEQ ID NO: 775 - DNA, 1734 bp, Sorghum bicolor
atggccacaaccagcctcgcgctctcgctgcgcctcacgccgtcgtcgcggccgctcagcctccgtcgtcggggggccgccgtcgtcacctgtcgcgccaccaccgccacgttccaccagctcgatgccgtcgcggtgagggaggaggagtccaagttccggatggcagcagcggagggctgcaacctcttaccgctcacgaggtgcatcttctccgatcatctgacgccggttctcgcgtaccggtgcctcgtcaaggaggacgaccgcgaggcgcctagctttctcttcgagtccgtcgagcagggctctgagggcaccaatgtggggaggtatagcgtagtcggggcgcagcctgccatggagatcgtggccaaggctaaccatgtgacagtgatggaccatgagatgaagtcgaggagggagcacttcgtgcctgatccaatgaagatccctaggacaatcatggagcagtggaacccacagattgccgacggcctccctaatgcattttgtggaggatgggttggattcttctcatatgatacagtacgttatgttgaaacaaagaagcttccttttagtaaggcaccacttgacgatagaaaccttcctgacatccatttaggcctctacagtgatgtcattgtgtttgatcatgttgaaaagaaaacacatgttattcattgggtgagaacagattgttataattctattgatgaagcatatgaagatggaacaactcgacttgaagctttgttatcaagattacattgcctcaatatcccaatgctttcttctggttctataaaacttaatgttggaaacactgggtcagtaatgcaaaattcaacgatgtcaagagaagaatataaaaatatagttgtccaagctaaagaacacatcttagctggtgacatttttcaagtagttctaagccaacgttttgagagacgaacatttgccgacccctttgaaatctatcgtgcattgcgcatcgtaaatcctagtccatatatggcctatctacaggcacgaggttgtattctcgtggcatcaagtcctgaaattcttactcgagtgcaaaagaggacagtagtcaatcgaccacttgctggaaccataagaagaggcaaaacaaaagcagaagataaagttttagaacaattgcttttaagtgatgaaaagcagcgtgctgaacatattatgctaatagatcttggccgaaatgatgttggaaaggtgtctaaaccaggttcagtaaaggtggagaaattgatgaatattgaacgatattctcatgtcatgcacatcagctctactgtcactggagagctacgtgatgatcttacgtgttgggatgcactacgagctgcattaccagttggaacagttagtggcgctccaaaggtgagagcaatggagttgattgatcagctagaagtgaatatgcgtggaccgtatagtggtggctttggagggatttccttttgtggggatatggacattgcactcgatcttcgcactatcgtcttccccaccacatctcgatttgacaccatgtactcctacacggacaaaaagtcacggcaagagtgggtcgctcatctccaggctggagctggcatagttgctgatagtaaaccagacgacgagcaccaagagtgcctaaacaaggcagcaggtgctgctcgtgccattgaccttgccgaatctacatttctagaagagtag

SEQ ID NO: 776 - protein, 577 aa, Sorghum bicolor
MATTSLALSLRLTPSSRPLSLRRRGAAVVTCRATTATFHQLDAVAVREEESKFRMAAAEGCNLLPLTRCIFSDHLTPVLAYRCLVKEDDREAPSFLFESVEQGSEGTNVGRYSVVGAQPAMEIVAKANHVTVMDHEMKSRREHFVPDPMKIPRTIMEQWNPQIADGLPNAFCGGWVGFFSYDTVRYVETKKLPFSKAPLDDRNLPDIHLGLYSDVIVFDHVEKKTHVIHWVRTDCYNSIDEAYEDGTTRLEALLSRLHCLNIPMLSSGSIKLNVGNTGSVMQNSTMSREEYKNIVVQAKEHILAGDIFQVVLSQRFERRTFADPFEIYRALRIVNPSPYMAYLQARGCILVASSPEILTRVQKRTVVNRPLAGTIRRGKTKAEDKVLEQLLLSDEKQRAEHIMLIDLGRNDVGKVSKPGSVKVEKLMNIERYSHVMHISSTVTGELRDDLTCWDALRAALPVGTVSGAPKVRAMELIDQLEVNMRGPYSGGFGGISFCGDMDIALDLRTIVFPTTSRFDTMYSYTDKKSRQEWVAHLQAGAGIVADSKPDDEHQECLNKAAGAARAIDLAESTFLEE

SEQ ID NO: 777 - DNA, 378 bp, Sorghum bicolor
atggcgtcagtggcgttcggcagcaccgtggcggcggccgtggcgccgacctcggggaggacgcggccagcgcggcggtccgtgctggccgtgccgccagccgccaccaggggcggcccggcgccggccaaggaggagaaggggctcggcgagatcatcttcggcttcatcttcaagaaggaccagctggtggagactgacccgctcctcaacaaggtcgccggcgcgtcagccgccgcatcctcccgcgccaagccgccgccgcggggcgccgctaccacctccggcaagaaggctgccgctgccgacgacggcggcagcggcggcgggttcaacctccccggcctcggcgggttcttcgccaagaaaagcagctga

SEQ ID NO: 778 - protein, 125 aa, Sorghum bicolor
MASVAFGSTVAAAVAPTSGRTRPARRSVLAVPPAATRGGPAPAKEEKGLGEIIFGFIFKKDQLVETDPLLNKVAGASAAASSRAKPPPRGAATTSGKKAAAADDGGSGGGFNLPGLGGFFAKKSS

SEQ ID NO: 779 - DNA, 1308 bp, Sorghum bicolor
atggtcttttcttcggttcctgtctatcttgatccacccaattggaaccagcaccagcaccagcaccagccgcagcagcagcaacagcaagctcaccatggccagcttccaagtggcggcgccggaggaggtggaggcggcggcatggaagcgcatgcgcatcatcatcatcatcatcagctgccgccggtgccacctcctggcggggctctcatggcacctcgccctgacatggcggctgtggttgctgcgagtggcggcggcagcacgcccggcgccggcggcgggccgactgccggaggctccgctatccggccgggctccatgaccgaacgggccaggctcgccaagatcccgcagccggagccggggctcaagtgcccgcgctgcgagtccaccaacaccaagttctgctacttcaacaactactcgctctcgcagccgcgccacttctgcaagacgtgccgccggtactggacgcgcggcggcgcgctccggaacgtgcccgtcggcggcgggtgccgccgcaacaagcgcaccaagtcgtccaagtcaaactcgtcgtcggccgcctctgcttccggcgcgggcgggacgtcttcgtctacctcgtccaccgccaccggcggcagcagcgcggggggcgcctctggcgctggcatcatgccgtctcatcaggggcacgggcatctgccgttcctagcctcgttgcaccacccgctcgccggcggggatcactacagcaccggcgcgtcaaggttagggttccccggactgagctcgctggaccccgtggactaccaccagttcggcgccagcgccggcgccggcggcgctgccctcgggctggagcagtggcgcctgccgcagatacagcatcagttccccttcctaagcggccgccccgacgccgtgccaccgacaatgtctggcatttacccgttcgacgtggaaggccacggcggggacggtaccggcttcgccggccacatgctgggcgcctccaaggtgcccggctcagctgggctcatcacgcagctggcgtcggtgaagatggaggacaacccagcgtccgcggcgatggcaaacagctcgccaagggagttccttggtctccctgggaacctccaattctggggcggcggcagcaacggcggtgcaaatggaaacaatggaggaggcgctggcaacgccggtggtggaggcagcggcggcggcggcggcggaggaggaggcactgtggctccgggcagcagctgggtggacctgtcaggattcaactcgtcttcgtccgggaacgtgctttaa

SEQ ID NO: 780 - protein, 435 aa, Sorghum bicolor
MVFSSVPVYLDPPNWNQHQHQHQPQQQQQQAHHGQLPSGGAGGGGGGGMEAHAHHHHHHQLPPVPPPGGALMAPRPDMAAVVAASGGGSTPGAGGGPTAGGSAIRPGSMTERARLAKIPQPEPGLKCPRCESTNTKFCYFNNYSLSQPRHFCKTCRRYWTRGGALRNVPVGGGCRRNKRTKSSKSNSSSAASASGAGGTSSSTSSTATGGSSAGGASGAGIMPSHQGHGHLPFLASLHHPLAGGDHYSTGASRLGFPGLSSLDPVDYHQFGASAGAGGAALGLEQWRLPQIQHQFPFLSGRPDAVPPTMSGIYPFDVEGHGGDGTGFAGHMLGASKVPGSAGLITQLASVKMEDNPASAAMANSSPREFLGLPGNLQFWGGGSNGGANGNNGGGAGNAGGGGSGGGGGGGGGTVAPGSSWVDLSGFNSSSSGNVL

SEQ ID NO: 781 - DNA, 696 bp, Sorghum bicolor
atggccgtgccggaggtggtggtcgagggcgtcgtcttcccgccggtggcccgcccgccgggctccgccggctcgcacttcctcggcggcgcaggcgtgcgaggcatcgagatcggaggcaacttcatcaagttcacggccatcggcgtgtacctggaggacgcggccgtgtccgcgctggcgaagaagtgggccggcaagacggccgacgagctcgcgtccgacgccgccttcttccgcgacgtcgtcacgggtgacttcgagaagttcacgagggtgaccatgctccttccgctcacgggcgagcagtacgcggggaaagtgacggagaattgcgtggcgttctggaaggccgtcggcctgtacacggacgccgagggcgtcgccgtggagaagttcaaggaggcgttcaagcccgagacgttcccgccgggcgcctccatccttttcacgcactcgtccaccggagtcctcaccgtcgccttctccaaggactcgtcggtgccggcgtccggcggcgtggcgatcgagaacaagcacctctgcgaggccgtgctggagtccatcatcggggagcacggcgtgtcgccggccgcgaagctgagcctcgcggcgagggtgtcggagctcctcaccaagggaaccgccggggccgccgacgcgccgcaggcggagcccgtctcggtcaccgcctga

SEQ ID NO: 782 - protein, 231 aa, Sorghum bicolor
MAVPEVVVEGVVFPPVARPPGSAGSHFLGGAGVRGIEIGGNFIKFTAIGVYLEDAAVSALAKKWAGKTADELASDAAFFRDVVTGDFEKFTRVTMLLPLTGEQYAGKVTENCVAFWKAVGLYTDAEGVAVEKFKEAFKPETFPPGASILFTHSSTGVLTVAFSKDSSVPASGGVAIENKHLCEAVLESIIGEHGVSPAAKLSLAARVSELLTKGTAGAADAPQAEPVSVTA

SEQ ID NO: 783 - DNA, 4272 bp, Sorghum bicolor
atgcttcgtttagatattgctgcactacgacgcatctcttcctactacaagtcagttcaagaaaataaacatgctgatctatcttcactaagtgccccagagctccatgtgcagtctcatggagctggcatagctcctgctctagctcgagcactagctgaagattatgtccaatctgatcatctgcatgttttggagcagactcaaacttcgatggctcccaagaaggaacagccacaacatcctcttattgctattctgcagcaccttgaaaaagcaagtttgccatcattggaggaaaataaaacttgtggattttggcttttgactggtgttggtaatgcgtctctttacagatcgcaacagaatgaagcaagtcaacactggaatttggttactgaattctgtcgggcacaccatctcccactaagtacaaaatatcttgctttactggccaatgacaatgattgggttggctttttaacagaagctcagatagctggatttcctattgaagttgttattgaagtggcagccaaagagatcagggattcaagattgaggactcacatactgactgttctgaaaaatatgatgtcagttagaaggaaagcatctggtaatataccttcaggaagcagttattcgtctttatctgctgttgatggcaataatcccatggaacttttctgcattcttggagtctgtgaaaagcaaaaaaaccctggggaggcactactgattaaagcaaaacaaatgcagtggtctttgcttgccatgattgcttcatgctttccagatgtaactcctctctcatgcttaagtgtttggcttgagattacggccgcaagggagatgtcctcgatcaaggtggatgatgtttcttcgaaaatagcaaagaatgttggatctgctgttgaggccacaaataaattgccaagttctggcagaaatgttgaatttcgttacaacaggaagaatccaaagcgaaggcggttcctggaagcctcacaggaaaagctcacaatatgttcctcactagatagcacatgtgggccagactctgcttcaacttccaattctacctatattgatgatcatcaggaaagaggaaggccaatctctggagaaaccataatgtctgttgatattgatgaaaggcttgcatctttatcaaacatggtagcagtgctttgtgaacaacaactgtttctaccattacttagagcttttgaaatgtttttgccttcctgctcgcttctttccttcatccgttctctccaggcattttctcaaatgcgtctgtccgaggcttctgcacatttggcatcgttttcagcaagaataagagatgaagcctctcatactcaactaaactcttccaaagaagtgtcagttatagcagaatgggtggccgttacagctgtaaaagctgcagatgctgtcctctcaacctgtccatcaatttatgagaagaggtgtttactgcagcttctttcagaagtggattttgctgatggtggcacttcgtcatctaactttagccgaagatattggaagattaatttgtctgaaccttctttgtgtaaagatggtgatatctacaactggaatgatttgatggatgatgcttctcttttgacatcattagaaaaggacggtcaatgggagcaagctcgaacttgggcaagacaactggagtcaagtggcatagcttgggagtctactcttgaccatgtcactgaatcacaggcagaagccatggttgctgaatggaaggagtttctttgggatatcccacaagaacgtgcagccttgtggggtcactgccaatctctctttatgagatattcttttcctcctttgaaggctggattatttttccttaagcatgctgaagcagtaggaaaagagataccagcacgagagcttcatgaaatactattgctctctcttcaatggctaagcggaactatgactaaatcccctccggtctatcctcttcatcttctgcgggaaattgagactagggtgtggctcctggctgttgagtcagagagtcaatctaaggctgatggtgaatttgccacttatgctgttgctcataacatagctgttggaaacagtagcagtattatagaacagactgctgatgtcatcacaaaaatagacagtaatatgagctcgccgcacatgaaagttacagaaaggaatggcacacgggacagtttatcaagccaacatgcgcaactctttgagtctaacagcgaagcatcttcaacaacaataaataacacgagagcaaagcgaagggtgaaaacaaattcaccacttagacgtgggggcaatgacaatactgaaagtagaactaatgagctggataacagttctcatagttcaaagattggagaacaagctagaaatttactttctgaagaggaatttgcaaaaatggaagcatctttatctggctgggaacaaaatgttaggcctgtagatatggagaaggctgtgctctccttactggaatttgggcaaataactgctgctaagcaactccaacaaaagctgtctccatcatatattcctgaggaacttgtccttgttgatgttgctttaagaattgccaatagcagcagtagtggagagatcagtttgtcatgctttgacacacaggctctttcgttacttcagtcactggaagtagcaaatagctgcgatatgatcattagcccatcacaggttatggagatactagctgtgaaatgtggtgagggccgtgggcgagctcttattaggagaataatagcagttgttcgaactgctaaattgttgggactcccattttctgaagcatttgagaaacagccaattgaacttctacagttgctttccctgaaagcccaggattcttttgatgaagcgaaatttctggtggagacacacatcatgcctgcatctagcattgccagaattctagcagattcatttctaaaggggcttttagccgcgcaccgtggaggctatttggattcccaaaaggaagagggtcctgcacctctattgtggagatcaagtgacttcttaaagtgggcaaaactatgtccatcggaatcagaaattggccatgctttgatgcgtttggtaatgactggacatgaagtaccgcatgcttgcgaggttgaactcctaatattgtcacaccacttctacatgtcatcttcttgtcttgatggagtggatgttctggtcacatttgcagcaaatagagtggagtcatatgtttcagagggggatttttcttgtttagctcgcttgatcactggagtgagcaatttccattccttgagcttcattctttcgatccttgtggagaatggccaattggagttgctgcttcaaaagtattctgccactgacacagccacagggacacctgcatcggttcgaggatttaggatggctgttattacatcactgaaacagtttaacccgaatgatgatgacgctctctctatggtatacaagcactttgacatgaagcatgaggctgcttctctccttgaattgcgtgcagagcaatacatgaacagctggttatctcgatatgacaaggaacggcgaaatgatgagcttcttgaggctatgcatcaccttgtagagacggctgaggttctttcaactattgatgctggccaaagaacacatcgtgcttgtgcccgggcttctcttctgtcacttcagatccgaatacctgatcttatgtggattggtctttcggagaccaatgctcggcgaatttttgtggaacaatctaggttccaggaagctcttattgttgctgaagcatacaacataaatcaacctatagaatgggctccagtcttttggaatcaaatgctaaagccggatctaatcgagcaattcgtggctgagtttgtatcagtgctgccccttcagccaccaatgcttctcgagcttgcaaggttttacagggcagaggtcgcagccaggggagagcaatcacacttctctgtctggctttcacctggaggcttgcctgcagagtgggtgaaacatcttggcagatcattcaggagcctgctgcgtagaacaagggacatgaggctgaggctgcagttggcaactctggcgacaggcttcattgacgttctagacatttgcaatagagttttggataaagtcccggacaatgctggcccgctgatcctaaggaagggccatggcggggcataccttcctctcatgtaa

SEQ ID NO: 784 - protein, 1423 aa, Sorghum bicolor
MLRLDIAALRRISSYYKSVQENKHADLSSLSAPELHVQSHGAGIAPALARALAEDYVQSDHLHVLEQTQTSMAPKKEQPQHPLIAILQHLEKASLPSLEENKTCGFWLLTGVGNASLYRSQQNEASQHWNLVTEFCRAHHLPLSTKYLALLANDNDWVGFLTEAQIAGFPIEVVIEVAAKEIRDSRLRTHILTVLKNMMSVRRKASGNIPSGSSYSSLSAVDGNNPMELFCILGVCEKQKNPGEALLIKAKQMQWSLLAMIASCFPDVTPLSCLSVWLEITAAREMSSIKVDDVSSKIAKNVGSAVEATNKLPSSGRNVEFRYNRKNPKRRRFLEASQEKLTICSSLDSTCGPDSASTSNSTYIDDHQERGRPISGETIMSVDIDERLASLSNMVAVLCEQQLFLPLLRAFEMFLPSCSLLSFIRSLQAFSQMRLSEASAHLASFSARIRDEASHTQLNSSKEVSVIAEWVAVTAVKAADAVLSTCPSIYEKRCLLQLLSEVDFADGGTSSSNFSRRYWKINLSEPSLCKDGDIYNWNDLMDDASLLTSLEKDGQWEQARTWARQLESSGIAWESTLDHVTESQAEAMVAEWKEFLWDIPQERAALWGHCQSLFMRYSFPPLKAGLFFLKHAEAVGKEIPARELHEILLLSLQWLSGTMTKSPPVYPLHLLREIETRVWLLAVESESQSKADGEFATYAVAHNIAVGNSSSIIEQTADVITKIDSNMSSPHMKVTERNGTRDSLSSQHAQLFESNSEASSTTINNTRAKRRVKTNSPLRRGGNDNTESRTNELDNSSHSSKIGEQARNLLSEEEFAKMEASLSGWEQNVRPVDMEKAVLSLLEFGQITAAKQLQQKLSPSYIPEELVLVDVALRIANSSSSGEISLSCFDTQALSLLQSLEVANSCDMIISPSQVMEILAVKCGEGRGRALIRRIIAVVRTAKLLGLPFSEAFEKQPIELLQLLSLKAQDSFDEAKFLVETHIMPASSIARILADSFLKGLLAAHRGGYLDSQKEEGPAPLLWRSSDFLKWAKLCPSESEIGHALMRLVMTGHEVPHACEVELLILSHHFYMSSSCLDGVDVLVTFAANRVESYVSEGDFSCLARLITGVSNFHSLSFILSILVENGQLELLLQKYSATDTATGTPASVRGFRMAVITSLKQFNPNDDDALSMVYKHFDMKHEAASLLELRAEQYMNSWLSRYDKERRNDELLEAMHHLVETAEVLSTIDAGQRTHRACARASLLSLQIRIPDLMWIGLSETNARRIFVEQSRFQEALIVAEAYNINQPIEWAPVFWNQMLKPDLIEQFVAEFVSVLPLQPPMLLELARFYRAEVAARGEQSHFSVWLSPGGLPAEWVKHLGRSFRSLLRRTRDMRLRLQLATLATGFIDVLDICNRVLDKVPDNAGPLILRKGHGGAYLPLM

SEQ ID NO: 785 - DNA, 1152 bp, Sorghum bicolor
atggatgaaggccagggagttaggtattggtgccacaggtgtgaggaggtgatagatcctatgcctgagatgaagtgcccaagctgtgacggtgggtttgttgaagagatgggctctgaagacttcgaggcagctacgaacgcaaggtctgatcgctccctctctctcttggctccactgctgtttggtatgttggggggttcgtcccgcagatcaagactcaggagggaggccatggctgacgatgatgctgatgaggatgacgaagaggatgattcagaccatgagcttgaagcttccagtaggaggcggaggaggaggggctcatcagcgcttttgaggatgctccagactatccgtgaccgtgatgacgtaaggggctcggatgacactgacagtgatacagagagagacctggagagagcgagaagggagaggatcgagaggcggatggcgagggagaggattcaggagcggatggagaggcagagagagagggcaaggcaaattgagagagtgagtgctcgtggcagagagaggacagaaagcctaatactgatcaactccaacaatgaggctattattctgcaaggaacatttggatctgatgacaatcaagaggactcaagcaacacaagttctggtgtatcacttggggattactttcttggtcctgccctagatactctcttgcagcgtttggcggagagtgacctcaatcgttctggcacaccacctgccaagaaggaagcagtagctgcgctgccaactgtgaacatcgaggaagtgttgggctgttcagtctgtcttgaggattttgagatgggagcagaagcaaagcagatgccctgtcagcataagttccactcccattgcatacttccatggctggagctccacagttcttgcccaatctgtcgatttcagttgcctactgaggagacgaagaatccatgtgaatcagccagcactgcaggggccatgaacagagatggagacaatgctgctgcaagcagtagtgatacagaaagtagtaaccgcaatggagacaaccattctgatagtcctatcttctctgctctgagcacactcttctctgatccattctcatctgatgatgatgaaagtgttccacactcatctgagaactga

SEQ ID NO: 786 - protein, 383 aa, Sorghum bicolor
MDEGQGVRYWCHRCEEVIDPMPEMKCPSCDGGFVEEMGSEDFEAATNARSDRSLSLLAPLLFGMLGGSSRRSRLRREAMADDDADEDDEEDDSDHELEASSRRRRRRGSSALLRMLQTIRDRDDVRGSDDTDSDTERDLERARRERIERRMARERIQERMERQRERARQIERVSARGRERTESLILINSNNEAIILQGTFGSDDNQEDSSNTSSGVSLGDYFLGPALDTLLQRLAESDLNRSGTPPAKKEAVAALPTVNIEEVLGCSVCLEDFEMGAEAKQMPCQHKFHSHCILPWLELHSSCPICRFQLPTEETKNPCESASTAGAMNRDGDNAAASSSDTESSNRNGDNHSDSPIFSALSTLFSDPFSSDDDESVPHSSEN

SEQ ID NO: 787 - DNA, 486 bp, Sorghum bicolor
atgatacattttgtgctcctcatcagcaggcaggggaaggtgaggctgacgaaatggtacactccatacccacaaaagcagagatccaagatcatcaaagagataagtacgctcgtcctgacaagaggccccaagctgtgcaattttgttgactggcaaggttacagagttgtgtacaagaggtatgctagcctttacttctgcatgtgcattgaccctgctgacaatgaactggaaacccttcaaatcatccatcactatgttgagatattggaccggtactttggcaacgtctgtgagcttgatctgatattcaattttcataaggcgtacttcatattggacgagattttgattgctggtgaacttcaagaatcaaacaagaaatcggtgctacgtctagtaactacacaggacgctttggtggaagccgcaaaggaggaggcaggctcattgaggaacataattgcacaggctaccaagtag

SEQ ID NO: 788 - protein, 161 aa, Sorghum bicolor
MIHFVLLISRQGKVRLTKWYTPYPQKQRSKIIKEISTLVLTRGPKLCNFVDWQGYRVVYKRYASLYFCMCIDPADNELETLQIIHHYVEILDRYFGNVCELDLIFNFHKAYFILDEILIAGELQESNKKSVLRLVTTQDALVEAAKEEAGSLRNIIAQATK

SEQ ID NO: 789 - DNA, 2559 bp, Sorghum bicolor
atgtcgatctgcggataccactccccgcgcttctccgaggatattgcttggctccctcaatggcttcagccgtatggcacgccgacggttggcgaccaccggaacaccactaccgccgtttcatcaccttcttgccagaattgtgcgtttgtcggacacccttcgcaggagcgtcaggattgtcagaatgccactggtggttatagcggcttcatattgcacttgtcaggagatgaggacacggttgcaagttcaccagtcagcagcaatgtactacctttctctttgcgtttgtcttccgaaagtgctgcacaaccgtccctgcctgaaggtagtggtaatcctcagatgccaaactctggtacatgcaaaggtccatccaagggcctttgtgcagatggtcaagaacaagaggtcaatgctgtctcccagaatcagttcgaggctaacaatcctcaagctgagatgctcacagtgacagaagtggcttgcaaggagatcagtaaacaacttgatacaaacagacacaaaaggcatgatgtctatggtggaaaggttgatgttcgaaaactccgtaatgctgatgtaaatgatgcgattgaactatctattgctgcatctgaggccatggttattgcagagatgatacttgattctcagtctgataaatcggctgcagctgctatagaagctgctctacatgtgaaagaagcccggaaacaattttactttgaggagccagaacatgcttgtggatcctcagaagatggtcttgatgagactgattggcttgcagaattggatgagtctgaaatggttgacgtataccaagatgttggtctgtctcttgtccgtattgcttgttcaactcaagatcagaacccaggtgatttgaagcaacaaaattctcatcctagttgtcccccatgtgatgcagacatacacatcttatgggattcttcttctgagaggcaaaataaaaaatggaatagccaaaatgctgatagtgatgaccatgtatctgattcgttcccaaataatcagtcagcaggtgtgctaccaaatgaaccaactccgtgctctgattctgtaaagcaagcagctctatgtaaaacaatttcatgctcaagaaataagaaaactgtcctccaggcgtcaactcaaaataatgctgctttgcatggaaccttgggagctctagcaacataccaaaatgttcataaggaagttgcaggagttgctgcacagacgaatgtttgcataaagaagcatgtaaaaggtttgtttgaggaagaaaatagctacatttctgagtcaattagcatggataagtgctgtcctacttctagagcatcatccatggaaattgtcgcctcttcaagggcatctgtttattacaatgctgaaggtctccttgaagaaaatcatcatgcagaaactgaagagttgtgttgccaagtagtatgttcgagcttgtcacaggtggatcctttatgttccgttgttccatgcagcatatcttgcgatgaaggtcccagtagccaggcagtctgcaagcagagtgaaggccatgaaggtccgagtagccaggctcctttgtgcaaaaagagtgaatgcaatgaaggtcccacttgtctgacacctgaacgcggacatagtaaaggagaggagaaagaatttatacataccaaagaatttcctatgatgcaatacctggatggggatgctggtccatcttgtgtgtctttagttaagccaacagattctaatatttcattcaggcgaagaaaatacagttcactaaggccttttagcacagtagcaactaagtcaaacatattggcaagcacttcaaattgtaatgctgatgttccagtttgtcagctggagagattcacacccattattctaaataagaatgtacagcgtgtccaagctgctaagaaattcatacaatatagtgccggagctgaaaatttgcaagatttctctgcagttcagaagcagacatattatcctcaggatgacagtgaggatcaaatcagggagctacaggtcccacgggatgtctttccatcaactgagaatttggttggtaaacagcaccttaaaagaaaaagggtccaattttcagaagcaaatcatagtagcagaagaaccaagatcaatagaaggatcttgaataaatcaagattcagtcgatcagatagcagaacaggacagacacttgaggcaagagagtacactgataataaagaagccacatttcaaggagtagagtttctgttgactggctttcctaatcagaaggaaaaagaaattgagtccctaatacgaaaatctggtggctatgtactttctaaagtgccacccttcccacttgataaaagaaagagcatggctgagtttccaagctggaagcctcccatagtactttcccctaaaaaggtgtcaacagctaagttcttatatggctgtgctattgatgcctggatattgaatcccaattggctcttcgattctcttcaagctggtgtcatgctgccacctggaaagtaa

SEQ ID NO: 790 - protein, 852 aa, Sorghum bicolor
MSICGYHSPRFSEDIAWLPQWLQPYGTPTVGDHRNTTTAVSSPSCQNCAFVGHPSQERQDCQNATGGYSGFILHLSGDEDTVASSPVSSNVLPFSLRLSSESAAQPSLPEGSGNPQMPNSGTCKGPSKGLCADGQEQEVNAVSQNQFEANNPQAEMLTVTEVACKEISKQLDTNRHKRHDVYGGKVDVRKLRNADVNDAIELSIAASEAMVIAEMILDSQSDKSAAAAIEAALHVKEARKQFYFEEPEHACGSSEDGLDETDWLAELDESEMVDVYQDVGLSLVRIACSTQDQNPGDLKQQNSHPSCPPCDADIHILWDSSSERQNKKWNSQNADSDDHVSDSFPNNQSAGVLPNEPTPCSDSVKQAALCKTISCSRNKKTVLQASTQNNAALHGTLGALATYQNVHKEVAGVAAQTNVCIKKHVKGLFEEENSYISESISMDKCCPTSRASSMEIVASSRASVYYNAEGLLEENHHAETEELCCQVVCSSLSQVDPLCSVVPCSISCDEGPSSQAVCKQSEGHEGPSSQAPLCKKSECNEGPTCLTPERGHSKGEEKEFIHTKEFPMMQYLDGDAGPSCVSLVKPTDSNISFRRRKYSSLRPFSTVATKSNILASTSNCNADVPVCQLERFTPIILNKNVQRVQAAKKFIQYSAGAENLQDFSAVQKQTYYPQDDSEDQIRELQVPRDVFPSTENLVGKQHLKRKRVQFSEANHSSRRTKINRRILNKSRFSRSDSRTGQTLEAREYTDNKEATFQGVEFLLTGFPNQKEKEIESLIRKSGGYVLSKVPPFPLDKRKSMAEFPSWKPPIVLSPKKVSTAKFLYGCAIDAWILNPNWLFDSLQAGVMLPPGK

SEQ ID NO: 791 - DNA, 945 bp, Sorghum bicolor
atggagggctccttgtctgatctctcgagtactacaaggatcgccgtggtgaccggcgggaacaaagggatagggctggaggtgtgccggcagctggccgacagcggcgtcgccgtcgtgttgacagccagggacgagacgagaggcgcagctgccgtcgagaagctcagaggcctggggctctccaatgtcatcttccaccagctggacatcaccgacgctccgagcatcgctcggctggtcgttttcttcaagacccgtttcgggaagctggacatcctggtaaataacgccgggtttgttggccttgagtacatccaagatcatatcgatggcacttcaacgacgagcgagaagtttagcggcatggatatgaatcagagactccaactgttgatgaaatggtgcctccgggagacttgtgatgctgggaagaaatgcatgagaataaactaccacggcacgaagcaagtcatccgagcatttctgcctctgctgctgtcttctgacgatagaaggatagtcaatgtctcctcagtgcttggccagctcaggtttttcggcagcgaggctttgaagcgggagctgaacgacgtggagagcctgaccgaggagaggctggacgagttggcggccatgttcgtggaggacctggagggcggcgccgtggaggcgcgagggtggtggcctgctggtttctcgccggcgtacatggtgtccaaggcgacgctgaatgcctactcgcggatcctggcgcggaagcaccccgcgctgcgcgtcaactgcgtgcaccctggcttcgtcaagaccgacatgaccgtcaacttcggcatgctcacgccggaggaaggcgggagcagggtggtggccgtggcgctgctccccgccggtgggccgaccggcgcctacttcgaggagcgccagcagcaggcggcgttcgtgtga

SEQ ID NO: 792 - protein, 314 aa, Sorghum bicolor
MEGSLSDLSSTTRIAVVTGGNKGIGLEVCRQLADSGVAVVLTARDETRGAAAVEKLRGLGLSNVIFHQLDITDAPSIARLVVFFKTRFGKLDILVNNAGFVGLEYIQDHIDGTSTTSEKFSGMDMNQRLQLLMKWCLRETCDAGKKCMRINYHGTKQVIRAFLPLLLSSDDRRIVNVSSVLGQLRFFGSEALKRELNDVESLTEERLDELAAMFVEDLEGGAVEARGWWPAGFSPAYMVSKATLNAYSRILARKHPALRVNCVHPGFVKTDMTVNFGMLTPEEGGSRVVAVALLPAGGPTGAYFEERQQQAAFV

SEQ ID NO: 793 - DNA, 1485 bp, Sorghum bicolor
atggctatgctggttccatggttggcatggcttctagtctctctgctcgcagcatacttcctcgagctctatgcccacgctcgccggggccttccgccggggccccgcccactgcctttaatcggcaacctccacctcgtcggcgaccagccacaccgctccctcgcccgcctcgcccaactccacggcccgctcatgtcgctccgtctgggcgcggtcaccacggtggtgatctcctcaccggatgttgcgcgcgagttcctgcagaggcacgacgctgtcttcgccaatcggttcgtgccccacgccgtcggcgaccacgcggacaactccgtgccctggttgccgcactccgcccgctggcgcgccctcaggaagatcatggcaactgagctgttcgcgccgcagcgccttgacgcgctccagcacctacgccgccacaaggtggacgaactcgtcgcccatgtccggctgctggcactgcagggaagcgcggtggacgtcggccgcgtggcgttcgccacctccctgaatcttctctcccgcacagtcttctcctgcgacctgacgaacctcgacgacgaccacgccggatccagaggattccaagaggtggtgacggagatcatggaggttgccgcaagtcccaatctctcggatttgttcccagcgctggcctgggcggatctgcaaggattgcgccggaggttggcgaagctgtttgcacggctgcaccaggtgttcgacgtggagatccgccggaggttgtgcgagcgtgatgcctgcgatccccggaggaacgacttcctcgacgtgttgcttgacaccacgacctccacagcgttgggccgcgacacgctcctgtcgttattcacggatttgtttgctgcaggcagtgatacaagctccagcacggtggaatgggcattgacggagttgcttagaaacccagtctcaatggttaaaacatgcaatgagcttggagcagccattggctcggcaagaaacattgaagaatctgaaatcgaccagcttccctacttacaagctgtgataaaagagacttttcgactgcatcctcccgtaccactgttgttaccgcgacgagctgaggctaccacagaaataatgggtcacataattcctaaaggcgcacgtgtgctcgtaaatgtatgggcgatgggccgagacaaagatatttggccagagccagaaacgtttatgccagaaagatttctggagaggactactactgattttaaaggtgggaatttcgaactcataccatttggtgcagggcgtcgtatctgtcctgggatgccactggctagcaggatggtgcatctggttcttgcatcactgttaaatcagttcaaatggaggcttccgaacgagctcgaaacaaatgggattgacatggctgagaattttggtgtcactctaaaaaaggcaacgcctctttgtgctatagctacacctgtttga

SEQ ID NO: 794 - protein, 494 aa, Sorghum bicolor
MAMLVPWLAWLLVSLLAAYFLELYAHARRGLPPGPRPLPLIGNLHLVGDQPHRSLARLAQLHGPLMSLRLGAVTTVVISSPDVAREFLQRHDAVFANRFVPHAVGDHADNSVPWLPHSARWRALRKIMATELFAPQRLDALQHLRRHKVDELVAHVRLLALQGSAVDVGRVAFATSLNLLSRTVFSCDLTNLDDDHAGSRGFQEVVTEIMEVAASPNLSDLFPALAWADLQGLRRRLAKLFARLHQVFDVEIRRRLCERDACDPRRNDFLDVLLDTTTSTALGRDTLLSLFTDLFAAGSDTSSSTVEWALTELLRNPVSMVKTCNELGAAIGSARNIEESEIDQLPYLQAVIKETFRLHPPVPLLLPRRAEATTEIMGHIIPKGARVLVNVWAMGRDKDIWPEPETFMPERFLERTTTDFKGGNFELIPFGAGRRICPGMPLASRMVHLVLASLLNQFKWRLPNELETNGIDMAENFGVTLKKATPLCAIATPV

SEQ ID NO: 795 - DNA, 582 bp, Sorghum bicolor
atggccggagtccaggtgacgccggcggccgtcggcgtggcggggctgagagggtcaggggttggcagcaccaccggcttgttcgccggcgactggaggaggaaggctcgacgcccggcgtgctcggtctgggcgctcaggcggcagcagagacggagcagcagcaggagcaaggggggcggcctcgccatcgtctgcaacctcgcgggacagtacgaggattcctttgacgacgtccagcggcaactgatgaactacttcacctacaaagccgtgaggaccgtgctgacccagctatacgagttgaacccaccaagctaccgttggttctacaacttcgttgctgtcaacaaacctactgacggcaaacacttcctccgtgctctcagcaaggagaggcaggagcttgcagagcgagtgatgattactaggcttcacctatatggaaaatggatcaagaaatatgaccacgcaaacacgtacgagaagatttctgatgagaacctgacgctgatgcgagagcggctcatggagacggtcatctggccaactgatgacaccaacacagagaagatcggctga

SEQ ID NO: 796 - protein, 193 aa, Sorghum bicolor
MAGVQVTPAAVGVAGLRGSGVGSTTGLFAGDWRRKARRPACSVWALRRQQRRSSSRSKGGGLAIVCNLAGQYEDSFDDVQRQLMNYFTYKAVRTVLTQLYELNPPSYRWFYNFVAVNKPTDGKHFLRALSKERQELAERVMITRLHLYGKWIKKYDHANTYEKISDENLTLMRERLMETVIWPTDDTNTEKIG

SEQ ID NO: 797 - DNA, 606 bp, Sorghum bicolor
atggccatggccacgcaagcctccgccgccacgcgccacctgctggcggccgcctgggcgaagccacggcagctgagctcgcagctcgcgatgccgtcgtcccgcggtccggccccgctccgcgcgtccgacgacggaccggcggcggcggcggtgactgaggaggcccccaagggtttcgtgcccccgcagctggaccccaacacgccgtcgcccatcttcggcggcagcacgggcgggctgctccggaaggcgcaggtggaggagttctacgtgatcacgtggacgtccccgaaggagcaggtgttcgagatgcccacgggcggcgccgccatcatgcgggagggtccaaacctcctgaagctggcgcgcaaggagcagtgcctggcgctcggcaccaggctgcgctccaagtacaagatcaactaccagttctaccgcgtcttccccaacggcgaggtgcagtacctccaccccaaggacggcgtctacccggagaaggtcaacgccggcaggcagggcgttgggcagaacttccgcagcatcggcaagaacgtcagccccatcgaggtcaagttcaccggcaaggaatccttcgacatctaa

SEQ ID NO: 798 - protein, 201 aa, Sorghum bicolor
MAMATQASAATRHLLAAAWAKPRQLSSQLAMPSSRGPAPLRASDDGPAAAAVTEEAPKGFVPPQLDPNTPSPIFGGSTGGLLRKAQVEEFYVITWTSPKEQVFEMPTGGAAIMREGPNLLKLARKEQCLALGTRLRSKYKINYQFYRVFPNGEVQYLHPKDGVYPEKVNAGRQGVGQNFRSIGKNVSPIEVKFTGKESFDI

SEQ ID NO: 799 - DNA, 1224 bp, Sorghum bicolor
atggacacctcgcggggggtcgcgtgcctgctcgtggcggtcatctgcttgtcgtgcgccgccgccgccgccgcgaggtcgccggccgcgaggctgcaccgccacctcaagcggctcaacaaaccggccgtgaagagtatcgagagtccagacggggacatgatagactgcgtgcacatctcacatcagccagcgtttgatcacccctacctcaagaatcacacaatccagatgaggccgaactaccaccccgaaggcctgttcgacgaatccaagacctccagcagcagtggggagaggcctatggttcagctctggcatcagaatgggatgtgtcctgaaggtacagtccccatcaggagaacgaagaaggacgacctgctcagggcaagctcaatgcggcggtacggcaggaagcggcacaccaccgcgaacccaatgtccgtcaaccccaccatgctcaacgagggtggccatcagcatgccatagcgtatgttcagggagacaagtactatggcgccaaggcgactatcaatgtgtgggagcccaagatcgagcagcctaacgagttcagcttgtcccagctctggatcttggggggctcatttggggaggatctgaacagcatcgaggctggatggcaggttagtccagacctctatggggataacaacacaaggctgttcacgtactggactagtgatgcataccaggcaacagggtgctacaacatgctgtgctcagggttcattcaggttaacaaccagattgccatgggagccagcatcttcccaacctcaagctactctggttcccaatatgatatcagtatactgatctggaaggacccaaaggagggcaactggtggatgcaattcggcaaggattacgtgctcggctactggccgtcctttctcttctcgtacctggcggacagcgcttcgatgatcgagtggggtggggaggtggtgaactcgcagccagacggcgtgcacacctcgacgcagatgggcagcgggcacttcccggaggaagggttcagcaaggcgagctacttcaagaacatccaggtggtggacagcaccaacaacctcaaggcccccaaggggctgggcaccttcactgagcagtcaaactgctacgacgtgcagaacggcaacaacggcgactggggcacctacttctactacggcggccctgggaggagctccaactgccagtaa

SEQ ID NO: 800 - protein, 407 aa, Sorghum bicolor
MDTSRGVACLLVAVICLSCAAAAAARSPAARLHRHLKRLNKPAVKSIESPDGDMIDCVHISHQPAFDHPYLKNHTIQMRPNYHPEGLFDESKTSSSSGERPMVQLWHQNGMCPEGTVPIRRTKKDDLLRASSMRRYGRKRHTTANPMSVNPTMLNEGGHQHAIAYVQGDKYYGAKATINVWEPKIEQPNEFSLSQLWILGGSFGEDLNSIEAGWQVSPDLYGDNNTRLFTYWTSDAYQATGCYNMLCSGFIQVNNQIAMGASIFPTSSYSGSQYDISILIWKDPKEGNWWMQFGKDYVLGYWPSFLFSYLADSASMIEWGGEVVNSQPDGVHTSTQMGSGHFPEEGFSKASYFKNIQVVDSTNNLKAPKGLGTFTEQSNCYDVQNGNNGDWGTYFYYGGPGRSSNCQ

SEQ ID NO: 801 - DNA, 876 bp, Sorghum bicolor
atgagggacttcccttcctgcttcggcgagagcggcgtccagatcgcggacgcgtcgtcgtcgtcgtccagcgccggcaagggcgcggcgcagaacctggtgacctgcctctaccagacgcagttctcgggccggccctgcgtgatctcgctcacgtggagcaagagcctcatggggcagggcctcagcatcggcgtcgacgacctgtccggccactgcctctgcaaggcggacatcaagccgtggctcttctccaagaagaaggggtccaagagcctcgacgtcgaggacggcaagatcgacatcttctgggacctgtcgggcgccaagttcggtgccgggccagaaccggtggaggggttctatgttgcggtggtgttcgaccttgagctcgtgctcttgctgggggacatgaagaaggatgcgtacaggaagactggagccaaccgatcgatgctgaatgccgcgttcgtggcgaggaaggagcacatatatggcaagaagatctactctgccaaggcgcaattctgcaacaatggccagttccatgacattgccatagagtgcgataccgtcggcttgaaggatccatgtcttgaaataagagttgataagaagcccgtgatgcaggtgaagcgcctggcgtggaagtttaggggaaatcagacaattctcgttgatggcttgcctgtggaggtgttctgggatgttcacagttggctctttggatcaacgacgagcaatgcggtgttcatgtttcagacatgccaggcacctgagaagtcgctgccatggtcctactcgcagatttttagggagtcccagttgcaaggtcttggtttctcgctgatcctgcatgcgtggaaggttgaatag

SEQ ID NO: 802 - protein, 291 aa, Sorghum bicolor
MRDFPSCFGESGVQIADASSSSSSAGKGAAQNLVTCLYQTQFSGRPCVISLTWSKSLMGQGLSIGVDDLSGHCLCKADIKPWLFSKKKGSKSLDVEDGKIDIFWDLSGAKFGAGPEPVEGFYVAVVFDLELVLLLGDMKKDAYRKTGANRSMLNAAFVARKEHIYGKKIYSAKAQFCNNGQFHDIAIECDTVGLKDPCLEIRVDKKPVMQVKRLAWKFRGNQTILVDGLPVEVFWDVHSWLFGSTTSNAVFMFQTCQAPEKSLPWSYSQIFRESQLQGLGFSLILHAWKVE

SEQ ID NO: 803 - DNA, 1212 bp, Sorghum bicolor
atgggggcgctgtcgcggccggaggaggtgctggcgctggtgaagctgcgggtggcggcggggcagatcaagcgccagatcccgcccgaggagcactgggccttcggctactccatgctccagaaggtctcccgcagcttcgccctcgtcatccagcagctcccaccccaactccgcaatgccgtgtgcatcttctacctcgtgctccgtgccctcgacaccgttgaggatgacactagcatcccgacggaggtgaaggtgcccatcctccaggaattctaccggcacatctacaaccgcgactggcatttttcgtgtggaacaaatcactacagagtgctgatggataactttcaccacgtatccactgccttcctggagcttggtcaaggttaccaaaaggcaatagaagaaatcactaggcgaatgggagcaggaatggcaaaatttatatgcaaggaggtcgaaactgttgatgactatgacgagtattgtcactatgtggccgggctagttggttatggactttccagactcttttatgctactgggacggaagatcttgctccagattcactgtcaaattcaatgggtctatttttacagaaaactaatataatcagggactatttggaggacataaatgagataccaaggtcccgcatgttctggcctcgagagatatggagtaaatatgcagataaacttgaggatttcaaatatgaggaaaattctgaaaaggcggtacagtgcttgaatgatctggtgactaatgcattgattcatgctgaagagtgccttcaatacatgtcagctttgaagggtcatgccattttccgtttttgtgcaataccccagataatggcaattggaacatgtgctctttgctacaataatgtgcatgtcttcagaggagttgtcaagatgagacgtggtctcacggctcgaataattgatgagacaaactcaatggcagacgtctatacttctttctatgagttttcttcattgatagagtcaaagatagatgacaatgatccaaatgctgctctaacacggagacgtgtggattcaataaagcaaacttgcaagtcatctggtttggtaaagaggagggggtaccacttggacaagtcaccttataggcctatgctgatcatgattgtcctcctgctggtggctattcttttcggggtactgtataccaagtga

SEQ ID NO: 804 - protein, 403 aa, Sorghum bicolor
MGALSRPEEVLALVKLRVAAGQIKRQIPPEEHWAFGYSMLQKVSRSFALVIQQLPPQLRNAVCIFYLVLRALDTVEDDTSIPTEVKVPILQEFYRHIYNRDWHFSCGTNHYRVLMDNFHHVSTAFLELGQGYQKAIEEITRRMGAGMAKFICKEVETVDDYDEYCHYVAGLVGYGLSRLFYATGTEDLAPDSLSNSMGLFLQKTNIIRDYLEDINEIPRSRMFWPREIWSKYADKLEDFKYEENSEKAVQCLNDLVTNALIHAEECLQYMSALKGHAIFRFCAIPQIMAIGTCALCYNNVHVFRGVVKMRRGLTARIIDETNSMADVYTSFYEFSSLIESKIDDNDPNAALTRRRVDSIKQTCKSSGLVKRRGYHLDKSPYRPMLIMIVLLLVAILFGVLYTK

SEQ ID NO: 805 - DNA, 1119 bp, Sorghum bicolor
atggcggggaacggcggcgagggtgcggtcgggaaggtggcctgcgcggcgtggatacggcggcgggacgatgacggctggccacccggcctctcccgcctcctcgtggcgttcgcccgcggggccacggcctcgtccccgccgctcgtcgacgtcctcgagttcgacgccaaggcatccgcactcgccgcctacgagtccgagcccctggcgagggtcaccgtgggcgaggacgcagcggacgcgccgcgcgcgatcgccgtgcaccctggcggccgggagctcgtttgtgcaaccgccaaaggctgcagggtgtttaatcttgtttataaagacttcggtattcaccttatttcaagagatgcttcacctctccaatgtgttgggcctcaaaaatgtttagcattcagcactgatggtgctaagtttgctgttggtggtgaggatgggcgtctcagaatatttcattggccaagtctcaatgtgattttggacgaacctaaagctcacaaatccttctgtgacatggacatcagcttagactcaaagtttttagtttcatcatccattgatggctctgcaagaatatggaacattgatgagggggctccactaatcaatttgacaagatctttggatgagaagattgagtattgccgcttttctagggatggagccaaacctttcctgttttgcacacttgtaaaaggtcatgacgtttggactatggccgtggacataagtaattggaagagaatcggttacaaaagattttcagcaaagcccatttccacactcgcaattagcttggatgggaaatatcttgcactaggaaatcgtgatggtgacttttgcgccgtggaaataaagaagatggaggttgctcactggagcaagaaggttcatcttggcttcccagtttcctccattgaattttgtcctactgaaagggtagtaatctccacctcacatcaatggggagcagagataacaaaacttgacgtccctcccgaatggaaagtgtggcagatctggctggtgctcctgagcctcttcgtgtcgtcggccatcctcttctacgtctttttcaagcacgcaaggatcaacctggggccatag

SEQ ID NO: 806 - protein, 372 aa, Sorghum bicolor
MAGNGGEGAVGKVACAAWIRRRDDDGWPPGLSRLLVAFARGATASSPPLVDVLEFDAKASALAAYESEPLARVTVGEDAADAPRAIAVHPGGRELVCATAKGCRVFNLVYKDFGIHLISRDASPLQCVGPQKCLAFSTDGAKFAVGGEDGRLRIFHWPSLNVILDEPKAHKSFCDMDISLDSKFLVSSSIDGSARIWNIDEGAPLINLTRSLDEKIEYCRFSRDGAKPFLFCTLVKGHDVWTMAVDISNWKRIGYKRFSAKPISTLAISLDGKYLALGNRDGDFCAVEIKKMEVAHWSKKVHLGFPVSSIEFCPTERVVISTSHQWGAEITKLDVPPEWKVWQIWLVLLSLFVSSAILFYVFFKHARINLGP

SEQ ID NO: 807 - DNA, 330 bp, Sorghum bicolor
atgaggaggaagggggcgccgatcggcagccggtacggccgcgtgtgcgaggagttgctggacatgggcgcccggatcgcggcgcgctcctactcgcactgcccccagacggggcgcatgtactacaagcccccctcggctccggcctccgccagcagcagcgggaacgacggggcctccgccggaggggccgacgcgtcgtccgtggcggcgaccagctggaagcaacaggcggcgcccgaggtggagttccacgcctcagagttcatcttgtacggcgacggcggcggtggcggtggcaagaaagaagcgacactctgttcgagatga

SEQ ID NO: 808 - protein, 109 aa, Sorghum bicolor
MRRKGAPIGSRYGRVCEELLDMGARIAARSYSHCPQTGRMYYKPPSAPASASSSGNDGASAGGADASSVAATSWKQQAAPEVEFHASEFILYGDGGGGGGKKEATLCSR

SEQ ID NO: 809 - DNA, 885 bp, Sorghum bicolor
atgaaagccatggaggtagtggcgccggcggtgctggtgtcgccaccttgtgccagcaacgtgacactgacgccggccccggccaagaagtttgacaggagcatgttcctcgagacgtcgctgctagagttaaacaactcttgcagcgtgcctccatcttcgtcgccggccatggcggtgcagaagagcagcccgaaagtcgccgcgcccaatccgtgcaccagcaccccccacatccagttgcagcccaccacccagttccagccaccgccacagcagcaggcggcgaagaagcagaagagcttccagttcgaccagacgccgagcggcgagcagttccacatcgaggtccctgtgccgctgccccgtggcgccgcccccgccgcgaaggaggtgatcagcttcagcttcgacaacaactcggtgtgcacgtcgtcggcggccacgtccttcttcacgtccatcagcagtcagctgatcagcatgtccgacgccgcgacgagctccgccgccaggcccgccacggcgaagaagatgtgcggcaagggagtggaggacggcggcggcggcgtcagatgccattgcccgaagaagaagaagccgagggagaagagggtggtgagggtgccggcgatcagcgacaagaacgccgacatcccggcggacaactactcttggaggaagtatgggcagaaacccatcaaaggctctcctcacccaaggggatactacaggtgcagcagcaagaaggactgcccggcgaggaagcacgtggagcggtgccgcagcgacgccgccatgctgatcgtcacctacgagaacgaccacaaccacgcgcagccgctcgacccctccgtgctcaccgccgccaacgcggaaccttga

SEQ ID NO: 810 - protein, 294 aa, Sorghum bicolor
MKAMEVVAPAVLVSPPCASNVTLTPAPAKKFDRSMFLETSLLELNNSCSVPPSSSPAMAVQKSSPKVAAPNPCTSTPHIQLQPTTQFQPPPQQQAAKKQKSFQFDQTPSGEQFHIEVPVPLPRGAAPAAKEVISFSFDNNSVCTSSAATSFFTSISSQLISMSDAATSSAARPATAKKMCGKGVEDGGGGVRCHCPKKKKPREKRVVRVPAISDKNADIPADNYSWRKYGQKPIKGSPHPRGYYRCSSKKDCPARKHVERCRSDAAMLIVTYENDHNHAQPLDPSVLTAANAEP

SEQ ID NO: 811 - DNA, 561 bp, Sorghum bicolor
atggagatgatcgacgcggagctgcgtcttggtccgcctgggagcaacagcgacgtcgtcgtcaccgtcgtgcagccgacgaggacgccggcgtcggcggcggcgaaacggcggccggagtcgtcggtggtgaagagcgaggcgtccgggacggacgaccatgacgacgcggcaccggcctccaaggtgcaggtggtggggtggccgccggtgagagcgtaccggaagaacgcgttccacgcggcggcggaggcgaggagggcgacaaagggcggcgagcagcaaggatctggcctgtacgtgaaggtgagcatggacggggcgccctacctccggaaggtcgacctgcggacctacggcggctaccgggagctgagagacgcgctggacacgctcttcggttgcttctcctcctctgccgccgccgacggcggctgccagttcgccatcgcctacgaggacaaggacggcgacctcatgctcgccggcgacgtgccctgggagatgttcatctgttcttgcaagaagctgaggatcatgagggggtccgaagcaagataa

SEQ ID NO: 812 - protein, 186 aa, Sorghum bicolor
MEMIDAELRLGPPGSNSDVVVTVVQPTRTPASAAAKRRPESSVVKSEASGTDDHDDAAPASKVQVVGWPPVRAYRKNAFHAAAEARRATKGGEQQGSGLYVKVSMDGAPYLRKVDLRTYGGYRELRDALDTLFGCFSSSAAADGGCQFAIAYEDKDGDLMLAGDVPWEMFICSCKKLRIMRGSEAR

SEQ ID NO: 813 - DNA, 468 bp, Sorghum bicolor
atgatggcgtgggcgtcggacccgcaggtggccgccccgtgccggtgggacgcctacgagtcgacggagccgctgctggccttcattcgcgacaccgtgctcccgcacccgtggttccgcgccatctgcctcgagtccggctccggccgccccgtcggcgcggtgtccgtgtcgccgacgggggacccgtgccgcgccgagctgggctacgtgctggcgcgcgcgcactggggccggggcgtcgccacggccgccgtgaagcgcgcggtggccacggtgttcgccgaggtgcagggactggagcgcgtggaggcgctcgtcgacgtcgccaacccggcgtcgcagcgcgtgctggagaaggccgggttccgccgcgagggcgtgctgcggcggcactactggcacaagggacgcgccagggacatggtcatgtacagcttcctctccgacgacaccctccccgagtga

SEQ ID NO: 814 - protein, 155 aa, Sorghum bicolor
MMAWASDPQVAAPCRWDAYESTEPLLAFIRDTVLPHPWFRAICLESGSGRPVGAVSVSPTGDPCRAELGYVLARAHWGRGVATAAVKRAVATVFAEVQGLERVEALVDVANPASQRVLEKAGFRREGVLRRHYWHKGRARDMVMYSFLSDDTLPE

SEQ ID NO: 815 - DNA, 597 bp, Sorghum bicolor
atgatgagccggcgtgacaggatgcagccgccgccggcggtgaccgcggtgctgctgctgcttctgcttctggccgccgcgccggcgacggggcagattgcgacgtcgtgcacggcgtcgctgataacgacgttcacgccgtgcctcaacttcgtgacggggagcaccaacggcggcggctcgccgacgcagcagtgctgcggctcgctggctgagatggtgcgcacgggcgccgactgcgcctgcctcatcctcaccggcaacgtgcccttcagcctccccatcaaccgcacgctcgccatctccctccccaagctctgcagctccacctccgtcccgctccagtgccgagacacggcgacgcaaatcccagctccaggacctgtcgcgttcgctcccgcgctgcctccactgccaccgattccaccggaatcgtcagactctccggtggatcctacggcgacgtctccggcggtggactcgccgcccttctcccagaggccagtggtgctgcccagctcgtcagttaggagttctcacgcgtccgtggcggctgtcaccattgtactgtcgatagtggcgaccattttcgtctga

SEQ ID NO: 816 - protein, 198 aa, Sorghum bicolor
MMSRRDRMQPPPAVTAVLLLLLLLAAAPATGQIATSCTASLITTFTPCLNFVTGSTNGGGSPTQQCCGSLAEMVRTGADCACLILTGNVPFSLPINRTLAISLPKLCSSTSVPLQCRDTATQIPAPGPVAFAPALPPLPPIPPESSDSPVDPTATSPAVDSPPFSQRPVVLPSSSVRSSHASVAAVTIVLSIVATIFV

SEQ ID NO: 817 - DNA, 4047 bp, Sorghum bicolor
atggggaaggcggcggcggcggtggtgctggccgtgaacggcaagcggtacgaggccgccggcgcggacccgtcgacgacgctgctggagttcctgcgcacacagacgcccgtcaggggccccaagctcggctgcggcgaaggtggctgtggtgcatgtgttgtcctcgtctccaagtacgacccgttcaccgacgaggtgaccgagttctcagcgagctcctgcctgacgctgctccatagcgtggaccgctgctcggtgaccaccagtgagggcattggcaacaccaaggatggttaccaccctgtgcagcagcgcctctccggcttccatgcctcccagtgcggcttctgcacgcctggcatgtgcatgtccatcttctctgcgcttgtcaaagccgataaggcagctgatcgaccagccccgcctgacggcttctccaagctcacttcctcggaggcggagaaggctgtctccggcaacctgtgccggtgcactgggtacaggcccatcgtcgacgcttgcaagagcttcgcagccgatgttgatcttgaggacctgggcctcaactgcttctggaagaagggtgatgagcctgcagatgtcagcaaactgccaggttacaacagtggtgccgtctgcactttccctgagtttctcaaatctgagataaagtcctcgattgagcaggttaacagtgctgcagttcctgtttctgacgatggctggtaccgtcctaagagcattgacgagcttcacagactgtttcaatctgactcattcgatgaaaattctgtgaagatagtagcttcaaacactgggtctggggtgtataaggatcaagacctttatgacaagtacattgacatcaaagagatcccagagctttcagtcatcaacagaagcagcaagggggttgagcttggatcagttgtctccatctctaaagcaattgaggtgctatcagatggaaatgtggttttcaaaaagattgcagatcacctgaccaaagtggcctctccatttgttcggaacacagcaaccataggtggaaacatcattatggcgcaacgattgcaatttccatccgacattgtgactgtactactagctgcaagtacaacagtcactatccaggtggcttccaaaacgcattgcctcgccttggaggaattcttgcagcagcctccatgtgattctaggaccctgctgctgagcatatttatccccgattggagttcagatggcatcacctttgagaccttccgagcagcacctcgtccacttggcaatgctgtctcatatgtcaattcagctttcttggcaaggacttcagtggatgcaggatcaagggaccatctcattgaggatatatgtctggcgttcggtgcgtatggagctgatcatgctattagagctaggaaggttgaggattacctgaagggcaaaacagtgagctcgtctgttatacttgaagctgttcggttgcttaaagggactgttaaaccatcagaaggaacaacacatcctgagtatagaatcagcttggctgtcagtttcttgtttaccttcctatcttcccttggcaacagcttgaatgaatcagaaaaggttaatggtcccaaccagcactcattggagaagcatcttaagtttgacagcaatgatttgccaatacgatcgagacaagaaatgtttttgactgatgagtacaagccagttggcaagccaattaagaaagcaggggcagagatccaagcttcaggggaagctgtgtacgttgatgatatccctgctcccaaagattgcctctatggagcatttatctatagcacccaccctcatgcccatgtaaaggctatcaactttaaatcatctttggcttcacagaaggtcattaccgttatcaccgcaaaggatattccaagcggtggacaaaatattggttcaagcttcccagggatgggagaagaagcactttttgcagatccagttgctgaatttgctggtcaaaatattggtgtcgtgattgctgaaacacagaagtatgcctacatggcagcaaagcaagccgttattgagtatagcacagaaaatctgcagccaccaattctgacaatagaagatgcaatccaacgaaacagctacttccaaacccccccatttttagctcctacgccagttggtgattacaaccaagggatgtctgaagctgatcacaagattctatcagcggaggtaaaactggaatcccaatattatttctacatggagacacaagtggcgctagctattcctgatgaagataactgcataaccatctattgttcaacacaaattcctgaggtcacgcaaaatgtggttgcaaagtgccttggcattccatttcacaatgtccgcctcatcaccagaagagttggaggaggctttggtggaaaggcaatgaaagcaatacatgttgcatgtgcatgtgcggttgccgcattcaagctacagcgtccagttcggatgtaccttgatcgcaagacagacatgataatggcaggcggtcgacatcctatgaaggtgaagtactctgttgggttcaagtcagatggcaagatcacagccttgcacattgatcttgggatcaatgctggaatatcgcctgatgtgagcccaatgatgccacttgctatcataggttctctcaaaaagtacaactggggcaatcttgcatttgacaccaaggtctgcaaaacaaatgtctcatcaaaatcagcaatgagggggcctggagatgtgcagggctctttcatcgctgaagccatcattgagcatgttgcctcggcactttcagttgacactaacaccataaggaggaagaaccttcatgacttcgagagccttgtggtgttctacggagataccgcaggtgaagcttctacctacagcctagttaccatgtttgataagctggcctcctctccagaataccagcgccgagctgaaatggtggagcacttcaatagaagcaacaagtggaagaagcgtggcatttcttgtgtgccaattacatatgaggttaggcttcggccaactccaggcaaggtgtctatcatgaatgatggttccattgctgttgaggtcggaggggttgagataggccaagggttgtggacaaaagtgcagcagatgacagcatttggattgggagagctgtgtcctgacggtggtgaaagcctactagacaaggttcgcgtcattcaggccgatacattgagcatgatccagggagggttcaccggtgggagcaccacttctgaaactagctgtgaagcggttcgacagtcatgtgttgcactagtcgagagactaaagccaatcaaggagaatctggaggctaaggctggcacagtggaatggagtgccttgattgctcaggcaagtatggcgagtgtgaacttatcagcacatgcatactggacccctgatccaactttcacaagctatttgaactacggagctggcattagtgaggtggaaattgatgtcctgacaggagccacaacaattctaaggagtgaccttgtctacgattgcgggcaaagcttgaaccctgctgtcgatttgggccaggtggaaggtgcattcatccaaggagtaggcttcttcacaaacgaggactacgcaaccaactctgacgggttggttatccacgatggtacatggacatacaagatccccacggtcgacaccatcccaaagcagttcaatgttgagctgatcaacagcgcccatgaccagaagcgtgtcctctcttccaaagcatcgggcgagcctccgcttcttctagcttcctcagttcactgtgcaatgagggaggccatcagggccgccaggaaggaattctcggtttgcactggtccagcaaactccaccatcacgttccagatggacgtgccggcgacgatgcctatcatcaaggagctctgcggcctggatgtcgtcgagaggtacctggagagcatgtccgctgccagcccaacagccactgctcaagcatag

SEQ ID NO: 818 - protein, 1348 aa, Sorghum bicolor
MGKAAAAVVLAVNGKRYEAAGADPSTTLLEFLRTQTPVRGPKLGCGEGGCGACVVLVSKYDPFTDEVTEFSASSCLTLLHSVDRCSVTTSEGIGNTKDGYHPVQQRLSGFHASQCGFCTPGMCMSIFSALVKADKAADRPAPPDGFSKLTSSEAEKAVSGNLCRCTGYRPIVDACKSFAADVDLEDLGLNCFWKKGDEPADVSKLPGYNSGAVCTFPEFLKSEIKSSIEQVNSAAVPVSDDGWYRPKSIDELHRLFQSDSFDENSVKIVASNTGSGVYKDQDLYDKYIDIKEIPELSVINRSSKGVELGSVVSISKAIEVLSDGNVVFKKIADHLTKVASPFVRNTATIGGNIIMAQRLQFPSDIVTVLLAASTTVTIQVASKTHCLALEEFLQQPPCDSRTLLLSIFIPDWSSDGITFETFRAAPRPLGNAVSYVNSAFLARTSVDAGSRDHLIEDICLAFGAYGADHAIRARKVEDYLKGKTVSSSVILEAVRLLKGTVKPSEGTTHPEYRISLAVSFLFTFLSSLGNSLNESEKVNGPNQHSLEKHLKFDSNDLPIRSRQEMFLTDEYKPVGKPIKKAGAEIQASGEAVYVDDIPAPKDCLYGAFIYSTHPHAHVKAINFKSSLASQKVITVITAKDIPSGGQNIGSSFPGMGEEALFADPVAEFAGQNIGVVIAETQKYAYMAAKQAVIEYSTENLQPPILTIEDAIQRNSYFQTPPFLAPTPVGDYNQGMSEADHKILSAEVKLESQYYFYMETQVALAIPDEDNCITIYCSTQIPEVTQNVVAKCLGIPFHNVRLITRRVGGGFGGKAMKAIHVACACAVAAFKLQRPVRMYLDRKTDMIMAGGRHPMKVKYSVGFKSDGKITALHIDLGINAGISPDVSPMMPLAIIGSLKKYNWGNLAFDTKVCKTNVSSKSAMRGPGDVQGSFIAEAIIEHVASALSVDTNTIRRKNLHDFESLVVFYGDTAGEASTYSLVTMFDKLASSPEYQRRAEMVEHFNRSNKWKKRGISCVPITYEVRLRPTPGKVSIMNDGSIAVEVGGVEIGQGLWTKVQQMTAFGLGELCPDGGESLLDKVRVIQADTLSMIQGGFTGGSTTSETSCEAVRQSCVALVERLKPIKENLEAKAGTVEWSALIAQASMASVNLSAHAYWTPDPTFTSYLNYGAGISEVEIDVLTGATTILRSDLVYDCGQSLNPAVDLGQVEGAFIQGVGFFTNEDYATNSDGLVIHDGTWTYKIPTVDTIPKQFNVELINSAHDQKRVLSSKASGEPPLLLASSVHCAMREAIRAARKEFSVCTGPANSTITFQMDVPATMPIIKELCGLDVVERYLESMSAASPTATAQA

SEQ ID NO: 819 - DNA, 411 bp, Sorghum bicolor
atggttgtgacctgcgcactcctcatgaccagccgcgacacctgccacgcggcgcgccacttggccgacacgaccgccgcggccgcggctcccgctgctgctgctgctgccgtcccgggcctccccgccgtgccgaccatgccacaggcggcgctgccacccatgccggccgtgcccgcagtcaccgttccacaggtgacgctgccacccatgccaccggctcccaaggtgaccgtggcgctgccgccaatccccgccgtcccttcgtccgtgctgcccaagctgaccctgccaccgatgcccgccgccgtcgttccgtccgtcggccccaaggtggccttgccgccgatgccgtctgtcccagccgtgaacgtgcccatgccgttcgcggcgccgccaccgtcggcgtag

SEQ ID NO: 820 - protein, 136 aa, Sorghum bicolor
MVVTCALLMTSRDTCHAARHLADTTAAAAAPAAAAAAVPGLPAVPTMPQAALPPMPAVPAVTVPQVTLPPMPPAPKVTVALPPIPAVPSSVLPKLTLPPMPAAVVPSVGPKVALPPMPSVPAVNVPMPFAAPPPSA

SEQ ID NO: 821 - DNA, 411 bp, Sorghum bicolor; identical to SEQ ID NO: 819

SEQ ID NO: 822 - protein, 136 aa, Sorghum bicolor; identical to SEQ ID NO: 820

SEQ ID NO: 823 - DNA, 504 bp, Sorghum bicolor
atgtcggaacgttctgagagtgcaactgaaaagattatgagcagcatcatggataccattgctgacaaccttcctaagcagaagtctgggcactttgacccaggttcagtctctgacaaagtgaagaacaagctgtttggtcgtcagaagaccttacatggagttctgggtggtggaaaacctgctgatgtgctgttatggaggaacaagaagatatcatcgagtgttctggctcttgcaacagctatttgggttttctttgagtggcttgactaccactttctgacaattgtttcgtttgcccttgttcttggaatggttgtccagtttatctggtccaacttctcaaacatgctaagcggatctccttctcaggtgccccgagttgaattgcctgaagagttatttgtgaacattgccattgcaatcggtgcccaagtaaacaagttcatgtgcttccttcaggatgtgtcttgtgaaagaaacttgaagcattttgtagtg

SEQ ID NO: 824 - protein, 247 aa, Sorghum bicolor
MSERSESATEKIMSSIMDTIADNLPKQKSGHFDPGSVSDKVKNKLFGRQKTLHGVLGGGKPADVLLWRNKKISSSVLALATAIWVFFEWLDYHFLTIVSFALVLGMVVQFIWSNFSNMLSGSPSQVPRVELPEELFVNIAIAIGAQVNKFMCFLQDVSCERNLKHFVVAIAGLWAAAVIGSWCNFLTVIYIGFVCVHTLPVLYEKYEDQVDDFLYNLLGLLRDQYQKLDQGVLSKIPKGNMKAKKNE

SEQ ID NO: 825 - DNA, 1296 bp, Sorghum bicolor
atgacgacagtgtcgcgcgcgctcggctcagcgttcgcgggcttcacgcgggcacccgcggcggcgcagactgcgacgaccctgccctccccgtgcggctcgtcggcgctactccagcactggcgctggagccgggctagccgcgcccggcggttctcgtccggccgctcggcacggataagcatgagcctccgcgccggcatcgtcgggcttcccaacgtcggcaagtccactctcttcaacgccattgttgaaaacggaaaggcacaagctgcaaactttcccttttgcaccatcaacccaaatgttggtgtggtggctatccctgatcctcgtttgcaggtgctctcaaaattaagcaagtcacagcagacggtcccaacatccattgagcttgtggacattgcaggtctcgtcaaaggagcaagcaaaggagagggactaggaaatcaattcctttcaaacatccgtgaagtggattccatacttcaggttgtgcgatgctttgaggatgacgatatagttcatgtcaatggcaaggtcgatcccagatcagacatcgatgtcattaacctagagctgatattttcggatcttgaacagatagagaagaggctagataagcttaacaagagcaaaactaaagatgcgcaagtaaaagcgaaggaacaagcagagaaatcaggattggaaaaaattcagcaggcacttatggaaggaaaacctgcaagatcggttgatttagctgagcatgagaaggaagctatacaacatctttgtctgctaaccatgaaacctgtcatttatgttgctaatgtaacagaatctgatcttgctgaacctgatagcaatcctcatgtcaaagaggtggctaaagcagcatcagacttgcagtctggtatggttacaatatcagctcaggttgaagctgaactcgctgagctacctttggaagagagagtagaatatttaaaatctcttggtgttgctgaaagtggactaggaaatttagtaaaagcaacatataatctattgggattaagaacttatttcacaaccggagagaaggaaacaaaagcatggactattctttcaggcatgactgcaccacaggcagctggagttattcatagtgactttcagaaaggattcatcagagctgaaactgtatcctatgatgattttgttgcagctggttctcttggagtagcaagggagaaagggctgttgaggttggaagggaaggattatgttgtgcaggaaggagatgtcatgcttttcagattcaatgtgtga

SEQ ID NO: 826 - protein, 431 aa, Sorghum bicolor
MTTVSRALGSAFAGFTRAPAAAQTATTLPSPCGSSALLQHWRWSRASRARRFSSGRSARISMSLRAGIVGLPNVGKSTLFNAIVENGKAQAANFPFCTINPNVGVVAIPDPRLQVLSKLSKSQQTVPTSIELVDIAGLVKGASKGEGLGNQFLSNIREVDSILQVVRCFEDDDIVHVNGKVDPRSDIDVINLELIFSDLEQIEKRLDKLNKSKTKDAQVKAKEQAEKSGLEKIQQALMEGKPARSVDLAEHEKEAIQHLCLLTMKPVIYVANVTESDLAEPDSNPHVKEVAKAASDLQSGMVTISAQVEAELAELPLEERVEYLKSLGVAESGLGNLVKATYNLLGLRTYFTTGEKETKAWTILSGMTAPQAAGVIHSDFQKGFIRAETVSYDDFVAAGSLGVAREKGLLRLEGKDYVVQEGDVMLFRFNV

SEQ ID NO: 827 - DNA, 282 bp, Sorghum bicolor
atggggaagagtgtgtcagtgcagcgagggcacatcccggtgctcgtcggtgagggggaggaggggctgaagagggttctggtgcacaggaaggttcttcagcacccctacttcaccgggctgctggagctcgcggccatggagtttgggcatgatcagaagggcgtgctcaggatcccctgtgacatcagatgcttccacacgattgttcagctcattagaagcagaaagcggaggaagaaggtgacgatctcatgcctccttttcctcaagctgatgtag

SEQ ID NO: 828 - protein, 93 aa, Sorghum bicolor
MGKSVSVQRGHIPVLVGEGEEGLKRVLVHRKVLQHPYFTGLLELAAMEFGHDQKGVLRIPCDIRCFHTIVQLIRSRKRRKKVTISCLLFLKLM

SEQ ID NO: 829 - DNA, 228 bp, Sorghum bicolor
atggggttcgtgctggtggtctccctgcctttcatcttcctctccatcctgcttggcttcggctgctacttcctcggcaagcacaggggccgggaggagatgcggaccggcgtcggcgcgcagatctacggcacgccgctgccgccgccgggcgtcgtcggagtctcctcgccgccgcctggggctgagccgttccacgccaagaaacaggggcccgaggccgtctga

SEQ ID NO: 830 - protein, 75 aa, Sorghum bicolor
MGFVLVVSLPFIFLSILLGFGCYFLGKHRGREEMRTGVGAQIYGTPLPPPGVVGVSSPPPGAEPFHAKKQGPEAV

SEQ ID NO: 831 - DNA, 1113 bp, Sorghum bicolor
atggttgccaaggagtttggaagagaagcagtaataagcatggagaaagttaagagagacggagaggcgctcatcgctgccagagccggagacgaagaggaagatgatgtggtgctcccggggttccggttccacccgaccgacgaggagctcgtcacgttctacctccgccggaaggtggcgaggaagccgctcagcatggagatcatcaaggagatggacatctacaagcatgatccatgggacctccctaaggcaagcacggttggtggagagaaggaatggtacttcttctgtctgagaggaaggaagtaccggaacagcatcaggcccaacagggtcaccggctccggcttctggaaggccaccggcatcgaccgcccgatctactctgccgctgccgctggtgccgccactgcaaactccggcgagtccatcgggctcaagaagtccctcgtgtactaccgcggcagcgccggcaagggcaccaagaccgactggatgatgcacgagttccgcctcccgccggccgccgccgccgccaccgatgcctcccagagcatgcaagaagctgaggtgtggaccatctgcaggatcttcaagaggaacatcgcctacaagaggcagccgcagcagcaccagcagcaggcgtggcggcagcagccggcgggcagcaacggtccgccgccgctgctggcagagtccagctccaacaccgggagcttcgagtccgacggcggtggcgacgagtacatgaactgcctggcagtgccggccaccgctccgggcgtgccccggcagcatcagatcggcagcatactgaacggaggaggtgtcagtgtcactggcagcagcttcttcagagagagcgtgcatggccagcagttccagggtcaatggctgaaccgcttccctgcgccagcagcaatagagcagaaaccgcagctcctggactcgtcagcgatgaccattgcgttccatcagaacgatcagagcgtcgctgccgccgccatgacgaatgatcagtgctacaaggacgggtactgggacgagattgcaaagttcatggaggtcaatgatccaacagtactttacgactgtagatacgcttga

SEQ ID NO: 832 - protein, 370 aa, Sorghum bicolor
MVAKEFGREAVISMEKVKRDGEALIAARAGDEEEDDVVLPGFRFHPTDEELVTFYLRRKVARKPLSMEIIKEMDIYKHDPWDLPKASTVGGEKEWYFFCLRGRKYRNSIRPNRVTGSGFWKATGIDRPIYSAAAAGAATANSGESIGLKKSLVYYRGSAGKGTKTDWMMHEFRLPPAAAAATDASQSMQEAEVWTICRIFKRNIAYKRQPQQHQQQAWRQQPAGSNGPPPLLAESSSNTGSFESDGGGDEYMNCLAVPATAPGVPRQHQIGSILNGGGVSVTGSSFFRESVHGQQFQGQWLNRFPAPAAIEQKPQLLDSSAMTIAFHQNDQSVAAAAMTNDQCYKDGYWDEIAKFMEVNDPTVLYDCRYA

SEQ ID NO: 833 - DNA, 1704 bp, Sorghum bicolor
atggcgtcgccggcgctaatctccgacacggagcagtggaaggccctccaggcgcatgtcggcgcgattcagaagacgcacctgcgggacctgatggccgacgccgatcgatgcaaggcaatgacggctgagtatgaagggatctttctggattactcgaggcagcaggcgactggtgaaaccatcgagaagctgcttaaattggctgaggttgccaagctcaaggagaagattgagaagatgtttaaaggtgaaaagataaatagcacggagaacaggtcagtgcttcatgtagctctgagggctccaagagatgcagttataaacagtgatggggtgaatgtggtccctgaggtttggtctgttaaagataaaatcaaggagttttcggacactttcagaagtggatcatgggttggagcaactggaaaaccattgaccaatgttgtgtcagttggaataggtggtagctttcttggccctctatttgtgcatactgcgctccagactgatccagaagcagcagaatgtgcgaaaggccgacaactgagattccttgcaaatgttgatccagttgatgttgcacgaagcattaaagatttagatccagaaaccactctggtggtggttgtatcaaagacattcacaacagctgaaacaatgttaaatgctcgaactcttaaggagtggatcgtttcttctcttgggccacaggctgttgcaaaacatatgattgctgtcagtactaatcttaagcttgtgaaggagtttggaattgacccaaacaatgcttttgccttttgggactgggttggtggccgttatagtgtttgcagtgctgttggtgttctgccattatctcttcagtatggttttccaattgtccagaaatttttggagggagcttccagcattgacaaccacttcaactcatcttcatttgagaaaaatatacctgtactccttggtttgttgagtgtgtggaatgtttcatttcttggttatccagctagagcaatattgccatattcccaggcacttgagaaattggcaccacatatacaacagcttagcatggagagcaacgggaagggtgtttccattgatggcattccactccccttcgagacgggtgaaattgattttggtgaacctggaactaatggccagcacagcttctatcaattaatccatcagggaagggtcatcccttgcgattttattggtgttgttaaaagtcagcagcctgtttacttgaaaggggaaactgtgagtaatcatgatgagcttatgtccaatttctttgcccagcctgatgcacttgcttatggaaagactcctgaacaattgcacagtgagaaagttccggaaaatcttatccctcataagacttttaagggcaaccggccatcactaagtttgcttttgcctacactatccgcatatgaggttggacagcttttatccatctatgagcaccgggttgcagttcagggcttcatatggggaattaactcgtttgatcagtggggagtggagctagggaagtcgcttgcttcccaagtgaggaaacagctgcatgaatcccgaatggaaggaaagcctgttgatggctttaaccacagtacttcaagtttgcttgcacgatatcttgctgtcaagccacccactccatatgacactaccgtgctaccgaaggtgtaa

SEQ ID NO: 834 - protein, 567 aa, Sorghum bicolor
MASPALISDTEQWKALQAHVGAIQKTHLRDLMADADRCKAMTAEYEGIFLDYSRQQATGETIEKLLKLAEVAKLKEKIEKMFKGEKINSTENRSVLHVALRAPRDAVINSDGVNVVPEVWSVKDKIKEFSDTFRSGSWVGATGKPLTNVVSVGIGGSFLGPLFVHTALQTDPEAAECAKGRQLRFLANVDPVDVARSIKDLDPETTLVVVVSKTFTTAETMLNARTLKEWIVSSLGPQAVAKHMIAVSTNLKLVKEFGIDPNNAFAFWDWVGGRYSVCSAVGVLPLSLQYGFPIVQKFLEGASSIDNHFNSSSFEKNIPVLLGLLSVWNVSFLGYPARAILPYSQALEKLAPHIQQLSMESNGKGVSIDGIPLPFETGEIDFGEPGTNGQHSFYQLIHQGRVIPCDFIGVVKSQQPVYLKGETVSNHDELMSNFFAQPDALAYGKTPEQLHSEKVPENLIPHKTFKGNRPSLSLLLPTLSAYEVGQLLSIYEHRVAVQGFIWGINSFDQWGVELGKSLASQVRKQLHESRMEGKPVDGFNHSTSSLLARYLAVKPPTPYDTTVLPKV

SEQ ID NO: 835 - DNA, 1704 bp, Sorghum bicolor
atgctcttctccaggaggcctctcgccgccgctctccacctcgcgcccctctcgcctccgctgctgctcctcttcgcgtccgcgtcctcctcctgctcgcccgccgccgccgcttcggcctccggctccagaggttgcactgctgtaaggatggacagtggcgcggtggagacagcgtccactggggcagtatggtcaacaccttcggcagaaccgagaagcatttctgtcgggaaggaggtattctgcaataggtcactcaacatgaggaacattacagcagtgggatttgatatggactacactctggcacagtacaagcctgagaccttcgaggcccttgcttactatggtacaatagagaagcttgtgaaggatctgcgctaccctgaagagttgctgacttgggagtttgattggaaatatatggtcagaggactagttcttgataagaagagaggaaatatcttgaagatggatcgacacaagtatgtaaaagttgcataccatggttttaaggaactgtcgaaagaagaaaaagttgctgcttatgggagtacattgataagagattcatttgatgaacctgattatgcccttatagatacgcttttctcactgggtgaagcttatctatttgctcagcttgttgatttcatggacaagaatcctggaaaagtacctgcaggcacagactatccacttatgtacagagatgtgaggtctgcggttgatttgtgtcatcgtgatggaactttaaagcgcatggtggcgaaggatcctgccaggtacatcaatgaggacttggcaattgtaccaatgcttgaaatgatcaggaaatctggacgctcaacattcttagtgacgaatagtttgtgggactacactgatgttgtcatgaactacctttgtgggccatacacttcggatgtaggctctggtctcaaccacaaatggcttcaatattttgatattgtaataacaggcagttcgaagccaagtttcttccatgatgataaccgtgcaggcctctttgaagttgagcctgattctggaaagcttctgaatgctgatattcagattggaagcccaagatcaagtcatcaacactcaacaccagttcagaaagtttaccagggaggcaatgttggtcatctccacagattactttctgttgcttctagttcacagattctctatgttggtgatcacatatatggagatattctgcggagcaagaaagttctgggttggcggactatgctagtaattccagaactagaacaagaggtgaagcttctctcagaatcaaagtctacaaggaaggagcttagacatcttagaatgaagcgtgattcaattgaagacagaatccatcatcttgaatggtctcttaaacttgatgatgtcacagaaaatcagaaggagaagttgttctctgaacatgacaatctgctgaaacagagagagcatgttcgccgccttcatcaagaggctcagaggcaacatcatcagaagtttcataaggtgtggggacagctcatgaagactgggtaccaaaattccagatttgctcatcaggttgagagatttgcatgcttgtacagcagccaggttacaaacttcggtttgtattcccccaacaagtactatcgtccgagcgaagattacatgccccatgagtttgatgtgcttgggctgtag

SEQ ID NO: 836 - protein, 567 aa, Sorghum bicolor
MLFSRRPLAAALHLAPLSPPLLLLFASASSSCSPAAAASASGSRGCTAVRMDSGAVETASTGAVWSTPSAEPRSISVGKEVFCNRSLNMRNITAVGFDMDYTLAQYKPETFEALAYYGTIEKLVKDLRYPEELLTWEFDWKYMVRGLVLDKKRGNILKMDRHKYVKVAYHGFKELSKEEKVAAYGSTLIRDSFDEPDYALIDTLFSLGEAYLFAQLVDFMDKNPGKVPAGTDYPLMYRDVRSAVDLCHRDGTLKRMVAKDPARYINEDLAIVPMLEMIRKSGRSTFLVTNSLWDYTDVVMNYLCGPYTSDVGSGLNHKWLQYFDIVITGSSKPSFFHDDNRAGLFEVEPDSGKLLNADIQIGSPRSSHQHSTPVQKVYQGGNVGHLHRLLSVASSSQILYVGDHIYGDILRSKKVLGWRTMLVIPELEQEVKLLSESKSTRKELRHLRMKRDSIEDRIHHLEWSLKLDDVTENQKEKLFSEHDNLLKQREHVRRLHQEAQRQHHQKFHKVWGQLMKTGYQNSRFAHQVERFACLYSSQVTNFGLYSPNKYYRPSEDYMPHEFDVLGL

SEQ ID NO: 837 - DNA, 1353 bp, Sorghum bicolor
atgagggagtgcatctccgtccacatcgggcaggccggcatccaagtcggcaacgcgtgctgggaactttactgcctcgagcacggcatccagcctgatggccaagtgcctggagacaagactgcgggacaccacgatgatgccttcagcaccttcttcagccagactggtgcagggaagcatgtgccccgtgcaatcttcgttgatcttgagcccactgtgatcgacgaggtgcgcactggcacttaccgtcagctcttccaccctgagcagctcatcagcggcaaggaggatgctgctaacaactttgcccgtggccactacacaattggaaaggaaattgttgatctgtgccttgaccgcatccgcaagctcgctgacaactgcactggccttcagggcttcctagtcttcaatgctgttggtggtggcaccggctctggacttggttcactcctccttgagcgcctgtctgtggagtacggcaagaaatccaagctgggcttcactgtgtacccatctccccaggtgtcaacctctgttgtggagccctacaacagcgtgctctccacccactccctcctggagcacactgatgtctccatcctgctcgacaacgaggccatctacgacatctgtaggcgctccctggacattgagaggcccaactactccaacctgaatcgccttgtgtctcaggtgatctcatcacttactgcttccctgaggttcgatggtgccctcaatgtggatgtgaatgagttccagaccaacctggttccttacccgaggatccacttcatgctctcctcatacgcgccggtgatctcttcggcgaaggccttccacgagcagctgtcggtggcggagatcacaagcagcgcgttcgagccggcttccatgatggtcaagtgtgacccacggcacgggaagtacatggcgtgctgcctgatgtaccgtggcgacgtggtgcccaaggacgtgaatgctgcggtggccatcatcaagacgaagcgcaccatccagttcgtggactggtgcccgacggggttcaagtgcggcatcaactaccaggcgccgacggtggtgccgggggctgacctcgccaaggtgcagcgcgccgtgtgcatgatctccaactccaccagcgtcgtcgaggtgttctcccgcatcaacagcaagttcgacctcatgtatgccaagcgcgcgttcgtccactggtacgtcggcgagggtatggaggagggggagttctccgaggcacgcgaggacctggctgccctggagaaggactacgaggaggttgctgcagagggcggtggtgatgacggtgaggaagacgaggagtactga

SEQ ID NO: 838 - protein, 450 aa, Sorghum bicolor
MRECISVHIGQAGIQVGNACWELYCLEHGIQPDGQVPGDKTAGHHDDAFSTFFSQTGAGKHVPRAIFVDLEPTVIDEVRTGTYRQLFHPEQLISGKEDAANNFARGHYTIGKEIVDLCLDRIRKLADNCTGLQGFLVFNAVGGGTGSGLGSLLLERLSVEYGKKSKLGFTVYPSPQVSTSVVEPYNSVLSTHSLLEHTDVSILLDNEAIYDICRRSLDIERPNYSNLNRLVSQVISSLTASLRFDGALNVDVNEFQTNLVPYPRIHFMLSSYAPVISSAKAFHEQLSVAEITSSAFEPASMMVKCDPRHGKYMACCLMYRGDVVPKDVNAAVAIIKTKRTIQFVDWCPTGFKCGINYQAPTVVPGADLAKVQRAVCMISNSTSVVEVFSRINSKFDLMYAKRAFVHWYVGEGMEEGEFSEAREDLAALEKDYEEVAAEGGGDDGEEDEEY

SEQ ID NO: 839 - DNA, 771 bp, Sorghum bicolor
atgggcatctgcatgtcgtccgacgcggcggacgagggcgcggcgacggcgagggtggtgctccccagcggcgagctccgggagtacgccccaccggccaccgccgcgacggcgctgcaagcggcctccggcggcgacggcgaggggtcgtcgtggttcctctgcgacgccgacgggatcgcgttcgaggggggccccgtggccgtggccgcggtcgcgcccggggaggagctccaggcggggcagatctacttcgtgctccccgccgagatgcagcgccgccgcctcacccgcgacgaggtcgccgcgctcgccgtcagggccagctcggcgctcgtcaaggccgcagccgcccagccgtcctccccgtgccgccggcgccggcgcggcgcggtggcgccgctcgtgttcccggtccccgaggaggagtacgcggcggcggaaccggtttcgcccgtcgcggcgaagtctgccgtggcggcggcgcagaagcggagggtggcgtaccggggcggcagggcgtcgaggttctcccccgacctgaccgctatcccggagaccgaaccaagcctccactccacccggcatatgtgtctctctggtggtgacgagtcgctcgccggcgcttggtcggaccccggccgcgcgcgccggagatcgatggagcagggaagtgttctagacgcgacgcagagctcagaaatgagaaatatcaaaatcctccttatcccctccaaccccttcaatcaatctgattttaacaaggcctaa

SEQ ID NO: 840 - protein, 256 aa, Sorghum bicolor
MGICMSSDAADEGAATARVVLPSGELREYAPPATAATALQAASGGDGEGSSWFLCDADGIAFEGGPVAVAAVAPGEELQAGQIYFVLPAEMQRRRLTRDEVAALAVRASSALVKAAAAQPSSPCRRRRRGAVAPLVFPVPEEEYAAAEPVSPVAAKSAVAAAQKRRVAYRGGRASRFSPDLTAIPETEPSLHSTRHMCLSGGDESLAGAWSDPGRARRRSMEQGSVLDATQSSEMRNIKILLIPSNPFNQSDFNKA

SEQ ID NO: 841 - DNA, 1005 bp, Sorghum bicolor
atggctaggccgtcggcaagcagcaaggcgtcgtcgtcgtcgctggtgatcctcgcgatcgtcgtcgccgccgcgtccctcgcgcagcccggcgcggccgacctgaagctgaactactacgcgagcacctgccccaacgtggagaccatcgtgcgcggcgcggtgcagcagagggtgcaggccaccatccgcaccgtcggctccaccgtccgcctcttcttccacgactgcttcgtcgagggctgcgacgcctcggtgctcatcgactccacgcccggcaaccaggccgagaaggacgcctccgacaacaagtccctcgcgcccgaaggcttcgacaccgtgcgcagcgccaaggccgccgtcgaggccgcctgccctggcacggtctcctgcgccgacgtgctcgccctcgccactcgggacgccatctccatgagtggcgggcctttcttccaagtggagctgggcaggctggacggcctgagctccagggccagcagcgtgccaggccagctgcccgagccgaaccagaccatggaccagctgctggcggtcttcaaggcacacgggctcgacatgtccgacctcgtcgcgctctcagcggcgcacagcgtgggtctggcgcactgcagcaagttcgcgaaccggctgtacagcttccagccggggcagccgacggacccgacgctgaaccccaagtacgcgcagttcctgcagagcaagtgccccaacggcggcgccgacaacctggtgctcatggaccaggcctcgccggcacagttcgacaaccagtactaccggaacctccaggacggcggcggcctgctgggctccgacgagctgctctacaccgacaaccgcacgcgccccatggtggactcgctggccaacagcaccgccgccttcaaccaggccttcgccgacgccatcgtcaggctcggccgcgtcggggtcaagtccggcaggcggggcaacatccgcaagcagtgccacgtcttcaactga

SEQ ID NO: 842 - protein, 334 aa, Sorghum bicolor
MARPSASSKASSSSLVILAIVVAAASLAQPGAADLKLNYYASTCPNVETIVRGAVQQRVQATIRTVGSTVRLFFHDCFVEGCDASVLIDSTPGNQAEKDASDNKSLAPEGFDTVRSAKAAVEAACPGTVSCADVLALATRDAISMSGGPFFQVELGRLDGLSSRASSVPGQLPEPNQTMDQLLAVFKAHGLDMSDLVALSAAHSVGLAHCSKFANRLYSFQPGQPTDPTLNPKYAQFLQSKCPNGGADNLVLMDQASPAQFDNQYYRNLQDGGGLLGSDELLYTDNRTRPMVDSLANSTAAFNQAFADAIVRLGRVGVKSGRRGNIRKQCHVFN

SEQ ID NO: 843 - DNA, 1491 bp, Sorghum bicolor
atggcgcttcgcgccgtggagctccggcgattcctcctctcgcgcatcggcggcggcgaggcggcccttcctcctcttgcgtggcgcggccggccggtgagcacctccgccccggcggacgacgagctcgcggggaagagtgcctacgaggttctcggggttggggagtccagttccagcgccgagatcaaggcctccttccatcgcctagccaaagagacccacccagacgtcgccgcggctgctggttcccgacggttccttcagatcctcgctgcctcgaggcgagttgtgcagaaacatcccaggccatctcagttcgtgtacccaagtggttcaggctcaggcattgtggtacctcgagagagcaatgttgttgaatggctgaaatggtacaggcttaccattgatgacatagttaccaagaagagggttgccactggctctggttattttgataggctcgaaagtgaactgtacacagcaatccatgctgcatactatggccctgatgtcgactccatggatgtccttcctgattgctttgaagctgaggagaggtccgtgtatgaaacctctgagctattacaccttgtatcaggccgtgatctatttggtattgttagtgtagctgatagtgtcaaagagctgtcagatgtttgtcgtgaaaaactggcaccctctgggtttagatcttctgaatttactccaaaagtttcaagaaatgtgaataaggattcaatatctatgaattttatatctatgaattttgttgatatgaacaagcaagggatgcggcatgaaaattatattccttcatcagatgccttcaaggatatcgagttgcggatatttgggaaattagttgctactgcaactaggagccccaaatgcgattgcattgacaaatcggatgtggaagatcacattcatgtgtatcttgttccgaacgcagatctatctgatttaacgcaagggaatcttctcctgggcacaattactggattagccaccactggtgaggaaggatcttgctgtgtctatgatggtcacggaataaagacacatgtcattatgaagcaccggacgttgatggttaaacacatgcactggtatcaggttggagataaagtttcaccctgcgagtgtcgatgtagtagggctcgattgccacctagcaggtattggctttttgagcctcgttgttacatgcatgatactggtggatggtatatcgaaacatttgggagagacaagaaagggaggacaattccatctcaaagacagtgggatggtttcagtgaacattctgaaaagagattgcatccagcaatgtatcttgctgctctggcttacagatctttggatcttgaagatgctggaagaagacaatggaatgtgactagtttcctgcaattacccttatctcatatttgtcagctgttcaaaaaaattgttaatggggggaaggggattgacaggacacaatga

SEQ ID NO: 844 - protein, 496 aa, Sorghum bicolor
MALRAVELRRFLLSRIGGGEAALPPLAWRGRPVSTSAPADDELAGKSAYEVLGVGESSSSAEIKASFHRLAKETHPDVAAAAGSRRFLQILAASRRVVQKHPRPSQFVYPSGSGSGIVVPRESNVVEWLKWYRLTIDDIVTKKRVATGSGYFDRLESELYTAIHAAYYGPDVDSMDVLPDCFEAEERSVYETSELLHLVSGRDLFGIVSVADSVKELSDVCREKLAPSGFRSSEFTPKVSRNVNKDSISMNFISMNFVDMNKQGMRHENYIPSSDAFKDIELRIFGKLVATATRSPKCDCIDKSDVEDHIHVYLVPNADLSDLTQGNLLLGTITGLATTGEEGSCCVYDGHGIKTHVIMKHRTLMVKHMHWYQVGDKVSPCECRCSRARLPPSRYWLFEPRCYMHDTGGWYIETFGRDKKGRTIPSQRQWDGFSEHSEKRLHPAMYLAALAYRSLDLEDAGRRQWNVTSFLQLPLSHICQLFKKIVNGGKGIDRTQ

SEQ ID NO: 845 - DNA, 1560 bp, Sorghum bicolor
atggagccggcctatgtcgccatcctctccttcgtcttcctcttcttgctccaccgcctcttcggccgccatcgccgccggatcaatggcaagaacaacagagcgcagctgccaccgagccctcccgccatcccggtcttgggtcacctccacctcctagggaagaagccgatccacgcggcgctcgctcgcctcgcggagcgctacgggccggtgttctccctccggctcggctcgcgggaagccgtggtggtgtcctccgcggcatgcgccacggagtgcttcaccgagaacgacgtttgcttcgcgaaccggccgcggttccccacgctcctgcttgtttccttcggcggcgccactctcccgatgtgccgctacggcccgtactggcgcagcatccgccgcgtcgccacggtgcacctcctgtccgcgcaccgcgtgagctgcatgctccccgtcatatccgccgaggtgcgcgcgatggcgcggaggatgtatcgctccgccgccggcggcggcgccgcgagggtcgagctcaagcggaggctgttcgagctctccctcagcgccctgatggaaaccatcgcgcgaaccaagatgtcccgtgccgttgcggacgacgacacggacatgtctccggaggcccaggaattcatgaaggcgctggacgtgttgcttcgtcttctcagtgcggccaattcgtgggactacctgccggtgctacggtggctcgacatgttcggggtgaggaacaagatcctggccgcggtgagcgcaagggacgcgttcctacggcggctcatcgacgcggagcgccggaggctggaggagggggagggcggcgagaacgacgagaagaagagcatgattggggtcctcctctcattgcagaagtcagagccggaggtgtacacggataccacgatcatggctctgtgctcgagcatgttcgctgggggttccgaaacaacggcgacgacggcggaatgggcgatgtcactgctgctaagccacccggacgttctgaagaaagcgcaggcggaaatcgacgcgtccgtggggcactcccgcctgctcggcgccgacgacgtgccgcggctcggctacctccagtgcatcgtcaccgagaccctccggctgtacccggtggtgccgacgctggtgccgcacgagtccacggcggactgcacggtcggcggccaccacgtgccgagcgggacgatgctgctcgtcaacgtgtacgccatccacagggaccccgcgacctgggcggacccagccgcgttcaggccggagcggttcgaggacggcggccgagcccaagggctgttcatgatgccgttcgggatgggacggcgcaagtgccccggagaggccctcgcgctgcggacgctggggctggtcctgggcacgttgatccagtgcttcgactgggagaccgtcggcggcgccgaggtcgacatggccgaaggggtcggcatcacgctcccgagggctgtccctctcgaggccatctgcaagccgcgccatgctatgcttgaggtcctcaagggactgtga

SEQ ID NO: 846 - protein, 519 aa, Sorghum bicolor
MEPAYVAILSFVFLFLLHRLFGRHRRRINGKNNRAQLPPSPPAIPVLGHLHLLGKKPIHAALARLAERYGPVFSLRLGSREAVVVSSAACATECFTENDVCFANRPRFPTLLLVSFGGATLPMCRYGPYWRSIRRVATVHLLSAHRVSCMLPVISAEVRAMARRMYRSAAGGGAARVELKRRLFELSLSALMETIARTKMSRAVADDDTDMSPEAQEFMKALDVLLRLLSAANSWDYLPVLRWLDMFGVRNKILAAVSARDAFLRRLIDAERRRLEEGEGGENDEKKSMIGVLLSLQKSEPEVYTDTTIMALCSSMFAGGSETTATTAEWAMSLLLSHPDVLKKAQAEIDASVGHSRLLGADDVPRLGYLQCIVTETLRLYPVVPTLVPHESTADCTVGGHHVPSGTMLLVNVYAIHRDPATWADPAAFRPERFEDGGRAQGLFMMPFGMGRRKCPGEALALRTLGLVLGTLIQCFDWETVGGAEVDMAEGVGITLPRAVPLEAICKPRHAMLEVLKGL

SEQ ID NO: 847 - DNA, 2190 bp, Sorghum bicolor
atgcctccgttcgcattcctccgccgctccctccccgcgaggcttctcgcgggagcgtgcgacggtggagtctgggggagtccgggcgtggcgcgggacgaggaggcgggaggcagcggcagcggactgagcggccggtcgacggggggtccgtccggggagtgctacgcgtgcacgcagcccggggtgccggcgttccactccacgacgtgcgaccaggtgcacttgccggactgggacgccgacgcggggtcctcgctcgtgccggtccaggcgcagcaggtccagccggcatcgtcggcggcgcagcacgcgggcgccgcggcgcggtggctgttcgggcccgtgctggacccgcggagcaagcgcgtgcagcgctggaaccgctggatcctgctcggccgcgccgccgcgctggcggtggacccgctcttcttctacgcgctctccatcggccgcgcggggcagccctgcctctacatggacgcggggctcgccgccgcggtcaccgcgctccggacctgcgccgacgtcgcgcacctcgcgcacgtgctcctgcagttccgcctcgcctacgtctcccgcgagtccctcgtcgtcggctgcggcaagctcgtctgggacgcccgcgccatcgccgcgcactatgcccgatccgtcaagggcctctccttcgacctcttcgtcatcctccccatcccgcaggtcatcttctggctggttataccaaagttaattagggaagagcaagttaagcttatcatgacaatactgctgctcatgttcatatttcaatttctccccaaggtctaccattgtatacacatcatgaggaaaatgcagaaggtgacgggttacatctttggatcaatatggtggggatttggtttaaatctatttgcctatttcattgcttctcatattgcaggtgggtgctggtatgttcttgcaatccagcgcattgcttcctgcctccaggaagaatgcaagagaaacaacagttgtgatctaatatcgctagcttgttccaaggagatatgttttcaccctccttggtcatcgaatgttaacggatttgcatgtgatacgaacatgacctcatttagtcaacgaaacgtttctacttgtttaagtggaaaaggatcctttgcttatggaatctatttgggggctcttcctgttatatcgagtaattcacttgctgtcaaaatactctatcctatattttggggcctcatgacactcagtacttttggtaacgatcttgccccaacaagcaatggtattgaggtgatattcagcataatcaatgtcctcagtggtctgatgctcttcacattgctgatcggaaacatacaggtgtttctgcacgctgtcctggcaaggaagcggaagatgcagctgcggttccgggacatggaatggtggatgagacggaggcagctgccgtcccgactgaggcaaagggtccgcaaatacgagcgcgaacgctgggccgccgtcaccggagacgaggagatggagatgatcaaggacctgcctgaaggactcaggcgggacatcaagcgctacctctgcctcgagctggttaagcaggttccgctgttccatggcatggacgacctgatcctggacaacatctgcgaccggctgcggcctctggtgttctccagcggggagaaggtgatccgggagggcgaccccgtgcagcgcatggtgttcatcctgcagggcaagctccggagcacgcagccgctgaccaagggcgtggtggcgacgtgcatgctgggcgcgggcaacttcctgggcgacgagctgctgtcgtggtgcctccgccgccccttcgtggaccggctcccggcgtcgtcggccacgttcgagtgcgtggaggcggcgcaggcgttctgcctcgacgcgccggaccttcggttcatcaccgagcacttccggtacaagttcgccaacgagaagctcaagcgcacggcgcgctactactcgtccaactggcggacgtgggccgccgtaaacatccagctcgcgtggcgcaggtacagggcccggacgtcggcgacggacctggcggcgatggctgccccgccgttggcgggcgggcccgacgacggggaccggcggctcagacactacgcggccatgttcatgtcgctccggccgcatgaccacctagagtga

SEQ ID NO: 848 - protein, 729 aa, Sorghum bicolor
MPPFAFLRRSLPARLLAGACDGGVWGSPGVARDEEAGGSGSGLSGRSTGGPSGECYACTQPGVPAFHSTTCDQVHLPDWDADAGSSLVPVQAQQVQPASSAAQHAGAAARWLFGPVLDPRSKRVQRWNRWILLGRAAALAVDPLFFYALSIGRAGQPCLYMDAGLAAAVTALRTCADVAHLAHVLLQFRLAYVSRESLVVGCGKLVWDARAIAAHYARSVKGLSFDLFVILPIPQVIFWLVIPKLIREEQVKLIMTILLLMFIFQFLPKVYHCIHIMRKMQKVTGYIFGSIWWGFGLNLFAYFIASHIAGGCWYVLAIQRIASCLQEECKRNNSCDLISLACSKEICFHPPWSSNVNGFACDTNMTSFSQRNVSTCLSGKGSFAYGIYLGALPVISSNSLAVKILYPIFWGLMTLSTFGNDLAPTSNGIEVIFSIINVLSGLMLFTLLIGNIQVFLHAVLARKRKMQLRFRDMEWWMRRRQLPSRLRQRVRKYERERWAAVTGDEEMEMIKDLPEGLRRDIKRYLCLELVKQVPLFHGMDDLILDNICDRLRPLVFSSGEKVIREGDPVQRMVFILQGKLRSTQPLTKGVVATCMLGAGNFLGDELLSWCLRRPFVDRLPASSATFECVEAAQAFCLDAPDLRFITEHFRYKFANEKLKRTARYYSSNWRTWAAVNIQLAWRRYRARTSATDLAAMAAPPLAGGPDDGDRRLRHYAAMFMSLRPHDHLE

SEQ ID NO: 849 - DNA, 1350 bp, Sorghum bicolor
atggcggcgggcggcagatccgtcgcgtgctgtgccgccgtgctgctcgcggccgcgctgctcctctccgcaccgactaccacagaggcttatgattcgctggatccaaccggcaacatcactataaaatgggatattatgcagtggactcctgacggatatgtcgctgttgtcacaatgtataattttcaacaatttcggcacatcggcgcacctggttggcagcttgggtggacatgggcaaagaaggaggttatatggtcaatggttggggctcagaccactgaacagggtgactgctcaaagttcaagggcaacaccccccattgctgcaagaaagatccaacaattgtcgatttactaccaggcactccatacaacatgcaaattgccaattgctgcaaggcaggagtcataaatacctttaaccaggacccagcaaatgctgcttcctccttccagatcagtgttggtcttgccggaactaccaataaaactgttaaggtgccaaagaacttcactcttaagactccaggccctgggtacacatgtgggcgtgccattgttggcaggccgacaaagttttggagcgcagatgggcgcagggcaacccaagctctaatgacatggaatgtgacctgcacatattcccaatttcttgctcagaagactccatcctgctgtgtctctctctcatcgttttataatgacacaattgtgaactgcccaacatgctcatgtggctgccagaacccaagtgggtcaaactgtgtgaatgaggattcacctaatctacaagctgcaattgatggtcctggcaaatggactggccagcctcttgtacaatgcacttcccacatgtgcccgataagaatccactggcatgtgaagctcaactacaaggaatactggagagtgaaaatcactatcacaaacttcaacttccgcatgaattacacgcagtggaacttagtagctcagcatccaaactttgataacatcactcagttgttcagcttcaactacaaaccacttactccatatgggggtggcataaatgatacggcaatgttctggggtgtaaaattctacaatgatttgctgatgcaagccggcaaacttggaaatgtgcaatcggaactgcttctccgcaaggactcccggactttcaccttcgataaggggtgggccttcccacgccgggtgtacttcaatggtgataattgtgtcatgccatctcctgaaaattatccatggctgccgaatgcaagccctctaacaagacaaccattgacactcccactcttggtattctgggttgccttggctgctctgttggcttatgcatga

SEQ ID NO: 850 - protein, 449 aa, Sorghum bicolor
MAAGGRSVACCAAVLLAAALLLSAPTTTEAYDSLDPTGNITIKWDIMQWTPDGYVAVVTMYNFQQFRHIGAPGWQLGWTWAKKEVIWSMVGAQTTEQGDCSKFKGNTPHCCKKDPTIVDLLPGTPYNMQIANCCKAGVINTFNQDPANAASSFQISVGLAGTTNKTVKVPKNFTLKTPGPGYTCGRAIVGRPTKFWSADGRRATQALMTWNVTCTYSQFLAQKTPSCCVSLSSFYNDTIVNCPTCSCGCQNPSGSNCVNEDSPNLQAAIDGPGKWTGQPLVQCTSHMCPIRIHWHVKLNYKEYWRVKITITNFNFRMNYTQWNLVAQHPNFDNITQLFSFNYKPLTPYGGGINDTAMFWGVKFYNDLLMQAGKLGNVQSELLLRKDSRTFTFDKGWAFPRRVYFNGDNCVMPSPENYPWLPNASPLTRQPLTLPLLVFWVALAALLAYA

SEQ ID NO: 851 - DNA, 528 bp, Sorghum bicolor
atgggccgcgggaaggtggtgctgcagcggatcgagaacaagatcagccggcaggtgaccttcgccaagcgccggaacggcctgctcaagaaggcctacgagctctccatcctctgcgacgccgaggtcgcgctcgtcctcttctcccacgccggccgcctctaccagttctcatcctcctccaatctgcttaagactctagagcgataccagaggtacatctatgcttcagctgatgctgcagtgccatctagcgatgagatgcagaataactatcaagaatatgtgaacctgaaggcacgagttgaggttttacaacactcacaaaggaatcttcttggtgaagatctggctccacttagccctagtgaacttgaccagcttgagagtcaagtagacaagaccttgaagcaaataagatcaagaaagactcaagtgttacttgatgaactttgcgacttaaagagaaaggaacaaatgctgcaagatgcaaacagggttctgaaaaggaaggtaagtgacagttga

SEQ ID NO: 852 - protein, 175 aa, Sorghum bicolor
MGRGKVVLQRIENKISRQVTFAKRRNGLLKKAYELSILCDAEVALVLFSHAGRLYQFSSSSNLLKTLERYQRYIYASADAAVPSSDEMQNNYQEYVNLKARVEVLQHSQRNLLGEDLAPLSPSELDQLESQVDKTLKQIRSRKTQVLLDELCDLKRKEQMLQDANRVLKRKVSDS

SEQ ID NO: 853 - DNA, 3408 bp, Sorghum bicolor
atgtcgtcgccgttgaacaaccgggggacgtgctcccggagcagctctgcgcggtccaggcacagcgcgcgggtggtggcgcagacgcccgtggacgcgcagctgcacgccgagttcgagagctcccagcgcaacttcgactactcctcgtcggtgagcgccgccatccgaccgtcggtcagcaccagcaccgtctccacctaccaccagaccatgcagcggggcctctacatccagcccttcggctgcctgctcgccgtccacccggacaccttcacgttgctcgcctacagcgagaacgcgcccgagatgctcgacctcacgccacacgcggtccccaccatcgaccagcgggacgcgctcgccgtcggcgccgacgtgcgcacgctcttccgctcgcagagctccgtcgcgctgcacaaggccgccaccttcggggaggtcaacctgctcaaccccatcctcgtgcatgccaggacgtcggggaagcccttctacgccatattgcaccggatcgacgtcggccttgtcatcgaccttgagccggtcaacccagttgacgtgccagtcactgctgcgggtgcgcttaagtcgtacaagctcgccgccaaggccatctccaggctgcagtcgctgcccagcgggaacctgtcgctgctgtgcgatgtgcttgtccgtgaggtgagcgagctcacgggctatgaccgggtcatggcgtacaagttccatgaggatgagcatggtgaggtcatttccgagtgcaggaggtctgatctggagccgtatcttggcctgcactacccagccaccgacatcccgcaggcgtccaggttcttgtttatgaagaacaaagtgaggatgatatgtgattgctctgccactctggtgaagatcattcaggatgatagcctagcacagcctctcagcctctgtggttccaccctcagggcttcccatggttgccatgcacagtacatggcaaacatgggttctgttgcatcgcttgtgatgtcagtgactataagcaatgatgaggaggaagatgttgataccgggagtgaccaacaaccgaaaggcaggaaactgtgggggctggtcgtctgccatcatacaagcccgaggttcgtccctttcccactaaggtacgcttgcgagtttctcttgcaagtatttggcatacagctaaacaaggaggtggaattggctgctcaggcaaaggagaggcacatcctcagaacgcaaacccttctttgtgatatgctcctgcgggatgctcctgttgggatatttacccagtcacctaatgtgatggatctagtaaagtgcgatggagctgcattgtattaccagaaccagcttttgttgctcggatcaacaccctccgagtcagagataaagagcattgccacatggctgcaggagaaccatgatggttcaactgggctgagtactgacagcttagtggaagcaggttatcctggtgctgctgcacttcgtgaagttgtgtgtggcatggcggctataaagatctcttccaaagattttatcttctggttccgatcgcacacaacaaaggagatcaagtggggtggggctaagcatgaaccggttgacgcagatgacaatggcaggaagatgcatccacgatcttcattcaaggccttcttggaggtggttaaatggagaagtgttccctgggaggatgttgaaatggatgctattcattctttgcagttaatattacgtggctccctgcaagatgaagatgccaacagaaacaatgtaaggtccattgtaaaagctccacctgatgatacgaagaagatacaggggctacttgaactaagaacagttacaaacgagatggtccgcttaattgagacagcaaccgcccctgtcttggctgtcgacattgccggtaacataaatggatggaacaataaagctgcagaactaacagggttacctgtaatggaagccatagggaggcctctgatagatcttgttgttgttgattctattgaagtggttaagcggattttggactcagctttacaaggaattgaagagcaaaatctggaaatcaagcttaaagcattccatgaacaggaatgcaatggtccaataatcttgatggttaactcctgctgtagtcgggacctttcagagaaagtcattggagtttgctttgtaggacaagatttgaccacgcagaagatgattatggataagtatactaggatacaaggagactatgttgccatagtaaagaaccccagtgagctcatccctcccatatttatgatcaatgatcttggttcctgcttagagtggaataaagctatgcagaagattaccggtatacagagggaagatgtgatagataagttgttaattggggaggtcttcacccttcatgattatggctgtagggtgaaagatcatgctactctaacgaaacttagcatactgatgaatgcagtgatttctggtcaggatcctgagaagctcctttttggtttcttcgacacagatgggaagtatattgaatccttgctgacagtgaacaagagaataaatgctgagggtaagatcactggcgctatttgctttctgcatgtggccagtccagagcttcagcatgctctccaggtgcagaaaatgtctgaacaagctgccacaaacagttttaaggaattaacttacattcatcaagaattaaggaacccactcaatggcatgcaatttacttgcaacttattggagccttccgaattgacagaggagcagaggaaacttctttcatctaatattctctgtcaggaccagctgaaaaagattttacatgacactgatcttgaaagcattgaacagtgctatatggagatgaacacagtagagttcaaccttgaggaagctcttaatacggtcctaatgcaaggcattcctttgggcaaggaaaagcgaatttctattgaacgtgattggccggtggaaatatcacgcatgtacctttacggggacaatttaaggcttcagcaggtcctagcagactatctggcatgcgcccttcaattcacacaaccagctgaaggacctatcgtgctccaggtcattcccaagaaggaaaacattgggtctggcatgcagattgctcatttggagttcaggattgtccatccagctccaggcgtccccgaggccctgatacaggagatgttccggcacaacccagaggtgtccagggagggcctcggcctgtacatatgccagaagctggtgaaaacgatgagtggcacggtacagtacctacgagaagccgatacctcatcgttcatcatcctgatagagttcccagtcgcccagctcagcagcaagcggtccaagccttcgacgagtaaattctga

SEQ ID NO: 854 - protein, 1135 aa, Sorghum bicolor
MSSPLNNRGTCSRSSSARSRHSARVVAQTPVDAQLHAEFESSQRNFDYSSSVSAAIRPSVSTSTVSTYHQTMQRGLYIQPFGCLLAVHPDTFTLLAYSENAPEMLDLTPHAVPTIDQRDALAVGADVRTLFRSQSSVALHKAATFGEVNLLNPILVHARTSGKPFYAILHRIDVGLVIDLEPVNPVDVPVTAAGALKSYKLAAKAISRLQSLPSGNLSLLCDVLVREVSELTGYDRVMAYKFHEDEHGEVISECRRSDLEPYLGLHYPATDIPQASRFLFMKNKVRMICDCSATLVKIIQDDSLAQPLSLCGSTLRASHGCHAQYMANMGSVASLVMSVTISNDEEEDVDTGSDQQPKGRKLWGLVVCHHTSPRFVPFPLRYACEFLLQVFGIQLNKEVELAAQAKERHILRTQTLLCDMLLRDAPVGIFTQSPNVMDLVKCDGAALYYQNQLLLLGSTPSESEIKSIATWLQENHDGSTGLSTDSLVEAGYPGAAALREVVCGMAAIKISSKDFIFWFRSHTTKEIKWGGAKHEPVDADDNGRKMHPRSSFKAFLEVVKWRSVPWEDVEMDAIHSLQLILRGSLQDEDANRNNVRSIVKAPPDDTKKIQGLLELRTVTNEMVRLIETATAPVLAVDIAGNINGWNNKAAELTGLPVMEAIGRPLIDLVVVDSIEVVKRILDSALQGIEEQNLEIKLKAFHEQECNGPIILMVNSCCSRDLSEKVIGVCFVGQDLTTQKMIMDKYTRIQGDYVAIVKNPSELIPPIFMINDLGSCLEWNKAMQKITGIQREDVIDKLLIGEVFTLHDYGCRVKDHATLTKLSILMNAVISGQDPEKLLFGFFDTDGKYIESLLTVNKRINAEGKITGAICFLHVASPELQHALQVQKMSEQAATNSFKELTYIHQELRNPLNGMQFTCNLLEPSELTEEQRKLLSSNILCQDQLKKILHDTDLESIEQCYMEMNTVEFNLEEALNTVLMQGIPLGKEKRISIERDWPVEISRMYLYGDNLRLQQVLADYLACALQFTQPAEGPIVLQVIPKKENIGSGMQIAHLEFRIVHPAPGVPEALIQEMFRHNPEVSREGLGLYICQKLVKTMSGTVQYLREADTSSFIILIEFPVAQLSSKRSKPSTSKF

SEQ ID NO: 855 - DNA, 786 bp, Sorghum bicolor
atgttcttgaggtcgaagatccaggaggtgatcctgcgcaggagatcgaggtcaatgaacagcgccggcgcgcagaggagccacgtccccgatcaggccgcgagctcgtcgaccgttccatgcgacggcgacagtggcggggccggggcagacgccgccggcagcaagagtgccgctgcacgtgccctgttcgcctccccgaggctgctgcactcatcctccctgcccgccggcaccctcgccttcgccaagagccccgcgcgggacgccgagtccgacacggccttcctcatgagcccgacgtccgtgctcgacgcggctgcggcgttcgcgccaggcacggacggcgtcggcaagcgccgacggccgtggcgggcgcgggacaacaacggcctcgcggacgcgctggactgcagcgaccagcagcaggagcggatcgtcctcgcggcgacgtcgtcctcgtcctcgctggtcaggtcgtgctccctggaccgccgcgtcgagttcggcgtcaagaacaagagctcgtggctgcccctccacgcctgcagcggcagcgaggccacgtcgccggcgccggccgacccgcgggatataatagagccgtcgtcggaggactacacgtgcgtcatctcccgcgggcccaacccaaggacggtgcacatcttcggcgatcgcgtcgtggaaggcagcgccggcgccggcgctgcggcggagagggaggagagctcgccgcggccgatcaatctgccggcgcgcggcgaccggggcttcttcagcctctga

SEQ ID NO: 856 - protein, 261 aa, Sorghum bicolor
MFLRSKIQEVILRRRSRSMNSAGAQRSHVPDQAASSSTVPCDGDSGGAGADAAGSKSAAARALFASPRLLHSSSLPAGTLAFAKSPARDAESDTAFLMSPTSVLDAAAAFAPGTDGVGKRRRPWRARDNNGLADALDCSDQQQERIVLAATSSSSSLVRSCSLDRRVEFGVKNKSSWLPLHACSGSEATSPAPADPRDIIEPSSEDYTCVISRGPNPRTVHIFGDRVVEGSAGAGAAAEREESSPRPINLPARGDRGFFSL

SEQ ID NO: 857 - DNA, 1239 bp, Sorghum bicolor
atgctctcgtggccagcgtctaccgcaacccggccgcgttccaccggtgagtactcgatcgacgacggtgacccaaacccaacagaacggaacacaaacgacagccatttgatttttcacgagtacgtacggtacggtgattgcgaggcaagcaggagctacagagaaatggagaggcggttcaaggtgtacgtgtacgaggaaggcgagccgccgatcctgcacgccggcccgtgcaaggacatctacaccatcgagggccgcttcatcgagcagcttgagctcatggcgccgccgccgccggccggcggcggcggcggcgcgcgcacgtcggacccggcgcgcgcccacgccttcttcctgccgttcagcgtctccaagatggtccagttcgcgtaccgccccgacacctacgacaaaacccctctccgcgccatcgtcgccgactacgtccgcgtcgtcgcgtcacggcacccttactggaaccgctccgccggcgccgaccacttcatgctctcctgccacgactggggccctgaggcgtcgagggggcacccggagctgcacgcgaacggcatccgcgcgctctgcaacgccaacacctcggagggtttccggccggggcaggacgtgagcgtgccggagatcaacctctacacgggcgacatgccgcggcagctcctggcgccgccggcgccgccgctagcgtcgcgcccgttcctggccttcttcgccggcggccggcacgggcacgtccgtgacctgctgctccggcgatggaagggccacgacccggacgtgttcccggtgtacgagcacgagcacgagcacagccatggacgacgacagcaggacggggccccgcttgactactactggtacatgcggcgcgcgcgcttctgcctgtgcccgagcgggtacgaggtggcgagcccgcgcgtggtggaggccatccacgccgagtgcgtgccggtgatcctctccgacgggtacgcgctgccgttcgccgacgtgctgcggtgggaggcgttctcggtggcggtgccggtcgccgacatccccaggctgagggaggtgctggagcggataccggcgccggaggtggagcggctccagcgaggggtgcgcctggtgaagcgacacttcatgctgcaccagccgccggagaggctggacatgtttaatatgatcctgcattctgtctggctcaggaggcttaaccttagactgaatcgctaa

SEQ ID NO: 858 - protein, 412 aa, Sorghum bicolor
MLSWPASTATRPRSTGEYSIDDGDPNPTERNTNDSHLIFHEYVRYGDCEASRSYREMERRFKVYVYEEGEPPILHAGPCKDIYTIEGRFIEQLELMAPPPPAGGGGGARTSDPARAHAFFLPFSVSKMVQFAYRPDTYDKTPLRAIVADYVRVVASRHPYWNRSAGADHFMLSCHDWGPEASRGHPELHANGIRALCNANTSEGFRPGQDVSVPEINLYTGDMPRQLLAPPAPPLASRPFLAFFAGGRHGHVRDLLLRRWKGHDPDVFPVYEHEHEHSHGRRQQDGAPLDYYWYMRRARFCLCPSGYEVASPRVVEAIHAECVPVILSDGYALPFADVLRWEAFSVAVPVADIPRLREVLERIPAPEVERLQRGVRLVKRHFMLHQPPERLDMFNMILHSVWLRRLNLRLNR

SEQ ID NO: 859 - DNA, 396 bp, Sorghum bicolor
gatgctcttatggatgatggggctgaaatagaaggtcctggtgctactgaccaggaaacaaaagacagtagcaacaatcaggaagttgaaaccgatttggtggagggaaggattgaaagtgcagataacagtgcagcagccttcaaacaagttagaggacaagaatgtgacaacagcgatcctaaatcctatagtgactcgactactcgagtgagcagaggtaaaaatccttttgctctgtccatcctgaagcaagtggagcataagttacatggacaggatatagatggtaccaggtccttgaatatttctgagcaagttgattatcttcttaaacaagcaacaagcatcgacaacttatgcaatatgtacgagggatggacaccttggatatga

SEQ ID NO: 860 - protein, 131 aa, Sorghum bicolor
DALMDDGAEIEGPGATDQETKDSSNNQEVETDLVEGRIESADNSAAAFKQVRGQECDNSDPKSYSDSTTRVSRGKNPFALSILKQVEHKLHGQDIDGTRSLNISEQVDYLLKQATSIDNLCNMYEGWTPWI

SEQ ID NO: 861 - DNA, 2307 bp, Sorghum bicolor
atggcgacagccgatggcgccgcaccgccggcaatggacgagaaggcgcggcgcacgcgtgacctccttgctagcttctacaacaccgacccgtcggcggccgccggggccgcggcccccgcgtccctggcgcggccgtcccctacagccgcgcccgcatcgcccctcgactccatcaactccgcctccttcgatcccgacatctacatgaatgttctggtgcagcaatccaatctggaaggccttctacaaaggcatgtgaagatggctgctgagatcaagaacctagacacagatttacagatgctagtgtatgagaattataacaagtttattagtgcaactgacactataaaaaggatgaagactaacattgttgggatggagacaaatatggaccagctccttgcaaagataacatcagtgcaatcaaaaagcgacacagtaaatacatctctttttgacaaaagggaaaacatcgagaaattacatcgtacacgcaatctgctccggaaagttcaattcatatatgaccttccaactcggcttaacaaatgcatcaagaccgaagcatatgcagatgctgtcaggttttttactggagcaaaacctatttttgaggcctatggagatacgtcttttcaagactgtaaaaaggcatccgaggaggcaatggatttagttatacaacaccttcaggcaaagttatactcagattctgaacctattgaagcaagagcagaagctgtagttctccttaaacaattgaactttccggtggacaacttaaaatcgaatctacttgagaagcttgaagattgcctcttgaatttccagaatgagcctacgcaggcttcaattggtgacatctcaaagacattccgtgcttatttaataatatttcctgattcggaaaggcgtctcattgaacttgcacaagctttgttctcaaaccgatatgaaacagtcagagagaatctgaagaaaagaattccatcaacagatctgctggcaatactacgatccttatgggaggatgcaaccgccatcgatgaagttattccagaggctgcgctaccagctttttctttggagactactcgagacattattaggcaacacatagcaactgcatttctccatcttcaaagtgaaatatcagaggcactggttaggacacgttcaacatcaaatgagaagttagaagagtcacagctgcaaactgctatggaggcaagcaaaatcaaagtatcccaaggatgcatagatctcctgcaggaatttcatcatctgatagatggcaatatagagttgcttgtaaagctgagagatttgattattgactgggtacaagaaggttttcaagattttttccagaaacttgatgggcattttcatgtgctctctgggagaagcaaaaagaaatcacaagagtcaactatgcattctgtgcaaattgataaggtcccaacagtcttggtacttatgcttgcacaactctgtgtttacattgaacaaacaacagttcctaaagttacagaggagctagctgcttctttttttggaggtggtgcacgtagctacgaatatggaccaccttttgtgcctggagaaatatgtcggctatatcgttcatcaggagagaaattcttgcaccattacataaatctgaagactcagaagatctctaaacttcttaataagcgatttacaacaccagtttggattaagcacaaggaacctagggaagtgaacatgtttgttgatctacttctcctagagatcaatggtgtggtatctgaagtcaagcagatcttacctggtatagttcggcgacatcggcattctgatagcactggtagcacgacttcctccagaagcaatccaatgcgagaagatatgttgaaccgatcaaacacacatcgtgctagaagtcagtttttagaaaaccacctggcaaagttattcgagcagaaaatggaaatattcaccaaagttgaatacacacaggaatctgttatttctactgtcctcaagctctgcctgaaaagcttgcaagaatatgtccgtcttcagactttcaacagaagtggatttcagcagattcagctggatatggaatttctcaagacctcccttaaggaatttgtggatgatgaagcagctatcagctttttactcaaagaggtgaacaatgctgcccacgagagatgtcttgacccaatccctcttgagccccccatattagataagctcataaatgcaaaactagaaaaaattaaagaggaaaacccaaatatgcggtag

SEQ ID NO: 862 - protein, 768 aa, Sorghum bicolor
MATADGAAPPAMDEKARRTRDLLASFYNTDPSAAAGAAAPASLARPSPTAAPASPLDSINSASFDPDIYMNVLVQQSNLEGLLQRHVKMAAEIKNLDTDLQMLVYENYNKFISATDTIKRMKTNIVGMETNMDQLLAKITSVQSKSDTVNTSLFDKRENIEKLHRTRNLLRKVQFIYDLPTRLNKCIKTEAYADAVRFFTGAKPIFEAYGDTSFQDCKKASEEAMDLVIQHLQAKLYSDSEPIEARAEAVVLLKQLNFPVDNLKSNLLEKLEDCLLNFQNEPTQASIGDISKTFRAYLIIFPDSERRLIELAQALFSNRYETVRENLKKRIPSTDLLAILRSLWEDATAIDEVIPEAALPAFSLETTRDIIRQHIATAFLHLQSEISEALVRTRSTSNEKLEESQLQTAMEASKIKVSQGCIDLLQEFHHLIDGNIELLVKLRDLIIDWVQEGFQDFFQKLDGHFHVLSGRSKKKSQESTMHSVQIDKVPTVLVLMLAQLCVYIEQTTVPKVTEELAASFFGGGARSYEYGPPFVPGEICRLYRSSGEKFLHHYINLKTQKISKLLNKRFTTPVWIKHKEPREVNMFVDLLLLEINGVVSEVKQILPGIVRRHRHSDSTGSTTSSRSNPMREDMLNRSNTHRARSQFLENHLAKLFEQKMEIFTKVEYTQESVISTVLKLCLKSLQEYVRLQTFNRSGFQQIQLDMEFLKTSLKEFVDDEAAISFLLKEVNNAAHERCLDPIPLEPPILDKLINAKLEKIKEENPNMR

SEQ ID NO: 863 - DNA, 1083 bp, Sorghum bicolor; identical to SEQ ID NO: 249

SEQ ID NO: 864 - protein, 360 aa, Sorghum bicolor; identical to SEQ ID NO: 250

SEQ ID NO: 865 - DNA, 1251 bp, Sorghum bicolor
atgcctggtgacaagaccgttgggggaggtgatgatgctttcaacaccttcttcagtgagactggcgctgggaagcatgtcccccgtgctgtgtttgttgaccttgagccaactgtcatcgatgaggtgaggactggcacttaccgccagctcttccaccctgagcagctcatcagtggcaaggaggatgcagccaacaactttgcccgtggtcactacaccattggcaaggagattgttgacctgtgccttgatcgcatcaggaagcttgcagacaactgcactggtctccagggtttccttgtcttcaatgctgttggtggaggaacgggctctggacttggttccctcctcttggagcgtctgtctgttgattatggcaagaagtccaagcttgggttcactgtgtacccatcccctcaggtctctacctcagtggttgagccatacaacagtgtcctgtccacccactctctcctcgagcacactgatgtcgctgtcctccttgacaatgaggccatctatgacatctgccgccgctcccttgacattgagcgcccaacctacaccaacctcaacaggcttgtgtcacaggtcatctcatccctgactgcatccctgaggtttgatggtgctctgaacgttgatgtgaacgagttccagaccaatctggtgccctacccgaggatccacttcatgctttcctcctacgctcctgtgatctcggctgagaaggcctaccacgagcagctgtccgttgctgaaatcaccaatagtgcctttgagccatcctccatgatggccaaatgtgatcctcgccatggcaagtacatggcctgctgcctcatgtaccgtggtgacgtggtccccaaggatgtgaatgccgctgtggccaccatcaagaccaagcgcaccatccagttcgtggactggtgcccgactggcttcaagtgtggcatcaactaccagccacccagtgtggtgcccggcggtgacctcgcaaaggtgcagcgtgccgtgtgcatgatctccaactccaccagcgttgtggaggtgttctcccgcatcgaccacaagtttgacctcatgtacgccaagcgtgccttcgtgcactggtacgttggtgagggtatggaggagggtgagttctctgaggcccgtgaggacctggctgcgcttgagaaggactatgaggaggttggcgctgagtacgacgagggtgaggatggtgacgagggcgacgagtactag

SEQ ID NO: 866 - protein, 416 aa, Sorghum bicolor
MPGDKTVGGGDDAFNTFFSETGAGKHVPRAVFVDLEPTVIDEVRTGTYRQLFHPEQLISGKEDAANNFARGHYTIGKEIVDLCLDRIRKLADNCTGLQGFLVFNAVGGGTGSGLGSLLLERLSVDYGKKSKLGFTVYPSPQVSTSVVEPYNSVLSTHSLLEHTDVAVLLDNEAIYDICRRSLDIERPTYTNLNRLVSQVISSLTASLRFDGALNVDVNEFQTNLVPYPRIHFMLSSYAPVISAEKAYHEQLSVAEITNSAFEPSSMMAKCDPRHGKYMACCLMYRGDVVPKDVNAAVATIKTKRTIQFVDWCPTGFKCGINYQPPSVVPGGDLAKVQRAVCMISNSTSVVEVFSRIDHKFDLMYAKRAFVHWYVGEGMEEGEFSEAREDLAALEKDYEEVGAEYDEGEDGDEGDEY

SEQ ID NO: 867 - DNA, 333 bp, Sorghum bicolor
atggccccgagcgcgtcgatgctgttcctgagctaccaccagctccacagccacaggccgacggaggcgggggcgggggcgtcgccgccgcgcagggaggaggctgcagttggcggcggcttccggatgagcgtgcgcagcgtgctctcactccctttgttccagcggcggccggaggaggcggcggtgccggcggaggggaagacggcgacactgcacgagcgcgacgcccgcgaggaggtcaagtcgtcggcgacggcggccgccgacgctgataaggagctggaacgcaagttcgaggaggcgctgcgcctcagctgctggtcttcgtga

SEQ ID NO: 868 - protein, 110 aa, Sorghum bicolor
MAPSASMLFLSYHQLHSHRPTEAGAGASPPRREEAAVGGGFRMSVRSVLSLPLFQRRPEEAAVPAEGKTATLHERDAREEVKSSATAAADADKELERKFEEALRLSCWSS

SEQ ID NO: 869 - DNA, 1179 bp, Sorghum bicolor
atggccgggagcatgcaggcggcggacgcggcgggccggctaagcgcgctgctgtcgctgctcgcgctgcgccggctcctcgccgtgctccagccgctggccctgctcctgctcctgcccttcaggtggcgcccaaggccgggggccgtgcccacggccgtggcgtccgatgccgcgccctccgcgtcgtcgggggctagcgggaagaaggggaaggcgtcgtcgtcggtggttctaagggtgccggccggctcgcccatggtcgccgcgcggaggcaggcgtccgcaaggagggagatagccatgcgccgggcgcgggaggccgggcgggagtacgagctcatccccaccgctcgcggcgagacgctcttcacgcagtgctggtggccgcacccgccttcctccaccgttaaaccaagggcgctggttgttgtcatgcacgggctaaacgagcacagtgggaggtatgatcatttagcgaggcgattgaatgacatcggcatcaaggtgtacggaatggactggactggtcatggtggaagtgatggtctccatggatatgtgcaatctcttgattatgctgtcaatgatttgaaaatgtacctcaagaaagtattagccgagaaccctggtcttccatgcttctgcttcggccattcgactggtggaggtatcattctgaaggctgcgcttgatccagaggtaaaaactctcattagcggtattgtcctgacatcaccagctgtccgtgttcagcctgcccacccagtcatagcggtcatggcaccgattttcgccctcatcgcaccgaggtatcagttcacggcgtcgcacaggaacggcccaccggtgtcgcgcgacccggaggccctgcgtgccaaatacacggaccagctggtgttcacgggcgccatccgcgtgaggacgggctacgagatcctccgcctgacgtcgtacctgcagcagcacctgcaccgcatcgacgtcccgctgctggtgatgcacggcgccgacgacctggtgaccgaccccaagggctcgcgggcgctgtacgagcaggcctcctccgcggacaagtccctcaagctctacgacgggctgctgcacgacctcctgatcgagcccgagaaggacaaggtgatggacgacatcgtggcgtggctgagccccaaggtctaa

SEQ ID NO: 870 - protein, 392 aa, Sorghum bicolor
MAGSMQAADAAGRLSALLSLLALRRLLAVLQPLALLLLLPFRWRPRPGAVPTAVASDAAPSASSGASGKKGKASSSVVLRVPAGSPMVAARRQASARREIAMRRAREAGREYELIPTARGETLFTQCWWPHPPSSTVKPRALVVVMHGLNEHSGRYDHLARRLNDIGIKVYGMDWTGHGGSDGLHGYVQSLDYAVNDLKMYLKKVLAENPGLPCFCFGHSTGGGIILKAALDPEVKTLISGIVLTSPAVRVQPAHPVIAVMAPIFALIAPRYQFTASHRNGPPVSRDPEALRAKYTDQLVFTGAIRVRTGYEILRLTSYLQQHLHRIDVPLLVMHGADDLVTDPKGSRALYEQASSADKSLKLYDGLLHDLLIEPEKDKVMDDIVAWLSPKV

SEQ ID NO: 871 - DNA, 492 bp, Sorghum bicolor
atgcttcaacgaagtcgagagctgacgaaacaggtctgcattttagaggcttccattgaagcaggtgctaaagaaataatctggataaaggatagcttaaatgaatgggacagtaaagttggtgatggtgactgtgggacaacaatgtataggggggcaattgctatacttgaggacatgaaaaaatgtcatactcatagtatccctcttctcagctacccaatgaatgatgtcgctgaaacagtaaatgagattggtgccacaaggcttgaagctggggatgatccacttgatgcattcatcgtatcatctgaagctgctttgactggtgctgaatccacaagacacatgcaggcccaagctggtagatcatcctacattgctgctgacaagctggcatcagctcctgatcctggggccatggctgctgctgcttggtacagggctgcagccctttcgttaaagaacatgtcgtgccattcggatccatag

SEQ ID NO: 872 - protein, 163 aa, Sorghum bicolor
MLQRSRELTKQVCILEASIEAGAKEIIWIKDSLNEWDSKVGDGDCGTTMYRGAIAILEDMKKCHTHSIPLLSYPMNDVAETVNEIGATRLEAGDDPLDAFIVSSEAALTGAESTRHMQAQAGRSSYIAADKLASAPDPGAMAAAAWYRAAALSLKNMSCHSDP

SEQ ID NO: 873 - DNA, 1005 bp, Sorghum bicolor
atggaatcaccggcggggcagctactctcgcaaatcctccacacgcacccgcacctactgtctgccgccgccgagcagcagctcgagcagctccagaccgaccgcgaggccgagaaggagaaggagaaggagagcgaggctggcgacaagtcgaccccgacaggtggcgacctcgtgctgtacaggcgtattgcagaagtaaaggagaaggaacggagaaggactttggaggagatactctatgctctggttgttcagaagtttgttgaagctgatgtttctttggttccagcactctcacactccatcgattcttctggaagagttgatcagtggacagaaactgtggaagagaagcttcaacgtttacactcgcccgaggcctatgaaatgatcgagaatcatctctctctcattctggggcagcgtcaaggtgatgccactattgcagccataagtaagctccgagttggccaggtctatgctgcatctgtgatgtatggttatttcctgaagagagttgatcagaggtttcagcttgagaagacaatgaagagcctcccttggggatcggaagaggaagatagtgctttgaatcaagttatgacgaccgactcgatgccttcagctcgggtttctagctctcatccagagatgggctcatggactgcacccgacttcaacgcaggagggcctagccaatctatcaagccttcccgccttaggtcgtatgtcatgtcatttgattcagatacgcttcagaggtatgcaacagtcaggtcaaaggaggcctttggcatcattgagaagcacacagaagcactatttgggaaaccagagattgtaatcacacctgaaggcgcagttgattcctccaaggatgagcatattaggataagcttttctgggctgagaaggctgatcctagaggctgttactttcgggtcgttcctctgggacgttgagagctttgtggattccaggtaccatttcgtgaccaactaa

SEQ ID NO: 874 - protein, 334 aa, Sorghum bicolor
MESPAGQLLSQILHTHPHLLSAAAEQQLEQLQTDREAEKEKEKESEAGDKSTPTGGDLVLYRRIAEVKEKERRRTLEEILYALVVQKFVEADVSLVPALSHSIDSSGRVDQWTETVEEKLQRLHSPEAYEMIENHLSLILGQRQGDATIAAISKLRVGQVYAASVMYGYFLKRVDQRFQLEKTMKSLPWGSEEEDSALNQVMTTDSMPSARVSSSHPEMGSWTAPDFNAGGPSQSIKPSRLRSYVMSFDSDTLQRYATVRSKEAFGIIEKHTEALFGKPEIVITPEGAVDSSKDEHIRISFSGLRRLILEAVTFGSFLWDVESFVDSRYHFVTN

SEQ ID NO: 875 - DNA, 1818 bp, Sorghum bicolor
atggcggccgccgccaccgccaccaccacctcgccctcagcctccttccccgcgggggcctccctccgccgcgatgcgcgcaggccctactgcgtagccgccgccaccgccgctgcggcggcgacggccgctgaggcggggctcgcggccgtcccggcgccgccgccgacgcccctggtgcatgtggtgccggagtcgctgcagcgggagagcgggtgcctcgtggcgggctttcgggagcgcgggggcgggggcgcgggcgcgggggacgccgcggtggaaggaggaggccccggcgcgatggagtacctcaccagcgtgctgtcgtccaaggtgtacgacgtcgcaatcgagtcgccgctgcagctcgccaccaagctctccgaccgcctcggggtcaacctctggatcaagcgcgaggacctgcagccggtgttctcattcaaattgcggggagcatacaacatgatggcaaagctcccccgtgagcagttagagaggggcgtcatatgctcctctgctggaaaccatgcccagggtgttgctctttccgctcagagactgggatgcgatgctgtcatcgtcatgcctgtgacaactccagaaatcaagtggaaatcagtggagaggttgggtgcaacggtggtccttgagggggactcttatgatgaagctcagtcatatgcaaaattacgatgtcagcaagaaggccgcacattcatacctccctttgatcatcctgatgtcatcactggacaaggaactgttggcatggaaattgttcggcaactgcaaggtccactgcatgcaatatttgtacctgttggaggtggtggattaattgctggaattgctgcctatgtaaaacgggttcgcccagaggtgaaaataattggagtggaaccctcagatgcaaatgcaatggcattatccttgtgtcatggtaagagggtcatgttggagcatgttggtgggtttgctgatggtgtagctgtcaaaactgttggggaggaaacatttcgcctgtgcagagagctagtagatggcattgttatggtcagtcgagatgctatttgtgcttcgataaaggatatgtttgaggagaaaagaagtatccttgaacctgctggtgccctttcattggctggggctgaagcctactgcaaatactataacttgaaaggagaaaatgtggttgcaataactagtggggcaaatatgaactttgatcgacttagactagtaactgagctagctgatgttggccgaaaacgggaagcagtgttagctacatttctgccagaggagcagggaagcttcaaaaaattcacagaattggttggcaggatgaatattactgaattcaaatacagatacgattctaatgcaaaagatgcccttgttctttacagtgtcggcatctacactgacgatgagctcggagcaatggtggatcgcatggaatctgccaaactgaggactgttaaccttactgacaatgatttggcaaaggaccaccttagatactttattggaggcagatcagaaataaaagatgaactggtttaccggttcattttcccggaaaggcctggagccctcatgaaatttttggacgcgttcagccctcgttggaacatcagccttttccattaccgtgcacagggtgaagctggagcaaatgtattagttggtatacaagtgccgccagcagagttcgatgaattcaagagccatgctgagaatctcgggtacgagtacatgtcagagcacaacaatgagatataccggttgctgttgcgtgacccaaaggtctaa

SEQ ID NO: 876 - protein, 605 aa, Sorghum bicolor
MAAAATATTTSPSASFPAGASLRRDARRPYCVAAATAAAAATAAEAGLAAVPAPPPTPLVHVVPESLQRESGCLVAGFRERGGGGAGAGDAAVEGGGPGAMEYLTSVLSSKVYDVAIESPLQLATKLSDRLGVNLWIKREDLQPVFSFKLRGAYNMMAKLPREQLERGVICSSAGNHAQGVALSAQRLGCDAVIVMPVTTPEIKWKSVERLGATVVLEGDSYDEAQSYAKLRCQQEGRTFIPPFDHPDVITGQGTVGMEIVRQLQGPLHAIFVPVGGGGLIAGIAAYVKRVRPEVKIIGVEPSDANAMALSLCHGKRVMLEHVGGFADGVAVKTVGEETFRLCRELVDGIVMVSRDAICASIKDMFEEKRSILEPAGALSLAGAEAYCKYYNLKGENVVAITSGANMNFDRLRLVTELADVGRKREAVLATFLPEEQGSFKKFTELVGRMNITEFKYRYDSNAKDALVLYSVGIYTDDELGAMVDRMESAKLRTVNLTDNDLAKDHLRYFIGGRSEIKDELVYRFIFPERPGALMKFLDAFSPRWNISLFHYRAQGEAGANVLVGIQVPPAEFDEFKSHAENLGYEYMSEHNNEIYRLLLRDPKV

SEQ ID NO: 877 - DNA, 1311 bp, Sorghum bicolor
atggagctcctcctccgtcggggccacgtggacccctccgccttcgcctctgcctcgctgtcttctaaggacgccaacgctgtccgcactgcgtgcctccaattcgggcgccagcggccggagctcatcaggcatatatcaagatggaatattcaggttgccatgcgatgtggttgtcccagcattgacaggaaggttgtaaactctgggaagcgactgcgggcttatgtaggacttgatgaaggagaggtttgcagccaatgcaatttaagaggaagttgtgatagggcatatgtaaaggctcggaaagaggaagttggaagaactgtggatgttatgcgcatccttttgacttatggtcttgacgttattaccggcaatgtagagaatagagcatgcctgaacaaaactgtcaaggaatcaataaagatcctactaaacgaggttgtcgaggtcgattctaggggacctggttccagcactgtgaaagctgcacaacgcaaaggtcaatctgctgtacccatgaagcagggtgattggaattgtcccaaatgtgactttctgaactttgcaaagaatatcaaatgtttgcgttgcgatggggaattccaagagaggtatcagttgttgcatgaagaccaagagcatctacctctcaaaaagggtgactggatatgcaaaaggtgcaactttttgaattttgctaagaacacaagatgcttgcaatgccatgagaaaccaacaaaccgtttactcaacccaggagaatgggaatgtgtctcgtgtaactatgtgaacttcaagaggaatggattctgcttgaaatgtggctggaaaaggccaaagtctctaaacaatcaagatactattgaatcacgtcatgacttagagcatagtaagacccccagtatttcatttgttcaagacggcgtccagctgaagaggtggcaaagtccgcaaaagagtgcttcaccatctgacgaagattcagatttctggagcgcagacgatgaaggaggtgatagcagggataatgatgcactcctgcaacagaaggactacagatttcttgacagttttcccattgtcgggggcaggactgctaattcccaagatcgtcttgcaagggagaagtggaaggacgaaatgtccaggagaaacaaaggccttcaaactaaggaatcacaagaaagcgttcggccttgtagccccggccgtcttccaagaagcatggaactggttgagtctgatgatgatatcgcttcttggttttcgggtgggaataatattaggaacttggacaagacataa

SEQ ID NO: 878 - protein, 436 aa, Sorghum bicolor
MELLLRRGHVDPSAFASASLSSKDANAVRTACLQFGRQRPELIRHISRWNIQVAMRCGCPSIDRKVVNSGKRLRAYVGLDEGEVCSQCNLRGSCDRAYVKARKEEVGRTVDVMRILLTYGLDVITGNVENRACLNKTVKESIKILLNEVVEVDSRGPGSSTVKAAQRKGQSAVPMKQGDWNCPKCDFLNFAKNIKCLRCDGEFQERYQLLHEDQEHLPLKKGDWICKRCNFLNFAKNTRCLQCHEKPTNRLLNPGEWECVSCNYVNFKRNGFCLKCGWKRPKSLNNQDTIESRHDLEHSKTPSISFVQDGVQLKRWQSPQKSASPSDEDSDFWSADDEGGDSRDNDALLQQKDYRFLDSFPIVGGRTANSQDRLAREKWKDEMSRRNKGLQTKESQESVRPCSPGRLPRSMELVESDDDIASWFSGGNNIRNLDKT

SEQ ID NO: 879 - DNA, 684 bp, Sorghum bicolor
atgccgcctaaatccgatagcgttgaaggaatcgtcctgggtttcgtcaatgagcaaaacaggccattgaattcacagaatgcagctgatgcactacagaagtttaatcttaagaagactgcagtacaaaaggcactggatgcattggctgacagtggacagatttccttcaaggagtatggcaagcagaaaatttacattgctcggcaagatcaatttgagattccaaatggtgaagaacttgaggagatgaagaaaagaaatgccaagttacaggaagaactcgcggatcaaaagaaagcaattagtgaggttgaatctgaggtacgaggtctgcagtcaaacttgacgctggcagagattacgtcaaaggagactaaattacaaagcgaagtccaggaaatggaagagaaactaaataaattgcggagtggtgttaccttggtgaaacctgaagacaggaagatcattgagaattcctttgctgagaaagttaaccaatggaaaaagcggaagaggatgttcaaggagctttgggataatattactgagaatagcccaaaggatcagaaggaatttaaggaagaacttggtctcgagtatgacgaagatgttgatgtgaacctgcagtcttactctgatatgctagcaagtctaaacaaaaggcgaaaaatttcccgctga

SEQ ID NO: 880 - protein, 227 aa, Sorghum bicolor
MPPKSDSVEGIVLGFVNEQNRPLNSQNAADALQKFNLKKTAVQKALDALADSGQISFKEYGKQKIYIARQDQFEIPNGEELEEMKKRNAKLQEELADQKKAISEVESEVRGLQSNLTLAEITSKETKLQSEVQEMEEKLNKLRSGVTLVKPEDRKIIENSFAEKVNQWKKRKRMFKELWDNITENSPKDQKEFKEELGLEYDEDVDVNLQSYSDMLASLNKRRKISR

SEQ ID NO: 881 - DNA, 876 bp, Sorghum bicolor
atgggaaccgtgctcgattcgcacttcctggcgctcaccgccatcgttactgtggggtaccagctgctgttcttcatcatcacagctctcctccggttcgataaggtcacggatttcgcaggcagtacaaattttgtcataatcgccatcctaacattagttttgaagggagcatggcattttcgtcagattgtgctgacagtgcttgttaccatttggggtcttcgcctaggactatttttattgatgaggattctgcaatggggtgaagaccgacggtttgacgaaatgcgtgataatttggggaaattagcatttttctggattttccaggctgtttgggtttggactgtcagcttgcctgtcactgttgtgaatgcaagtgacagaaacccctcgattgaagccagggacataatcggttggataatgtggttggttgggatatgtgtagaagcaacagctgatcagcagaagcttgtgttcaagaattctccaagtaataggggaaagtggtgtaacgttggtctttggaagtattctcgccacccgaattactttggggagatgttcctttggtggggaatatttgtagcatcaaccccagttctctcagatgctgaatggcttgtgattcttggacctatattcctgactcttctgcttctttttgttagtggaatcccactccttgagtcatctgctgataagcgctatggacgaatggaggaataccgtgtatacaagaacactacaagccctcttatcccattgccaccagccgtgtacggttccctgcctgcatggttcaaggttgccttcctccttgagctccccctctacaatcctgggccaggagctgatccaatcagttga

SEQ ID NO: 882 - protein, 291 aa, Sorghum bicolor
MGTVLDSHFLALTAIVTVGYQLLFFIITALLRFDKVTDFAGSTNFVIIAILTLVLKGAWHFRQIVLTVLVTIWGLRLGLFLLMRILQWGEDRRFDEMRDNLGKLAFFWIFQAVWVWTVSLPVTVVNASDRNPSIEARDIIGWIMWLVGICVEATADQQKLVFKNSPSNRGKWCNVGLWKYSRHPNYFGEMFLWWGIFVASTPVLSDAEWLVILGPIFLTLLLLFVSGIPLLESSADKRYGRMEEYRVYKNTTSPLIPLPPAVYGSLPAWFKVAFLLELPLYNPGPGADPIS

SEQ ID NO: 883 - DNA, 1515 bp, Sorghum bicolor
atggacgctcggtgggcggtgctgctcgcgctgctggtcgccagcggcggcggcggcggtgtccgtgtctgcgccgcgggggcgaagggcgccaactggctgggcgggctgagccgcgcgtcgttccccaaggggttcgtgttcgggacggcgacgtcggcgtaccaggtcgagggcgccgcgtccaccaacggccggggaccctccatctgggattcattcgcgcacgtcccaggaaatattgcggggaatcaaaatggagacgttgcagtggatcaataccatcgctacaaggaagatgttgatctcatgaagagtttgaattttgatgcctaccggttttcaatctcgtggtccaggatcttcccagatggcgaggggaaagtcaatccagaaggtgtagcatattacaataatctgataaactatctgcttcagaaaggcatgactccttacatcaacctttaccactatgatcttcctcttgcgcttgagaagaaatatggagggtggttaagcgctaagatggcggacctgtttacagactatgctgacttctgttttaagacctacggtgatcgcgtaaagcactggtttacattcaatgagccaaggatagcagcgctacttggctatgacgtgggatcaaatcctcctcaaaggtgcaccaaatgtgctgctggtgggaattcagcaaccgaaccttatattgttgctcataattttctcttggcacatgctgctgcagttgcaagataccgtacaaaatatcaggctgcccagaagggtaaggttggaattgtcctggacttcaactggtatgaagctcttacaaactcacctgatgaccaagcagcagcccaaagagctagggacttccacattggctggtttgttgatccattgataaatggacattatccacaaataatgcaagatcttgtgaaagagaggctacccaggttcactcctgagcaagctaaattggtcaagggctcggcagactacattggtatcaatgaatacacatccagctacatgaagggacagaaactgctccagcagacgcccagtagctactctgccgattggcaggtccaatatgtttttgcacgcaatggcaaaccaattggaccaaaggcgaattctaattggctttacatcgtcccgacggggatgtatggatgtgtgaactacctcaaggagaagtatgggaatccaactgtctacattaccgagaatggaatggatcagcctggaaacttgacccgtgaccagtacctgcgcgatgccacaagggtgcggttctacagaagctacattggccagctgaaaaaagccatagatcagggcgcaaacgtggctggctacttcgcctggtctctccttgacaacttcgagtggctgtcaggatactcgtccaagtttggcatcgtctacgttgacttcaatacgctcgaacggcaccccaaggcgtcggcctactggttcagggacatgcttcagaagcattga

SEQ ID NO: 884 - protein, 504 aa, Sorghum bicolor
MDARWAVLLALLVASGGGGGVRVCAAGAKGANWLGGLSRASFPKGFVFGTATSAYQVEGAASTNGRGPSIWDSFAHVPGNIAGNQNGDVAVDQYHRYKEDVDLMKSLNFDAYRFSISWSRIFPDGEGKVNPEGVAYYNNLINYLLQKGMTPYINLYHYDLPLALEKKYGGWLSAKMADLFTDYADFCFKTYGDRVKHWFTFNEPRIAALLGYDVGSNPPQRCTKCAAGGNSATEPYIVAHNFLLAHAAAVARYRTKYQAAQKGKVGIVLDFNWYEALTNSPDDQAAAQRARDFHIGWFVDPLINGHYPQIMQDLVKERLPRFTPEQAKLVKGSADYIGINEYTSSYMKGQKLLQQTPSSYSADWQVQYVFARNGKPIGPKANSNWLYIVPTGMYGCVNYLKEKYGNPTVYITENGMDQPGNLTRDQYLRDATRVRFYRSYIGQLKKAIDQGANVAGYFAWSLLDNFEWLSGYSSKFGIVYVDFNTLERHPKASAYWFRDMLQKH

SEQ ID NO: 885 - DNA, 1248 bp, Sorghum bicolor
atgcttgatttgcaacttggcattaggtatacagtaggtaaaatcacccctgtgcctttgcgcgaagttcgttcaaatgattttggacctcgagcacggataagaatgtacttccctactgaaggctcgcagtatacgcctccacaccactctgtcaatttcttttggaaggattattgccctatggttttccggaatcttcgagaaatgttccacattgatgctgcagattacatgatgtccatatgtggtgatgacagtctgaaagagctttcttcacccgggaaaagtggcagtattttctatctttcacaggatgaacgttttgtcataaaaaccttgagaaaagctgagctgaagatactgttgaagatgcttccaaaatattacagtcatgtcagagcttatgataatacgctcattacaaaattctttggcgtgcacaggattactctgaaaggtggcagaaaggttcgctttgttgtgatgggaaatatgttctgcactgagctgcgaattcatcgtaagtatgacttgaagggttctacacaaggccgatcaacaaaaaagcaaaatataaatgagaacacaacactgaaggaccttgacctttcatatgtttttcatgtggataaaccatggcgggacgcacttttcaggcaaatatcacttgattgtatgttcttggaatcccagtctatcattgattatagcatgctcttggggatccattttagagctccttatcacctgaagacatcttcatcacatcagagcagtcttgaaagatgcggaattccagatagtgaactgttgcaatatgaggaaaaaagttcctggaagggatttttgcttgttgctcatgagccaggcactacagttggtggttcccacataagaggaagcatggttagagcatcggaagctggttatgaagaagttgatcttgttttaccaggcactggacggtttcgtgtgcagttaggggtgaatatgccagctcgagcccggaaagtgcatgagtacatgaacacggaacttgaaaacccaaataccattgaggagtacgatgttgttctttaccttggtattatagacatattacaggagtacaatatgtcaaaaagggtcgagcatgcagtcaaatcactcaagttcgatcccctttcaatatcagctgttgatccgaattcgtactcaaaacgatttgtaaagttccttgagagtgttttccctgaacaagactga

SEQ ID NO: 886 - protein, 415 aa, Sorghum bicolor
MLDLQLGIRYTVGKITPVPLREVRSNDFGPRARIRMYFPTEGSQYTPPHHSVNFFWKDYCPMVFRNLREMFHIDAADYMMSICGDDSLKELSSPGKSGSIFYLSQDERFVIKTLRKAELKILLKMLPKYYSHVRAYDNTLITKFFGVHRITLKGGRKVRFVVMGNMFCTELRIHRKYDLKGSTQGRSTKKQNINENTTLKDLDLSYVFHVDKPWRDALFRQISLDCMFLESQSIIDYSMLLGIHFRAPYHLKTSSSHQSSLERCGIPDSELLQYEEKSSWKGFLLVAHEPGTTVGGSHIRGSMVRASEAGYEEVDLVLPGTGRFRVQLGVNMPARARKVHEYMNTELENPNTIEEYDVVLYLGIIDILQEYNMSKRVEHAVKSLKFDPLSISAVDPNSYSKRFVKFLESVFPEQD

SEQ ID NO: 887 - DNA, 561 bp, Sorghum bicolor
atggccgcgaactcccccttcgactgcgtgctcctagacctggacgacaccctgtacccgggcaacaccggcatcggccccgccctgaagcgcaacatcgacgagttcctgcaggccaagctcggcgtctcggcggagaaggccgccgccatgcgcgtcgagctcttccgcacgcacggcagctccctcgccggactcatcgcgctcggctatgacgtgcacccggacgagtaccacagctacgtgcacggcaggctaccgtacgacatgatccccgccgacccgcagctggcgcgcctgctgcagagcatcccgcagcgcaaagtgctcttcaccaactcggaccgggcgcacatgaagcgggcgttggagcggctgggcgtggacgaggccgtcttcgacgccgtcgtgtgcttcgagaccatgaacccgcacctcttcggcggcgaggccagagaggagcgcgtcgacggcggcgaccacccggtcgtggtcctcaaaccggcggtggacgccatcgtggcggggctgcgcgccgccggctccaacccacgccggacg

SEQ ID NO: 888 - protein, 272 aa, Sorghum bicolor
MAANSPFDCVLLDLDDTLYPGNTGIGPALKRNIDEFLQAKLGVSAEKAAAMRVELFRTHGSSLAGLIALGYDVHPDEYHSYVHGRLPYDMIPADPQLARLLQSIPQRKVLFTNSDRAHMKRALERLGVDEAVFDAVVCFETMNPHLFGGEAREERVDGGDHPVVVLKPAVDAIVAGLRAAGSNPRRTLFLDDSERNITAGKALGLRTALVGKRVRSKDADYALENIGALRRVIPEIWGVVAGGESERSDHSIDKMPMRSDLDSIIQPTSIQA

SEQ ID NO: 889 - DNA, 3816 bp, Sorghum bicolor
atgtttgagagtcctgtggcaccagttttgttgttagtgatcctaatcttctcaagccacatcatctcgttgacatctattatcggtagtgatgtgattttaaagaacacttttggtgttaaactgccagattctgcacatcatctcctacttaagggtttcgccatcattccttgtatctactgtggaaaggtcgctggttttgaagggatatatcagttacttattatctgtccagttatccaggctatgttccttccttccactgttatcccccttatccgtatttcctcatcaagattaatcatgggctgctacaaaatatctttatatgttgaaatacttgccactcttgcatttcttcttatgctgtttgcaaatatcatttttgtggcggaaatcctgtttggtgatagcacctggacaaacaacctcaaaggaaacaccggatccggccctgttttacttccatatattgtcatagtcctaacttcttttgcaagtattgcttttacgctattccttgctgttactccactaaagtcagcaagtaatgaagctgaaaacgagaatttgtctgtgtgctcacatagtgaagcattgaacattgctcactatagagaagagacttctcttgaaagtgttccacttgaagaagttcagtggtcgtctattgctgttgctccgagggattcgttggaaggtcatcagaaatcagctttggagtataccgagtgttctgataccgctacagagtctgatcatgatgctcaagaaccaacatctcataggacagtggatcctgaagctcacctctcaccgcctgcattccgtgatgagccaaaatttgttgaggttgactggacagagccaatgtcaatagtttgtactgacaccatagtagaacaaagtactgcagagaacatcaaagtgaagagcgcgactgagaagattgttccagtggaaccagatgtttgcgcacagaaggattctgaggtgtcacatgatttggaatttgacaagtcctatggaggtaaggtaccttctttcccttctggtggcccaccatctcttatgttgagcaggggagatgatactgatgctggtaatgtcagtggtttcatctcaaaacagtctggtttgggacgtgcagcaaggagacagttagcagcaattcttgatgagttctgggggcaactttttgattatcgtggtaaacttacacaagaggccaacaataaaagcttcaactatttgattggactggacttgagagcagctggttctgctgtgaggaaagataacctatcaattgaagcttccagtaactcaatgatgagagatgtaatgcaagggtcagctactgtattgaacacatgggattctcatgataaagatatcactaatcaagacacaggtatctgtctgcaggtgggtaccatgggtccaccaacatggtctcaaagcatgcatttaccaaatagagatattccaagttcaggcagaaccttctttgagcaaaatgctaaattattttcaaattttcatactccatcttactccagtaaccagttttatcaaccggctaccattcatgggtatcagctagcaaactatttgaaagggataaatgcaagtcgaaatccatactctagcactccattggacccatggcaacctcctagatcttctgaatctgctattcccacctatactggctctgcaatgaatgctcatacgcataatctccttggttcatttggagatagctctttgcaaagcccgacattgaaccgctcaagtacaatggcagtggaaagatcctattatgatcctatctccattggtgggagtgatagtgttggctcatctgctaactcaaagaagtaccacagttcacctaacatatctgcggtaattgctgcgagcagagatgctttgttgaatgaagcaagtttgggtcctgctgcaaatctagcatacctgactagtttggcatctgaaaaatcacggtatgtggacttagcagtcagaccatcatctccacttactgagttgtcacaacataatgttcagagagagatgctctctacacattcgggtacaaacaccaaaaccaaattcctttggtcccaacagccatttgaacaattatttggtgtgttaagttcagaggtgaataggagtgaggtgaacactggccagggagcatgtagtgccatgaaggatgatttctcttacacacagtttgaggcagaacttcttaagtctcttagattttgcatcatgaagctcttgaagctggaaggatcggagtggctgtttcgtcagaatggcggttgtgatgaaaatctaattgataaagtctctgaaaccgagagagtttcacagggaggaaccagtgatgacagagataccagttctgtgcacagagtgccaaattgcggagatggttgtgtttggcaggcttcactgattgttagttttggtgtctggtgtatccatcgggtgctagacctgtcccgtgtggaaagtagaccagaactttggggcaagtatacatatgttctcaaccgtcttcaggtgattccttttgactgcacacctgtttcccagcgaactacacatcttgttcttatgccagtagaaaaggcaggctcggttggcaaacccatccccggcagcttcatcacggcagccatgatactggaggtgatcaagggcgtggaacaagccgtctcaggccgcaagggccggagcggaacagcagctggagatgtggcctttcccaaagggaaggcgaacctgctctctgtgctcaagcgatacaagcgcaggcttggcaacaagacgccgcctaggcggttagcgaaattcgagttcggaagcaaccaagtcatcgatgtcgccgaggctcgccacttgcgaattgccatggacgatggcagccatatcatctcattgacatgcattgttagtggtgatgtaatttcagagaacttctttggtgttaaactgcctctttcggcacatcatctgctacataagggtttggccatgattcttactatctactgtgcgaaggttgctggttctgaagggatatatcagttgcttattatattattgatgggaagatacaggatagctttatgtgttgaaatttttgccttccttgcattccttcttgcggtgttcacaaatataattttcacagcagagattctgtttggtgatagcacttggacaaacaacctgaaaggagatactggaagccctgccatacttccatattctgttatagtcctagcttcatgtgcctcaattggatttacactgttacttgctgttactccactaaaatcagcaagtaatgaagctcagactcatttgtcgtccgtgcactcacaaagagaaacattgggcactactcatagagaagcaacttgtcttgaaaaaaatgaggatgaagaatttgaaagctgttctgttggagcttttcttatgggttcatcggaagttggtgttgagtggacgcaagcagttccagagatctgtactatcatcgtagtagaacatagcgtttcagaatgtttcgagatgaagccctcaaatgaaatggtggttaaacaagaaggtgaagacaactcagatgagggtgacataggccccccaccggctctcctccatctgccacggcggcggcccgcggcggctaggccaccggcgctgccctccggcgtgcggtggcagcagcccacggcggccctaaaagtttgggtgctgttcgtgcctccgtggcggagccagaaataa

SEQ ID NO: 890 - protein, 1271 aa, Sorghum bicolor
MFESPVAPVLLLVILIFSSHIISLTSIIGSDVILKNTFGVKLPDSAHHLLLKGFAIIPCIYCGKVAGFEGIYQLLIICPVIQAMFLPSTVIPLIRISSSRLIMGCYKISLYVEILATLAFLLMLFANIIFVAEILFGDSTWTNNLKGNTGSGPVLLPYIVIVLTSFASIAFTLFLAVTPLKSASNEAENENLSVCSHSEALNIAHYREETSLESVPLEEVQWSSIAVAPRDSLEGHQKSALEYTECSDTATESDHDAQEPTSHRTVDPEAHLSPPAFRDEPKFVEVDWTEPMSIVCTDTIVEQSTAENIKVKSATEKIVPVEPDVCAQKDSEVSHDLEFDKSYGGKVPSFPSGGPPSLMLSRGDDTDAGNVSGFISKQSGLGRAARRQLAAILDEFWGQLFDYRGKLTQEANNKSFNYLIGLDLRAAGSAVRKDNLSIEASSNSMMRDVMQGSATVLNTWDSHDKDITNQDTGICLQVGTMGPPTWSQSMHLPNRDIPSSGRTFFEQNAKLFSNFHTPSYSSNQFYQPATIHGYQLANYLKGINASRNPYSSTPLDPWQPPRSSESAIPTYTGSAMNAHTHNLLGSFGDSSLQSPTLNRSSTMAVERSYYDPISIGGSDSVGSSANSKKYHSSPNISAVIAASRDALLNEASLGPAANLAYLTSLASEKSRYVDLAVRPSSPLTELSQHNVQREMLSTHSGTNTKTKFLWSQQPFEQLFGVLSSEVNRSEVNTGQGACSAMKDDFSYTQFEAELLKSLRFCIMKLLKLEGSEWLFRQNGGCDENLIDKVSETERVSQGGTSDDRDTSSVHRVPNCGDGCVWQASLIVSFGVWCIHRVLDLSRVESRPELWGKYTYVLNRLQVIPFDCTPVSQRTTHLVLMPVEKAGSVGKPIPGSFITAAMILEVIKGVEQAVSGRKGRSGTAAGDVAFPKGKANLLSVLKRYKRRLGNKTPPRRLAKFEFGSNQVIDVAEARHLRIAMDDGSHIISLTCIVSGDVISENFFGVKLPLSAHHLLHKGLAMILTIYCAKVAGSEGIYQLLIILLMGRYRIALCVEIFAFLAFLLAVFTNIIFTAEILFGDSTWTNNLKGDTGSPAILPYSVIVLASCASIGFTLLLAVTPLKSASNEAQTHLSSVHSQRETLGTTHREATCLEKNEDEEFESCSVGAFLMGSSEVGVEWTQAVPEICTIIVVEHSVSECFEMKPSNEMVVKQEGEDNSDEGDIGPPPALLHLPRRRPAAARPPALPSGVRWQQPTAALKVWVLFVPPWRSQK

SEQ ID NO: 891 - DNA, 1470 bp, Sorghum bicolor
atgccgctagcttctctgtcgctggaccccgcccccttccctctcatccgccccgccgccggctggagcggacgcgtcctcccggtcccggggcctgcaccgcgcctatgtcggccgctgagggcggctcccgtggcacccgctaccacggatgagccctctgcggccgcgcgcggccggctggagtcgctgagccaggtggccggggtgctgggcacgcagtggggcgacgagggaaagggaaaactcgtcgacatcctcgcccagcgcttcgacgtcgtcgctcggtgccagggtggagctaatgctgggcataccatatacaattctgaagggaagaagtttgcacttcatcttgttccgtcaggcatccttaatgaaaacactcagtgtgtgattggtaatggagtagttgttcatcttcctggattctttaaggaaattgatgggctagagtctaatggaatttcttgcaagggaaggcttttggtatcagatcgtgcccatcttttgtttgatcttcatcaagttgttgatggtcttagagaggtagagcttgggaattcccttatagggacaacaaagagaggaattggaccatgctattcaaacaaggttacaaggaatggactcagaattagtgatctgcgacatatggatacctttggtgcaaaactcaacaacctactaagagatgcagctctacgcttcaaagattttgaatacaatagcaagattctcaaagaggaagttgagaagtataaaaggtttgctgaacgattggaaccttttatcactgataccgtgcatttcatgaaccagtcgattttgcagaagaagaaaatattggttgaaggtggtcaagctaccatgttagacatagactttgggacctacccctttgttacttcctcaagtccctcagctggtggaatctgtactgggcttggtattgctcccagaagtctcggtgatatcattggagtggtaaaagcctacacaactagggttggatccggtcctttcccaacagaactattgggtaagactggtgatttgcttcgtgcttctggaatggaatttggtactacaacaggtcgtcctaggcgttgtggctggcttgatatagttgcacttaaatactgttgccaaatcaatggtttctcatctttgaatctcacaaaactcgatgtcttaactggactcaaggaaattaagctgggtacctcatactacactgatgacggtaacactgttcaatcattcccagcagatcttgatcttctagagcaaataaaggtcaaatatgaggccctacctggatgggaggaagacatttcctcaatacgagactacagtgatctcccagaaactgctcgtcgctatgtggagaggatagaggaactggtcggcattccagtccactacattggtgtcgggcctggacgtgacgccctcatatacaaataa

SEQ ID NO: 892 - protein, 489 aa, Sorghum bicolor
MPLASLSLDPAPFPLIRPAAGWSGRVLPVPGPAPRLCRPLRAAPVAPATTDEPSAAARGRLESLSQVAGVLGTQWGDEGKGKLVDILAQRFDVVARCQGGANAGHTIYNSEGKKFALHLVPSGILNENTQCVIGNGVVVHLPGFFKEIDGLESNGISCKGRLLVSDRAHLLFDLHQVVDGLREVELGNSLIGTTKRGIGPCYSNKVTRNGLRISDLRHMDTFGAKLNNLLRDAALRFKDFEYNSKILKEEVEKYKRFAERLEPFITDTVHFMNQSILQKKKILVEGGQATMLDIDFGTYPFVTSSSPSAGGICTGLGIAPRSLGDIIGVVKAYTTRVGSGPFPTELLGKTGDLLRASGMEFGTTTGRPRRCGWLDIVALKYCCQINGFSSLNLTKLDVLTGLKEIKLGTSYYTDDGNTVQSFPADLDLLEQIKVKYEALPGWEEDISSIRDYSDLPETARRYVERIEELVGIPVHYIGVGPGRDALIYK

SEQ ID NO: 893 - DNA, 309 bp, Sorghum bicolor
atgtcggcgccgtggtgggactcggactggaaggaccgctccgggccggagtaccgcgctttcgtgagcaacctaccctacagcaccaacgacggctccctcaaagacgccttctcctcctacggccccctcaacgccgatgtcgcgtatgaccgtgacacggggaggtcacgtggctttgggttcgtgcagttcgatgacaagaagtcgatggacaacgccatccaggggatgaacggccagcaggtcggcggccgcacagtctccgtcagccaggcgaacgagcgcccccgccgctggagggcgtga

SEQ ID NO: 894 - protein, 102 aa, Sorghum bicolor
MSAPWWDSDWKDRSGPEYRAFVSNLPYSTNDGSLKDAFSSYGPLNADVAYDRDTGRSRGFGFVQFDDKKSMDNAIQGMNGQQVGGRTVSVSQANERPRRWRA

SEQ ID NO: 895 - DNA, 1584 bp, Sorghum bicolor
atgcctatccccaaggccgacgagctggttgtgcacgccgtcaaggagcagttcgtcggcctcgacttctgcatcaccagccccccgccatggctcacgacgatcctcgtgggcttccagcactacctggtgatgctcggcaccaccgtcctcatcgccaccatcatcgtcccgctcatgggcggcggccattatgagaaggcgattgtgatccagaccatcctgttcctgtccgggatcaacacgctgctgcaggtccacttcggcacgcggctccccgccgtgatgagcggctcctacacctacatctacccggccgtcgccatcatcctcagcccccgatacgcgctcgtcatcgaccctctcgagaggtttatcttcacgatgaggtcgctccagggcgcgctcatcatcgccggcgtcttccaggccgtcgtcggcttcttcggcatatggagagtcttcataaggttcctcagccctctcgcggcggtccccttcgtcacgctctcgggcctgggactcttctacttcgcgttccccggggtcaccaaatgcatcgaagtgggtctcccggccctcgtcctcgtggtgatcttcgcggagtacgccgcccactacttcgccaaggggagcatcgttttcggccggtgcgccgtgctggtgaccatcatcgtcgtgtggatctacgccgagatcctgacggcggccggcgccttcaacaataggggccccgtgacgcagttctcctgccgctccgaccgcgccgggatcatcgagggctcaccttgggtgaggtttccgtatccgttccagtggggatacccgattttctgcttccaggattgcttcgccatgatggctgcttcttttgcatcacttattgagtctaccggcaccttaattgcagtgtcaagatacgcaggcgccacgttcaccccaccctccgtgttctcgcgtggagttggctgggagggcatatctatcatactggacgggatgtgcggtacactgacaggaactgcagcttcagttgagaatgcaggcctgttggcagtgacgcgcgttggaagccggcgagttgtaaagatcgcagccttgttcatgattttcttctcattgtttggcaaattcggggcggttcttgcatccattccattgccgcttttcgctgcggtgtattgtgtcctctgggcttatgcagctggtgcaggcttcgccttccttcagtactgcaacctcaactccttgagaacaaagttcatactcagcatctcgatattcctgggactgtccatcccacagtacttccggatctacgagatgttcttcggcttcggaccagttcacacccattcagtcgcgttcaatgtgatggtcaatgtcatcttctcgtcgccggcgacggtggccgccatactggcctactttctggacgtcacccacctgtactgggaggctagtgtgaagaaggacaggggttggttctggtgggagaagttcaagaactacaagtatgatgccaggagcgaggagttctaccgtcttccttatggcttgagcaggtacttcccctcgctttag

SEQ ID NO: 896 - protein, 527 aa, Sorghum bicolor
MPIPKADELVVHAVKEQFVGLDFCITSPPPWLTTILVGFQHYLVMLGTTVLIATIIVPLMGGGHYEKAIVIQTILFLSGINTLLQVHFGTRLPAVMSGSYTYIYPAVAIILSPRYALVIDPLERFIFTMRSLQGALIIAGVFQAVVGFFGIWRVFIRFLSPLAAVPFVTLSGLGLFYFAFPGVTKCIEVGLPALVLVVIFAEYAAHYFAKGSIVFGRCAVLVTIIVVWIYAEILTAAGAFNNRGPVTQFSCRSDRAGIIEGSPWVRFPYPFQWGYPIFCFQDCFAMMAASFASLIESTGTLIAVSRYAGATFTPPSVFSRGVGWEGISIILDGMCGTLTGTAASVENAGLLAVTRVGSRRVVKIAALFMIFFSLFGKFGAVLASIPLPLFAAVYCVLWAYAAGAGFAFLQYCNLNSLRTKFILSISIFLGLSIPQYFRIYEMFFGFGPVHTHSVAFNVMVNVIFSSPATVAAILAYFLDVTHLYWEASVKKDRGWFWWEKFKNYKYDARSEEFYRLPYGLSRYFPSL

SEQ ID NO: 897 - DNA, 540 bp, Sorghum bicolor
atggacgacgccacggtcgcatcgcggcagcgccagcagcagcagccggcctcgccggcgacgacgacgaaggattccagggacatgatggcggagctggacgcgccgctgcacgccctcgggttcgagatggaggagctctccccgtcgcggctcaccggccgcctccccgtcactcgcatctgctgccagccgttcaaggtgctgcacggcggcgtgtcggcgctggtggcggaggcgctggcgagcatgggcgcgcacatggcgtccgggtacagccgcgtcgccggcgtgcagctcagcatcaaccacttccgcagcgccgccctcggcgacaccgtcctcgcgcaggccgtccccgtccacgtcggacgctccacacaggtttgggaggtaaagctctggaagatggatgcatccacaggagagaaggggcctcagatcgccgaatccagagtcaccctgctgtctaacctgccgttgtcggagaagcacaagacggcaggagatgctctaaagaaatatgcatcaaaactgtag

SEQ ID NO: 898 - protein, 179 aa, Sorghum bicolor
MDDATVASRQRQQQQPASPATTTKDSRDMMAELDAPLHALGFEMEELSPSRLTGRLPVTRICCQPFKVLHGGVSALVAEALASMGAHMASGYSRVAGVQLSINHFRSAALGDTVLAQAVPVHVGRSTQVWEVKLWKMDASTGEKGPQIAESRVTLLSNLPLSEKHKTAGDALKKYASKL

SEQ ID NO: 899 - DNA, 2277 bp, Sorghum bicolor
atggagaaattgttggaggtgcttatagcaataagtgatgaagtcgcatgcctttctgtagcaaatttaatacttaagagttggccatcacatcatcgtgctttacatgtgaagaagaccattgaatgtgctgaaccggtaccttttgcacctcggggtattgacatacttgaacccaagcatgcaaaactcatcttttccaataaaagaaaatctgtagatgatgaaatctgtcaagaaatagggacaaagaagagtaaacagagtgctacattgcaattgaatgaagcaaaatggttggcccttttagatggtatcctaagcttcataagtgcaaacaacgagaaggctggtgaatataattgcacaaatactgttgataggtgttcagtcagcgagagtagtgacaaggggcttgcttataacatgattgatgttgtcatatctacagatacaataaaaaatgtggaatctgctggtggaaatggaaatgattcacaccatgatggtcagattctgccatttcatgattgcaaaactccacttaaagagaaagatgctaattctgatagggaacatcctcatgaaagacggagcacgcgccttgagagactgcgaagtcgcaaatctggaaaagatgaaaatggatctgatggtaaagatatatcacatgctatgacccagtttcttgaatcatttattctaaaaggaccaagtcctgtagaaaaggttgatttttctggaaatgctgatgcttcaaatcctgacactctcaactatacatccgatgaggaggcaaatgattttaagcaatttctatgcaagatatccaaaaattttggccctcaacacattggttgtatgttacttgaggagatgtcttatctcaaagtgccattccaagattattttgtcaagttcattgaactggacaaacttactagaggctgggctgaagacaaatctgcactgtgcaatttatttctagctgaactgtactatgatcgggctttgtgttctggaagcccatcaacatcttctgagctgtctgagtcatcttaccatctttgtaagatcattgaatcagtagctctggaactgccattcaacacatctgttggagaaatgcattctgccaacttggatatgggaagtagtagggcaggtgaatcttcaagtgatgtaaatgggagaagtcatgaaaattctgacaaatctggtcacgttgatatgcttagtgatcaaaagtccaaacatgattcttcttcaaacatgaattgtgcattctggattcgcttcttctggctgagtggttgtctgtccctttcatcagactgcaaagagaaagcttataaggagttcaatattgccctgtcaatactaaaaaatagcaacaaaaccaaaagctatggagaggtcattcttctacctcacaccaagcttataaaatcactgacaactgataggattcttcgtgaaattaacttgatcaggcttgaatcactcctttggaataatgacgagaatatcaacaaaataactcatacagagttcatgcaattgctacctccacttttgctttccaccaaagatgcctatgttggatatgcatatggtccacaaagagaaagcgagaatgttatttcacttgagttgtctgccttggatgtcttaatatctgcatgtgaaaaagcaaaaccaatgaacatcaaggtatatcttgactcccatcgaagaaaaattcaagttctaactgtggcagctggcatggttggatcgggtacacccctgaaagcgaaaggttcaagcgacgtggactttgtggaagcaatgaacaggaaccggctagaaaatgttgtggaagcagtcaaagatgtgtctcgaaatgccagtaaagcaaaagacataattgatcaatgtgataattctgtgaatgcagcaattgcattttgcaagctccagcaccttgatcctacaatatccatcaaaactcaggttgacttaatcgtcgcagtccatgatttgcttgctgagtatgggctctgttgtgctggaagggacggtgaaggggaggaagggacattcctcaagttcgcaatcaaacatctcatggctctagatgtgaaactaaaatctcaacttaattcgaatgggatggaagaagatgtagttccaaaagacggcagagaagaagatagtatggccgatgaaccatcagttagtgacagtaagcagaactctgatgatgaggaagaatcggaaaactggcttggttaa

SEQ ID NO: 900 - protein, 758 aa, Sorghum bicolor
MEKLLEVLIAISDEVACLSVANLILKSWPSHHRALHVKKTIECAEPVPFAPRGIDILEPKHAKLIFSNKRKSVDDEICQEIGTKKSKQSATLQLNEAKWLALLDGILSFISANNEKAGEYNCTNTVDRCSVSESSDKGLAYNMIDVVISTDTIKNVESAGGNGNDSHHDGQILPFHDCKTPLKEKDANSDREHPHERRSTRLERLRSRKSGKDENGSDGKDISHAMTQFLESFILKGPSPVEKVDFSGNADASNPDTLNYTSDEEANDFKQFLCKISKNFGPQHIGCMLLEEMSYLKVPFQDYFVKFIELDKLTRGWAEDKSALCNLFLAELYYDRALCSGSPSTSSELSESSYHLCKIIESVALELPFNTSVGEMHSANLDMGSSRAGESSSDVNGRSHENSDKSGHVDMLSDQKSKHDSSSNMNCAFWIRFFWLSGCLSLSSDCKEKAYKEFNIALSILKNSNKTKSYGEVILLPHTKLIKSLTTDRILREINLIRLESLLWNNDENINKITHTEFMQLLPPLLLSTKDAYVGYAYGPQRESENVISLELSALDVLISACEKAKPMNIKVYLDSHRRKIQVLTVAAGMVGSGTPLKAKGSSDVDFVEAMNRNRLENVVEAVKDVSRNASKAKDIIDQCDNSVNAAIAFCKLQHLDPTISIKTQVDLIVAVHDLLAEYGLCCAGRDGEGEEGTFLKFAIKHLMALDVKLKSQLNSNGMEEDVVPKDGREEDSMADEPSVSDSKQNSDDEEESENWLG

SEQ ID NO: 901 - DNA, 1377 bp, Sorghum bicolor
atggcgtccgtggcgctgtcctcgtcgtcgcaggccggcctcctcgtcctcccgtcgccgctcctgaagccggccgtcggcgcatgcctccgctaccgcctgccgaggctgcctccggggctctcgagcgtgaggaagggagggatcctgccgctgccgatcctggtgcctccccgggccgtggagggcaatgacgggcgggccgcagtgaccaaggaggaggtggaggaggaggaggaggaagaggaggtcgaggtgaccaaggagggcgaggaggatactcaggagaggggaggtactactggttccacgaaggaggacgcggcaaggggttcggagcggttcgcggcggactacatcccgctcggcatcagggagcccgtctacgaggcgatagaagtgagatctaatgggaggatgtccaccaaaaaaataagcaggcggcagctactgaaatctagtggtctccgcctacgagatactagaagcgttgacccatcactatggttaatgaattcaatgccttccctgctggtacgtgagcaagctattttgctcaatcttggttccttgcgagcaattgctatgtatgagcgtgttcttatattcaactataacagcccaggagggaaggcctttctagggttattactgcctaggttaaatccaagaaacatcaatggtgggcctgcaatgccttttcagcttgaggttgttgaagctgcacttatttctagaatacaaagattggagcagagactaatgaaaattgagcctcatgtggctacattgctagaagttctaccaaatcgattgacagctgatgtgctggagcagcttcgtctaagtaaacaagcattggttgagctgggttcacgagcaggtgacctcaaacaaatgcttattgatctcctggatgatcctcatgaaatccgacgaatatgcataatggggagaaattgcacacttgatagattgagtgataacatggagtgctctgttcctttagagaagcagattgctgaagaggaagaggaagaaattgaaatgttgttggaaaattatcttcaacgatgtgaatcatgccatggtcaagcagagagacttctgaattctgcaagagaaatggaagactcgattgctgtgaacttaagttcccgacgacttgaagtaagtagagtggagctgcttcttcaagtgggaacattttgcgttgcaataggggcattaattgcaggaatatttggcatgaatcttcaatcatatctcgaaacaaatgcgtgggcattttgggcgacaactggtggaatagttgttggagcagtagctggatttttcctcatgtactcatatctaaaggctaggaagatattgtga

SEQ ID NO: 902 - protein, 458 aa, Sorghum bicolor
MASVALSSSSQAGLLVLPSPLLKPAVGACLRYRLPRLPPGLSSVRKGGILPLPILVPPRAVEGNDGRAAVTKEEVEEEEEEEEVEVTKEGEEDTQERGGTTGSTKEDAARGSERFAADYIPLGIREPVYEAIEVRSNGRMSTKKISRRQLLKSSGLRLRDTRSVDPSLWLMNSMPSLLVREQAILLNLGSLRAIAMYERVLIFNYNSPGGKAFLGLLLPRLNPRNINGGPAMPFQLEVVEAALISRIQRLEQRLMKIEPHVATLLEVLPNRLTADVLEQLRLSKQALVELGSRAGDLKQMLIDLLDDPHEIRRICIMGRNCTLDRLSDNMECSVPLEKQIAEEEEEEIEMLLENYLQRCESCHGQAERLLNSAREMEDSIAVNLSSRRLEVSRVELLLQVGTFCVAIGALIAGIFGMNLQSYLETNAWAFWATTGGIVVGAVAGFFLMYSYLKARKIL

SEQ ID NO: 903 - DNA, 1158 bp, Sorghum bicolor
atggaggactcgagccagttcttgcagtgggccctgagcacactgcagcacgacgacctcccaccggcaacgccggcggccaccgccgcctacgacgataatggctgcaatactgccgccttctcctcaatcccggcgttgggatactccgctgcgtcagtgaacagcatggtcccgggcgaaccaccagcgcgagaaggccaccgggccgccgccgccaccaacagctggagctcggccgacaccgacagcgggagcggcggcggtggcaccgcgtccgtcacggccgcgcagcgcgacgcctggtcgccgtcctcgcagcagaacttggtcaactgtgccacgccacgcagcagcggcagtagcggcgccaaccagcaagtgggctgggacttcaattcggcgtcggcgcagctaatcaaagaagcccaggccaactctgccgccgccgccgctgccgccgcaagggcagagagcaacggtggcggtggcgtgccggtgccacagccacagatggtgcacaacaacgggccaccgccgacgaagagagcctctgccaaaatgtcggcgccttcttcgtcgccaccgtgctcgcaggatcacatcgtcgccgagcggaagcgccgggagaagatcaaccagcgtttcattgagctgtcagcagtcattccctgcctcaagaagatggacaaggcgacgatcctctccgacgcgacgaggtacgtgaaggagctccaagaaaagctcaaggcgctccaggaagacggccgaggcatggagtcggcggtgctcgtcaagaagccgcgcatcgcggcgccgggggatgacgaggacggcggcgcgccttcgccttcgtcctgcgcgacagctggggctgcggcgaccgccaggaacgcgctgccggagatcgaggcgaggatcttggacggcaacgtcgtgatgctgaggatccactgcgaggacggcaagggggtgctcgtcagggtgctggccgaggtcgagggactctgcctcagcatcacgcataccaatgtcatgcccttgtcggcttgcatcctcatcataaacataatggcaaaggtgttggagggcttcaacgccacggcggatgacattgtagggaggcttaatgctgtgcttgctggaccagcgtgttag

SEQ ID NO: 904 - protein, 385 aa, Sorghum bicolor
MEDSSQFLQWALSTLQHDDLPPATPAATAAYDDNGCNTAAFSSIPALGYSAASVNSMVPGEPPAREGHRAAAATNSWSSADTDSGSGGGGTASVTAAQRDAWSPSSQQNLVNCATPRSSGSSGANQQVGWDFNSASAQLIKEAQANSAAAAAAAARAESNGGGGVPVPQPQMVHNNGPPPTKRASAKMSAPSSSPPCSQDHIVAERKRREKINQRFIELSAVIPCLKKMDKATILSDATRYVKELQEKLKALQEDGRGMESAVLVKKPRIAAPGDDEDGGAPSPSSCATAGAAATARNALPEIEARILDGNVVMLRIHCEDGKGVLVRVLAEVEGLCLSITHTNVMPLSACILIINIMAKVLEGFNATADDIVGRLNAVLAGPAC

SEQ ID NO: 905 - DNA, 1083 bp, Sorghum bicolor
atgaacacgctgcggcacgagcaaccagcggcggccgccgtcaacgacgactgcagcagcgaggcgacgttcccctcgctccaagcgctccgggaggcctcacacgcagccgagatggtgcaggagctgatcgaggaggcccccgcgaacagctggagctccggcgacaccaccgacggcagcagcggcggtggcaacaacaacaacaactcggcccctgctgctgcggcagcggcggcggccatggatcacgatgtcgtctggcctgcgtcaaagacgacctcgccggtcagcaggcccaccttgagcaggagcagcagcgtcaccaaccctcctctgagctggaacttcagcgccgccgcctcggcacagctaggcagcgacggcggcatgctgccggaattcgcccacaagcgcgccctaccgctggaccaagtgtacggatcgccaccggcgaggagagccggcttgaggagcccggctggatccatgtcggcgccgtacgctcaagaccacatcatcgctgagcggaagcggagggagaagatcaaccagcggttcatcgagctctccaccgttatcccaggcctcaagaagatggacaaggcaacgatcctttcagacgcgaccaagtatgtgaaagaactccaagaaaagctcaaggacctggaggctggcggcagcaacggacgcagcaggagcatcgagaccgtggtactcgtcaaaagaccgtgcctccatgctgcggcggcagcgccagacgacgatggctccccattgtcagcgtcgtcgggcacgtcgccggcagagaggaagacgcagctgccggagatcgaggcccggttctcggagaagagcgtcatggtgaggatccactgcgaggacggcaagggggtggccgtgaaggtgctcgccgaggtcgaggagctccatctcagcataatccatgccaacgtcctgcccttcgcagagggcactctcatcataaccatcacggcaaaggtggaggagggattcactgtaactgcggaggagatcgttggcagactgaactcgatctggactagtgcacaaccagcataa

SEQ ID NO: 906 - protein, 360 aa, Sorghum bicolor
MNTLRHEQPAAAAVNDDCSSEATFPSLQALREASHAAEMVQELIEEAPANSWSSGDTTDGSSGGGNNNNNSAPAAAAAAAAMDHDVVWPASKTTSPVSRPTLSRSSSVTNPPLSWNFSAAASAQLGSDGGMLPEFAHKRALPLDQVYGSPPARRAGLRSPAGSMSAPYAQDHIIAERKRREKINQRFIELSTVIPGLKKMDKATILSDATKYVKELQEKLKDLEAGGSNGRSRSIETVVLVKRPCLHAAAAAPDDDGSPLSASSGTSPAERKTQLPEIEARFSEKSVMVRIHCEDGKGVAVKVLAEVEELHLSIIHANVLPFAEGTLIITITAKVEEGFTVTAEEIVGRLNSIWTSAQPA

SEQ ID NO: 907 - DNA, 315 bp, Sorghum bicolor
atggtgtcctggaagagaaagtgcggcggcggcggggagtcgcccgcccggggcgccggcgaggagaaggccgtcccgagagggcacgtcccgatgctgctcgccggcggcgcgaacggggaggaaggcgagcgggtgctggtgccggtgcggctgctcagcgacccttccgtcgcggagctgctggagatggcggcgcagcggtacgggtacggccagccgggggtgctgcgggtgccctgcgacgccggccacttccgccaggtcctcgacggcgccatgcacagatgcggcggcatcagctcgtcagcctga

SEQ ID NO: 908 - protein, 104 aa, Sorghum bicolor
MVSWKRKCGGGGESPARGAGEEKAVPRGHVPMLLAGGANGEEGERVLVPVRLLSDPSVAELLEMAAQRYGYGQPGVLRVPCDAGHFRQVLDGAMHRCGGISSSA

SEQ ID NO: 909 - DNA, 1035 bp, Sorghum bicolor
atggcgacaaggagcgcgggcgccgccacagagatgctcatcaagaagatcgatgccggcggagccaagaggtatagcaggcatgacgagatggggagcgaggttgtggaagatgtgaaaagacaaagaagggtggtggcggatgcgctgccgtcgggcaggaagaggaagcgagacgccgatccagagcacgatgacaggagcgtgagcgagagcggcggcggtgaagggccgccgcagctggtgaagccgtggctttgccctatgccgcctctccagcggctcctgaacgcgtgccgtgccttgttcacgggctcctcctcctgcacaccaccgacgtcgtccgctgtcgccttcgtccgtggcattatggacaagattggtccaaatgaggtcgggcttaaggacgaggtccgttttttcaacaggatgaacactgctggtcgtcagaaccctcctatcatcacgtgcaaacctatttacgaggacaccaactttacgatcgcggtgttctttctgccactcggagcggtcatgccgctgcacgaccacccgggcatgacggtcttcaccaagctgctcatcggctcagcgcgtctcgaggcctacgactgggtctgtccccatgccttccctggcttgggctcccgttcacatcgtcgtcgtcagatgctcgcgcagaaggtgcgggaccatgacgtcgccgcggcggcatccggcacctgggtgctcttccccaaccacggcgggaacatgcaccgcttcaccgccgcggacgatgcccactgcgccttcctcgacgtcctcacgccgccctacgcgcccatggaccaaataaggcgttgtgcctattaccaggacgtcgaaatctgcccctacaagcacaataatccctgcaagtcctcgacaggggctgtcagctgcgatgggcttatggaggagcacacacaccggctggcatggttggaggaggtccccaagcctaggaaccttaggattgtctgcttgccataccgaggccctacgatcttctag

SEQ ID NO: 910 - protein, 344 aa, Sorghum bicolor
MATRSAGAATEMLIKKIDAGGAKRYSRHDEMGSEVVEDVKRQRRVVADALPSGRKRKRDADPEHDDRSVSESGGGEGPPQLVKPWLCPMPPLQRLLNACRALFTGSSSCTPPTSSAVAFVRGIMDKIGPNEVGLKDEVRFFNRMNTAGRQNPPIITCKPIYEDTNFTIAVFFLPLGAVMPLHDHPGMTVFTKLLIGSARLEAYDWVCPHAFPGLGSRSHRRRQMLAQKVRDHDVAAAASGTWVLFPNHGGNMHRFTAADDAHCAFLDVLTPPYAPMDQIRRCAYYQDVEICPYKHNNPCKSSTGAVSCDGLMEEHTHRLAWLEEVPKPRNLRIVCLPYRGPTIF

SEQ ID NO: 911 - DNA, 1509 bp, Sorghum bicolor
atggcgaggcagggcggcgccggcggcgagatcacggcggctttctcaggcggcggtggcattgccgggacttccacggcccgcacgacgccggtggcgagcccgtaccaggcggcggttgaaattgaagagcaaatttattctccagcatttggcaacattgaggtccaggatagtcgtggttgctgcagtggtttcacaggcagagtaacaaagttgctgttcatctttcatctgcttgctttcattgccctcacagcattcctaggcgtccaggcctcttcccaccagaaccctgcctacaagcccttctccaacttcattcctctggtatcctctgtcatagtatccacaattgctgcctgcttctgggttatccttgctgtcacaaaccctccaaaagccatcaagacctctctctgggctgcccctgtttctgcacttgcttgtgatgtagtcatacttctagttggtaatactgctgcacttggtataggagcgctcgtagttgtatttgcaatcgcagcaggattatacagttgttgggccactggtccacgtcttaagcatgcctctgatatgctttctgtttctgtcatcggagcacatttaccgcctactacttcatgccttgttgtctatgtccttcttgcaacgtttgggtatatggccttctggacagttgccatcagctgcattgctgctgcagaagggcacttcatgaactaccggatggcttatgtggcagcacttctagtgagcatggcatggaccatgcaggtactgcgctacattgtctatgtggcagtggcaaaactggcacatggacgtctcatctatgggattcgcatcccgggtggtgctgtggatgcattgtgtgacacgatatttggaccagcctttggggacatatgcatgggtgcaatggctgtgccggtgaactcagcagtgcggggatttgctcgagcaatgaaaacggcaactgggggcaatgacgagttcattttctcaggacagggctgctgctttactgtatcagagaagatgctgggacgtgctaaccgttggggttttgtgcacgtgggggcgcgggggaaagcattctgtgtggcttcgcgggatgtgtggtcactttttgttctccgtggtgtagcagagcttgttgattcagacctcactggttcattctgcttcctttcttcggttacatcaggcgcattggcctcactggtttctggatcatgggcactagccatggataaagatcagaagaaactagctttgcccatatccatctatgcattcctagtcggttattatatgtgccggatgatgatcgcgtggccacaagcatgtgtggctgcataccatgtcgcgtatgcagagaacccgcagaaccctcagctgggcacgctgataccagaacatctgcacgagctcgaagcaatggcggcagatcaagatcgtcccagagttatccattcttctgacgacatcgacaattcatag

SEQ ID NO: 912 - protein, 502 aa, Sorghum bicolor
MARQGGAGGEITAAFSGGGGIAGTSTARTTPVASPYQAAVEIEEQIYSPAFGNIEVQDSRGCCSGFTGRVTKLLFIFHLLAFIALTAFLGVQASSHQNPAYKPFSNFIPLVSSVIVSTIAACFWVILAVTNPPKAIKTSLWAAPVSALACDVVILLVGNTAALGIGALVVVFAIAAGLYSCWATGPRLKHASDMLSVSVIGAHLPPTTSCLVVYVLLATFGYMAFWTVAISCIAAAEGHFMNYRMAYVAALLVSMAWTMQVLRYIVYVAVAKLAHGRLIYGIRIPGGAVDALCDTIFGPAFGDICMGAMAVPVNSAVRGFARAMKTATGGNDEFIFSGQGCCFTVSEKMLGRANRWGFVHVGARGKAFCVASRDVWSLFVLRGVAELVDSDLTGSFCFLSSVTSGALASLVSGSWALAMDKDQKKLALPISIYAFLVGYYMCRMMIAWPQACVAAYHVAYAENPQNPQLGTLIPEHLHELEAMAADQDRPRVIHSSDDIDNS

SEQ ID NO: 913 - DNA, 441 bp, Sorghum bicolor
atgctctccgccgccgccgccgccgccgtcatacccaagctccgcttcgcgacgcggccgcagctgaggcggccggcggctaggacttactggccgcggccgctctcctcctctagccacgtaacgcccgcggcggcgggggcgggggagctggagccgccggacctcacccgcttagccaacgccgcgcgcatctcgctctccccgcaggaggccgaggacttcgagcccaagattcggcaggtcgtggattggtttgggcaacttcaggcagtagatcttgagtccattgagccttcacttagagctggtacaacagctgatagttctttgagagaagataaacctgaaacattcgataacagagatgccatagtggaggccattccaagttatgatgatccatatatcaaagtgccaagagtgctgaacaaagaataa

SEQ ID NO: 914 - protein, 146 aa, Sorghum bicolor
MLSAAAAAAVIPKLRFATRPQLRRPAARTYWPRPLSSSSHVTPAAAGAGELEPPDLTRLANAARISLSPQEAEDFEPKIRQVVDWFGQLQAVDLESIEPSLRAGTTADSSLREDKPETFDNRDAIVEAIPSYDDPYIKVPRVLNKE

SEQ ID NO: 915 - DNA, 2604 bp, Sorghum bicolor
atggcgaggcatcgccgtggcagagggcgccgcggtggccaccaggcctacccgccggtcgatgaggcgcgggtctccggcgacaacgggcgagacgaggcaaacccgagcggcgctgaggcggggaaccgcaacgagaaccgcgatgacgacccgtcgcgcgtcggccagagcctgcccgccatcgctgccgatatccgccaagccgggaaagccgtcgtggaggaggccgccgcgccgctgtggaaggagttcgaggcgctaggcatccacgtccaccgcgccgagcccgtattcccgccgcgaccagggtacggcgccgaggggacgccgtgcgtcgtcagggccaaccgcttcctcggccgcctcgtcgacgagggcctgcaccagtacaacgtaaccatttcgccggagccgacgcccgagagcgcgtacagggaggtcatgacgaagctggtgtccgagaaccagcacacggagctcggcggccgcttccccgcgtacgacgaccgcgactctctcttcaccgcgggcgcgctgccgttcgacgccaaggagttcgaggtcaccctctctgcaggcggcgacaaaaagatggacaggaagtacaaggtggtgatcaaccatgccgcaacgattagtctgctacagctgaggatgctgttggcgggctaccccacggacatccccgcgcagacgctgctggtcctcgacaccgtgctgcgtgacgtcgtctccaacaagcgcaatgacatgaaatgtgccgcgattgccacaaaggatcgtacactgggtgttgacgcatggaaggggctctatcagagcatcaggtcaacacagaactgcttgtctctgattgcagatgtgtcctcatctgtattcgttcaacccttgctattgattgaattcgttcagaagttcctaaagatggatgtcatggataggaacttgactaaacctgagtatgacaagctcttgaaggtcctcaggggtgtgaggattgaagtcacacacctaggagataatagacgccgtaagcacagaattgctggtttgtcagtggatcctactaatgatttgagttttcaatctagtggaagtggagctacaacgacagtcattaattacttcagagaaatatacggcctggacctgaaatacagatctctcccatgcatcatcgctcgcagcgagcagaatccagtctatcttcctatagaggtttgcaagatagttcccaggcagtgttaccagaagaagctggaagctagtcaggtttctactctaaggaagtcagcctgcatccatcccgaaccggagcaatcctgtcatcagattgttgatcaggagcagtacaaacgcaccaaacgtgcaaatgattttgacacagaagttgatgacaatcttgcaacagttgatgctagagttctgctgcctccaaatcttaagtatcatgattctggatctcagaagatggggtttccaatgaatgggtactggaatatgaaagacaagaaagtaataaatggtgccaagatcagcaactgggcatgtcttaacttttgtgatgatttatccaagaaagatattaaggagttttgctttaagctggctgaaatgtctcgtattactggagtggaatttgccaatttgaagctcccaatattcactgcacgtccagatcaagttgaagatggtattcgtaaatgctatcaggaagcgaagaacaagctgagggatcagaagattgatttactgcttgctatactaccagataaaaatggcagtttatatggaaatattaaaaggatctgtgagacagatattggtctcgtgtcacagtgttgtcgaaggtcaaatgtcttcacggaaaatagtcagatattggcaaatattgctattaagatcaatgccaaggtcgttgcatcccaagactggcatgaggtgtctaagtataatagtgttgtgcgtgcacaaggtcacgctgaagagatcagtggccttgaagacattgtcagggatggcataagtgagggtcggttcaaacaagttttggagaaagaaatcccagcgatagaaaacgcttggaacgcactgtatgataatgagaagccacaaatcaccttcattgttgtgcagaagaggcatagactaaggctgtcacccatggacaacaaatataagctccgttctgttacaaagaaaattattgagcctggcacagtggttgatagtgagatctgtcaccccgcagaatttgatttcttcctttgcagccaagttgatgtcaaagggccaaggcgtcctgtgaagtaccttgtgctgcgagatgataacaacttcacggcagatgaactgcaggctctcacaaataacctgtgctacacttatacaagcggcactcggtcagtgtcgatcgctcctcccgcattctacgcccaaaagctcgcacatcgtgccctcgcctacctcgccaaaggctctgacacggcgtcagcatcaagctccggcagtgcaggtgcagatgcagctgctcctggtgatggtccgaagcaacttccagagataaagaaggagctgaaggggtccatgttctactgctag

SEQ ID NO: 916 - protein, 867 aa, Sorghum bicolor
MARHRRGRGRRGGHQAYPPVDEARVSGDNGRDEANPSGAEAGNRNENRDDDPSRVGQSLPAIAADIRQAGKAVVEEAAAPLWKEFEALGIHVHRAEPVFPPRPGYGAEGTPCVVRANRFLGRLVDEGLHQYNVTISPEPTPESAYREVMTKLVSENQHTELGGRFPAYDDRDSLFTAGALPFDAKEFEVTLSAGGDKKMDRKYKVVINHAATISLLQLRMLLAGYPTDIPAQTLLVLDTVLRDVVSNKRNDMKCAAIATKDRTLGVDAWKGLYQSIRSTQNCLSLIADVSSSVFVQPLLLIEFVQKFLKMDVMDRNLTKPEYDKLLKVLRGVRIEVTHLGDNRRRKHRIAGLSVDPTNDLSFQSSGSGATTTVINYFREIYGLDLKYRSLPCIIARSEQNPVYLPIEVCKIVPRQCYQKKLEASQVSTLRKSACIHPEPEQSCHQIVDQEQYKRTKRANDFDTEVDDNLATVDARVLLPPNLKYHDSGSQKMGFPMNGYWNMKDKKVINGAKISNWACLNFCDDLSKKDIKEFCFKLAEMSRITGVEFANLKLPIFTARPDQVEDGIRKCYQEAKNKLRDQKIDLLLAILPDKNGSLYGNIKRICETDIGLVSQCCRRSNVFTENSQILANIAIKINAKVVASQDWHEVSKYNSVVRAQGHAEEISGLEDIVRDGISEGRFKQVLEKEIPAIENAWNALYDNEKPQITFIVVQKRHRLRLSPMDNKYKLRSVTKKIIEPGTVVDSEICHPAEFDFFLCSQVDVKGPRRPVKYLVLRDDNNFTADELQALTNNLCYTYTSGTRSVSIAPPAFYAQKLAHRALAYLAKGSDTASASSSGSAGADAAAPGDGPKQLPEIKKELKGSMFYC

SEQ ID NO: 917 - DNA, 921 bp, Sorghum bicolor
atggcttccaagatccagctcttgtcctccatcgccattttagcttttgcctcacaccttcacccttgtgtgtccattgagtttcgccatgagctctccagctggaccactggcatagctacgtggtatggtgatgctaatggcgctggaagtgaaggtggtgcatgtgggtaccaatatgctgttgaccaaccaccattctcatccttgattgctgccggcagccctttcatctatgactctggcaacggatgtggctcttgctatcaggtggtatgttctagcaatcaagcttgctctggttacccggtgactgttgtcatcaccgaccagggccctggtggtggtccatgcctgagccaagcaagtgatggcatgtgcctaaatgagggagcccactttgacatgagtgggactgcatttggtgccatggcaaagcctggaatggccgatcaactccgtgctgctggcctgctgcaaatccaatacactcgtgtgcagtgcgaatggcctggagttgatgtaactttctctgttgactctggctcgaacccgaactatctggctgtgctgatcgagtacgaggacagtgaaagcgatctttcggccgtcgacatcatgcagaactcggcaggacaatgggtgcctatgcagcattcatggggtgcgatttggaggctcgactcgggctctgcccttcacggcccgttccacctccgcctgacattcagctcaggcagggtactcatagccagcaatgccatacctgcagggtggactccgggtgtggcgtaccgggcaggtggagtggcggtgactagggccaggcccaggagtggtggcggccggatccatgaggctgctggaacatttagcagtttggtgtatcaccttctgatgtttgtggtattggtgttgtga

SEQ ID NO: 918 - protein, 306 aa, Sorghum bicolor
MASKIQLLSSIAILAFASHLHPCVSIEFRHELSSWTTGIATWYGDANGAGSEGGACGYQYAVDQPPFSSLIAAGSPFIYDSGNGCGSCYQVVCSSNQACSGYPVTVVITDQGPGGGPCLSQASDGMCLNEGAHFDMSGTAFGAMAKPGMADQLRAAGLLQIQYTRVQCEWPGVDVTFSVDSGSNPNYLAVLIEYEDSESDLSAVDIMQNSAGQWVPMQHSWGAIWRLDSGSALHGPFHLRLTFSSGRVLIASNAIPAGWTPGVAYRAGGVAVTRARPRSGGGRIHEAAGTFSSLVYHLLMFVVLVL

SEQ ID NO: 919 - DNA, 1539 bp, Sorghum bicolor
atggcgccgcgcccccgcaagcgggcctcgcgccccaagccccgcccgggctcccgacgtggcggcggcggaggggacgacgaccccttcttcgagtccgagcccaagcgccgccgcgggggccgtgacgaggacatcgagagcgaggacagcgacgacgacggcggcgtggctgcggttggtggcggatttgatgaggatggggacgggggcggcgaggaggaggacgaggagacggtgggggagaagaagatgcgtatggcgaaggagtggctgcagaaggtcactgaggtcgctaagagggggcaggaggatgacgacgaggacgaggacgagtcgggagggagacgggtggcggagatcctgcagaggaagcagctcgaggagagcggcaggaagcggagggagattgccgcgagggtattaccaccgggccctcaggatggctttaagtttcttgtgaagcaccggcaacctgttactgctgttgctttatccaaggatagtgataagggattttcagcatcaaaagatggagtcattatgcattgggatgttgaaactgggaaatgtgagaagtatatatggccaagtgaaaatgtgttggtttcacatcatgctaaaccaccagtatcagctaaaagaagcaagcaagtgctggctttagctgccagttctgatggtcgttacttggcgagtggtggcttggaccgtcatatccatttatgggatgttaggtcacgggaacacatacaggcatttagcggccatcggggaccaatatcatgtctttcttttgcaccggactcttcagagctattctctggttcttttgaccgttcaataatgcagtggaatgcagaggatagaacatacatgaactgtttatatgggcatcagaatgaaatcttgacaatggatgcacttagcaaagacaggattctaactgtagcacgggaccgtacgatgcacctttggaagattccagaagagtcgcagttagtgttccgtgctcctgctgccgcatctttagagagttgctgctttattgatgacaaggaatttttgtctggatctgatgatggaagcattgagctttggagcataatgaggaaaaagcctattctcataataaaaaatgctcatgcagtatcatgtactaaccttaattcagttgacaatgatgatgagtcacctaaagaaaatggaatacataaacctgaaaatgtgccatccgcagcccagtcatgggttggtactgttgctgcaagaagaggttctgaccttgctgcatcaggagcaggaaatggtttagttcgtctctgggctgtcaaacctgattccaagggagtcgagccattattcgatttgaaactggatggatttgttaattctctggccatagcaaaatctggacgttttattgttgctggtgttggccaggagcctcgcctgggaagatggggacgagttcgatcggcccaaaatggagttgcaattcacccaatccgactaaaagatgagaaagaggatttgtag

SEQ ID NO: 920 - protein, 512 aa, Sorghum bicolor
MAPRPRKRASRPKPRPGSRRGGGGGDDDPFFESEPKRRRGGRDEDIESEDSDDDGGVAAVGGGFDEDGDGGGEEEDEETVGEKKMRMAKEWLQKVTEVAKRGQEDDDEDEDESGGRRVAEILQRKQLEESGRKRREIAARVLPPGPQDGFKFLVKHRQPVTAVALSKDSDKGFSASKDGVIMHWDVETGKCEKYIWPSENVLVSHHAKPPVSAKRSKQVLALAASSDGRYLASGGLDRHIHLWDVRSREHIQAFSGHRGPISCLSFAPDSSELFSGSFDRSIMQWNAEDRTYMNCLYGHQNEILTMDALSKDRILTVARDRTMHLWKIPEESQLVFRAPAAASLESCCFIDDKEFLSGSDDGSIELWSIMRKKPILIIKNAHAVSCTNLNSVDNDDESPKENGIHKPENVPSAAQSWVGTVAARRGSDLAASGAGNGLVRLWAVKPDSKGVEPLFDLKLDGFVNSLAIAKSGRFIVAGVGQEPRLGRWGRVRSAQNGVAIHPIRLKDEKEDL

SEQ ID NO: 921 - DNA, 1248 bp, Sorghum bicolor
atgccaatggccgtctccactgttaccgccacccatctcgctccctcttttccagcccgtagtcgccggagacgcgccgcgccccgcgccgcggcaggcggcctaacggcgcgcgcacggcggctgcgctgcgagttcgtcgccggcggtgggaacggggcgctctccggagaggacgaccctcgcctcgtcgaccgccaaaaagctcttgatgcagctatgaatgacataaacagctcttttggaaaaggaagtgttacaagattaggcagtgctggtggtgcttttgttgagacattcccaagtggttgtctaacactagattttgctctgggcggtggccttccaaaaggaagagtagtggaggtatatggtccagagagcagtggaaagactaccctggctttgcatgcaatagctgaagtacagaagctcggaggaaatgccatgcttgtcgatgcagagcatgcttttgatccagcttattcaaaagctcttggggtagatattgaaaatctgattgtctgccagcctgacaatggagagatggcactagaaattgcggaccgtatgtgcagatctggagcaatagatcttatctgtatcgattcggtgtcagcactcactccacgtgcagaaattgaaggtgagatagggatgcaacagatgggtctacaagctcgtttgatgagtcaagcattgagaaagatgtcagggaatgcctcaaaggctggctgtactcttatgttcttgaatcaaataagatacaagattggagtgttctatggaaatcctgaagtcactagtggagggatagccttgaaattctttgcatctgtccgccttgagatacggcccattgggaagataaaatctcccaagggagatgaagatgttggtgtgaaggttcgggtcagagtgcagaagagtaaagtatctaggccctacaagcaagctgaatttgaaatcatttttggggagggtgttagtaagttggggtgcgttcttgattgtgctgagctgatggatgtagttgcaaagaagggttcatggtatagttacaaagatataagattgggccaaggcagagaaaaggcactgcagtatctccgagagagcccaaccatctgcgatgagatagaaaaggtggttcgtgctatgataccagaaggatccagacatatgagcctactagctttcgggcagacatcatcaactgaagatgaacaagtgtacgatgagcaataa

SEQ ID NO: 922 - protein, 415 aa, Sorghum bicolor
MPMAVSTVTATHLAPSFPARSRRRRAAPRAAAGGLTARARRLRCEFVAGGGNGALSGEDDPRLVDRQKALDAAMNDINSSFGKGSVTRLGSAGGAFVETFPSGCLTLDFALGGGLPKGRVVEVYGPESSGKTTLALHAIAEVQKLGGNAMLVDAEHAFDPAYSKALGVDIENLIVCQPDNGEMALEIADRMCRSGAIDLICIDSVSALTPRAEIEGEIGMQQMGLQARLMSQALRKMSGNASKAGCTLMFLNQIRYKIGVFYGNPEVTSGGIALKFFASVRLEIRPIGKIKSPKGDEDVGVKVRVRVQKSKVSRPYKQAEFEIIFGEGVSKLGCVLDCAELMDVVAKKGSWYSYKDIRLGQGREKALQYLRESPTICDEIEKVVRAMIPEGSRHMSLLAFGQTSSTEDEQVYDEQ

SEQ ID NO: 923 - DNA, 2670 bp, Sorghum bicolor
atggcgaagtcgagcgcggacgacgccgagctgcggcgcgcgtgcgccgcggccgtggcggcgtcgggcgcgcgcggagaggacgtggccttctccatccgcgtcgccaagggccgcggcatcttcgagaagctcggcaggctcgccaagccccgcgtcctcgcgctcaccgttaaacaatcatcaagaggcgaggcaaacaaagcttttctccgagtattaaagtattcatctggggcagtgcttgagccagccaaactttacaagctgaaacatctaacaaaggttgaggttatttctaatgacccaagtggttgtacatttgttctgggatttgataaccttaggagtcagagtgttgccccgccacaatggacgatgcgtaacatcgatgacagaaaccgtctacttttttgtattctgaacatgtgcaaggagatactcagttatcttccgaaagttgttggaattgatattgtggagctagctctttgggcaaaggaaaacacactgaccatagataatcaattgagtacccaagatggtcaagaaacatcagttgctactcagaccgagaggaaagtaacagtaactgttgaaaatgatctcgtgtcccaagcaaaggaggaggaagaagacatggaggcacttcttgacacgtatgttatgggcataggtgaagcagatgcgttctctgagagattgaagcaggagcttgtggcattggaggccgcaaatgtatatcaattactggaaagtgagcctttaatagaagaggtcttgcagggtctggatgctgctagtgcaactgtagatgatatggatgagtggttacggattttcaacctgaagctgaggcatatgagagaagatattgcatcgattgaatcacgtaacaacggcttggagatgcagtccgtaaataacaaaggacttatggaagagctagataaattgcttgagcgtctgcggattccacaggagtttgcagcatcattaactggaggctcatttgaagagtcacggatgctgaaaaatgtcgaggcatgcgaatggttgacaggggccattcgtactcttgaagttcctaatttggacccatgctatgtcaacatgcgcgctgttagagaaaaaaaggcagaactggagaaactgaaaacaacttttgttcgacgagcatcagagtttttgcggaactacttctccagcttggtagacttcatgattagtgacaaaagctacttttcacagcgaggacaattgaagcggcctgatcatgcagaccttaggtataaatgcaggacatatgcccgacttctgcagcacttaaagagtctggacaagagctgcttaggtcccttaaggaaggcatactgccattcccttaatttgctactacgacgagaggcacgtgaatttgccaatgaacttcgtgcaagtacaaaagcacccaagaatcctgctgtttggcttgaaggttctggcggctctggtcataatggaagcagtgctgatacttcaacagtctcagatgcatactcaaagatgcttacgatatttatcccacttcttgtggatgagagttccttttttgcacattttatgtgctttgaagtacctgcacttgttccagctggttctcctaatgctaataagagcaaatctggaggaaatgacgccgatgatgatttgggtcttatggatccagatggcaacgatctgaaacctgatagtacctctgctgaactgggtacattgaatgaagctcttcaagaattactcgatggaatccaggaagacttctatgcggttgtagattgggcgtataaaattgaccccttgcgttgcatctcaatgcatgggattacagagcgctacctttctggacagaaagctgatgctgcaggatttgttcgcaaactacttgatgacttggaatcaagaatatcagtacagttcagccggtttattgatgaagcatgccatcaaattgagcgtaatgaaagaaatgtgcggcaaactggaattctagcctacattccaagatttgctgtccttgcatcacggatggaacagtatattcaagggcagtccagggatttaattgataaagcatacacaaagctagttagcacaatgttcgcaactttggagaaaattgcacagagtgatcctaaaactgctgatattgtgctgattgagaattatgctgctttccagaacagtctttatgacttggctaatgttgtgccaacgcttgcaaagttctaccatcaagccagtgaatcatatgaactagcttgcactcgccatatcagctcactcatttatctccaatttgagaggttatttcaattcaaccggaaagttgaagaattgacatacaccattgctgctgaggagattccgtttcagctggggttgtcaaaaactgacctaaggagggtgctgaagtccagcttatctgggattgataagtcgattggcgccatgtacaggaggttgcagaagacactgacgtctgatgagttgtttccttcgctgtgggacaagtgcaagaaggaatttctggacaaatatgagagctttgttcagatggtaacacggatatatgggaatgagccgatcatgtcggtcaacgaaatgaaagaagtccttgctagtttttag

SEQ ID NO: 924 - protein, 889 aa, Sorghum bicolor
MAKSSADDAELRRACAAAVAASGARGEDVAFSIRVAKGRGIFEKLGRLAKPRVLALTVKQSSRGEANKAFLRVLKYSSGAVLEPAKLYKLKHLTKVEVISNDPSGCTFVLGFDNLRSQSVAPPQWTMRNIDDRNRLLFCILNMCKEILSYLPKVVGIDIVELALWAKENTLTIDNQLSTQDGQETSVATQTERKVTVTVENDLVSQAKEEEEDMEALLDTYVMGIGEADAFSERLKQELVALEAANVYQLLESEPLIEEVLQGLDAASATVDDMDEWLRIFNLKLRHMREDIASIESRNNGLEMQSVNNKGLMEELDKLLERLRIPQEFAASLTGGSFEESRMLKNVEACEWLTGAIRTLEVPNLDPCYVNMRAVREKKAELEKLKTTFVRRASEFLRNYFSSLVDFMISDKSYFSQRGQLKRPDHADLRYKCRTYARLLQHLKSLDKSCLGPLRKAYCHSLNLLLRREAREFANELRASTKAPKNPAVWLEGSGGSGHNGSSADTSTVSDAYSKMLTIFIPLLVDESSFFAHFMCFEVPALVPAGSPNANKSKSGGNDADDDLGLMDPDGNDLKPDSTSAELGTLNEALQELLDGIQEDFYAVVDWAYKIDPLRCISMHGITERYLSGQKADAAGFVRKLLDDLESRISVQFSRFIDEACHQIERNERNVRQTGILAYIPRFAVLASRMEQYIQGQSRDLIDKAYTKLVSTMFATLEKIAQSDPKTADIVLIENYAAFQNSLYDLANVVPTLAKFYHQASESYELACTRHISSLIYLQFERLFQFNRKVEELTYTIAAEEIPFQLGLSKTDLRRVLKSSLSGIDKSIGAMYRRLQKTLTSDELFPSLWDKCKKEFLDKYESFVQMVTRIYGNEPIMSVNEMKEVLASF

SEQ ID NO: 925 - DNA, 1065 bp, Sorghum bicolor
atggccgatgacaagaagcatttcttcaagcctatggtcggggacttcactgaaaccatgagcatacctgcaagatttgcaaataacttcaacggccacatctctgaggtcatcagtctgaagtccccaagtggcaagacatggagcatcggagtaggcagtgacaccgacgaagtagtcctccagtccggctggaaggagttcgtcagcgctcacagcatcgacgaaggagactgcatgctcttcaagtacaccggagtgtcgtccttcgacgtcctcgtgttcgactccagcggctgcgagaaaacatggccccatttcacccgcaacagcagccatggctacaagagaatcgagagctctgcaggccttgaagaaggaccccggcttggctgccgtcgattcaagggaggccatgactgcacctgcacgccgcagtcgctaccaagcgatggcgacgacgacgacgacgatgcgcatttggagctggcgcttcacaggagtaccagcaggagcatccccaaacggtgcaagcgcaagctttaccgtgacattgagcaagttcatggtgaagtaaaagatgatgatgatgaagatgatgttggtgatgcgaagacagggtactacttctgcaagaacgggccggtcagcgagtaccatctgaaggagcaggagaaggaggagatctcgagcatccgtgtgcctgtggagccgaggaacccggtgttcgtgcaggtgatgcacccgacccatgtccgcagcaccaaacccggcgtggtaggcatttctgcagaattcgcggacaagtacctgggagcaacctcaagggacgtcatccttgagaaaggcggcagcaaggggaagtggcacgtccgctacaaccgcaacaggttcagccgtggcctcacgggccgcggctggagcgagttcgtcgccgacaatggcctcctcgcccacgacgtctgcctcttcgagctcatggtgatcaatggcaagctgcggcggccgacggtgaccgtgcacgtcctgcgcaaggtgcgcggcgcctttgtcctgctgccctga

SEQ ID NO: 926 - protein, 354 aa, Sorghum bicolor
MADDKKHFFKPMVGDFTETMSIPARFANNFNGHISEVISLKSPSGKTWSIGVGSDTDEVVLQSGWKEFVSAHSIDEGDCMLFKYTGVSSFDVLVFDSSGCEKTWPHFTRNSSHGYKRIESSAGLEEGPRLGCRRFKGGHDCTCTPQSLPSDGDDDDDDAHLELALHRSTSRSIPKRCKRKLYRDIEQVHGEVKDDDDEDDVGDAKTGYYFCKNGPVSEYHLKEQEKEEISSIRVPVEPRNPVFVQVMHPTHVRSTKPGVVGISAEFADKYLGATSRDVILEKGGSKGKWHVRYNRNRFSRGLTGRGWSEFVADNGLLAHDVCLFELMVINGKLRRPTVTVHVLRKVRGAFVLLP

SEQ ID NO: 927 - DNA, 1404 bp, Sorghum bicolor
atggaaaggcggcacggcttcttcgcggcgctgcgggaggaggtggcgcgcgggctgtcgccggcgcgggcgcgccgcaagtcggaggccgcggacctggccgccgccgcgctcaggttcgccggagtggtcggcggcggcgagatgctggcgccgctcatggaggggcccgatccggagcccagcgacggggagagcggcggcgcctgccgaggcgccgcgcgcgggaggaaggaaggttggggccactgggtgcgcggccagttcgcgcgggccccgtcctccgcggtcgccgccgccggggccggcgcgctgcgcaacgacctcaggatgctcctcggcgtcctgggagcgccgctcgcgccggtccacgtctgcgccaccgagccgctcccgcacctcagcgtcaaggacactcccatcgagacctcatcggcgcagtacatcctgcagcaataccttgcggcctccggagggcacaagcttctggcctccctgcgcaactcctacgccatgggcaaggtgcgcatggtggccactgagttcgagaccggcggccgcctcaccaagaaccgcaatgctggacgcggcggcgagcctggccgcttcgtgctgtggcagatggcccctgagatgtggtacatcgagctggttgtcggtgggagcaaggtgcacgcagggtgcaatggcaagctcgtgtggcgccacacaccatggcttggtgcccattctgccacgggccctgttcgcccgcttcgccgttcccttcagggcttggatccattgatgacggcaagcatgtttgctcgtgcccggtgcattggtgagaggaaggtgaatggggaggattgcttcatcctgaagctgagcacagacactgagaccctcaaggcacgcagcgagggccatgcagagattatcaggcatgtcacgtttgggtacttcagccagaggactggtcttcttgcccacattgaggattcacatctgacccgaattcagtcagctgccggaggggacgcggtctactgggagactaccatcagctcgttcatggaggactaccgtccagtggatggtataatgatcgcgcattctgggcgctcggctgtgaccctgttcaggtttggtgaggttgccatgagccacaccaagactcggatggaggaggtgtggagcattgaagaggttgcattcaacgtcccagggctgtccatggactgcttcatcccgcccactgatatcaagtctggatctgttggtgaggccatggagcttactcatggcgagaggagccgggctggccctccccaaggctactgcgctaaagttgctgccctggagaaagcagaagaagataaagtggcatggggtggtggaaccgtactcgagagtcacaactga

SEQ ID NO: 928 - protein, 467 aa, Sorghum bicolor
MERRHGFFAALREEVARGLSPARARRKSEAADLAAAALRFAGVVGGGEMLAPLMEGPDPEPSDGESGGACRGAARGRKEGWGHWVRGQFARAPSSAVAAAGAGALRNDLRMLLGVLGAPLAPVHVCATEPLPHLSVKDTPIETSSAQYILQQYLAASGGHKLLASLRNSYAMGKVRMVATEFETGGRLTKNRNAGRGGEPGRFVLWQMAPEMWYIELVVGGSKVHAGCNGKLVWRHTPWLGAHSATGPVRPLRRSLQGLDPLMTASMFARARCIGERKVNGEDCFILKLSTDTETLKARSEGHAEIIRHVTFGYFSQRTGLLAHIEDSHLTRIQSAAGGDAVYWETTISSFMEDYRPVDGIMIAHSGRSAVTLFRFGEVAMSHTKTRMEEVWSIEEVAFNVPGLSMDCFIPPTDIKSGSVGEAMELTHGERSRAGPPQGYCAKVAALEKAEEDKVAWGGGTVLESHN

SEQ ID NO: 929 - DNA, 312 bp, Sorghum bicolor
gcacggcgcagcgctgtcctcttctccggctgcgccgcctcaaatcaaatgaaatccggcctcctccgcacttctccgatccaagtttttccgctcgggagtaccgagcttgttgggtcattgacaagagcaggcgtgcatttcccgaggcaccattcattcatggaatcctatgtcagtgcaagctcccgaaggcaacagattgtcattgctttagggagcaacatggatgatacaatcagtacagcagctgatcaaccactgttcatatattctgttgtaagacggacaaccaagctttggatgacatga

SEQ ID NO: 930 - protein, 103 aa, Sorghum bicolor
ARRSAVLFSGCAASNQMKSGLLRTSPIQVFPLGSTELVGSLTRAGVHFPRHHSFMESYVSASSRRQQIVIALGSNMDDTISTAADQPLFIYSVVRRTTKLWMT

SEQ ID NO: 931 - DNA, 336 bp, Sorghum bicolor
atgcaagcagagctaaacaagaacatcacactgagcttggtgggtgatttcacacaattttatggctcaatggaactggcagagatcccttcatggagaatgattgttgaccctgagattgttcttttcgaagtattcttaacagaacctccaggttctttctggtgtgttatccatcagaagggagatgtgtcaacgaagcattattgcttcacatgtactgatgtgttaaccatccaggaaaaggatttccaggtgggatgtgtaaccgtgtcaatcccacatgcaatggtaaatttgatgttgatactacaaaggtttgtgatgcattgttga

SEQ ID NO: 932 - protein, 111 aa, Sorghum bicolor
MQAELNKNITLSLVGDFTQFYGSMELAEIPSWRMIVDPEIVLFEVFLTEPPGSFWCVIHQKGDVSTKHYCFTCTDVLTIQEKDFQVGCVTVSIPHAMVNLMLILQRFVMHC

SEQ ID NO: 933 - DNA, 1398 bp, Sorghum bicolor
atggcggtgctgttgctcctggtggccgtgcttggcgtggtgctggcgagcagcctcctcctgcggtggaacgagctccggtacagccgccgccggggcctgccgccgggcacaatggggtggccgctcttcggcgagaccaccgagttcctcaagcagggccccagcttcatgaagcagagaaggctcaggtacgggagcctgttccggacgcacatcctgggctgccccacggtggtgtgcatggagccggagctgaaccgccggacgctggccagcgacggcgccggcttcgtcccgggctacccgcagtccatgctcgacatcctggggcccaacaacatcgccgccgtgcacggcccgctccaccgcgccatgcggggagccatgctcgcgctcacgagggcacacatgatccgcgccgcgctgctccccaagatcgacgccttcatgcgcgcgcacctccatggatgggccggacgacgcgtcgacatccaggagatgaccaaggagatggctttgctctcagctctcaggcagattgctggcatctctgctggcccactctctgatgccctaaaggcagagctgtacacccttgtacttggcaccttctccctgccaatcaacatcccaggaaccaactacagcaaagggctccaggcaaggaagaagcttgtggcaatgctgcggcagatgatagcggaccggaggtcctctggttgcgctcaagatgacatgctggatgcactgttgagcggcaacgagggcaccagggcgaagctcactgatgaccagatcattgaccttcttatcaccctcatatactctgggtatgaaaccgtgtcaaccacctcgatgatggcggtgaagtatctgtcggacaatccgaaagctcttgaacaaatcaggaaagagcatcttgacataaggaaggctaaatcaccagacgatgcccttgactggaatgattataagtcaatgaccttcaccaaagctgtcatttatgagactctaagactagctacagttgtcaatgggctgctgaggaaaactacccaggatgtagaaatgaatgggtatgttattccaaagggctggagaatttatgtctacacaagggagataaattatgatccattcctgtacccggaaccgatggttttcaacccatggagatggctggagacgaacctcgaatcacatccacacttcatgttgtttggaggaggtgcccgcatgtgcccagggaaggaagtgggaacagttgaaattgcaacgttccttcactatttcattacgcgttacagatgggaggaggagggaaacaacacaatatcaaagttccccagagtggcagctcccaacgggctacatatccgagttcaagattactga

SEQ ID NO: 934 - protein, 465 aa, Sorghum bicolor
MAVLLLLVAVLGVVLASSLLLRWNELRYSRRRGLPPGTMGWPLFGETTEFLKQGPSFMKQRRLRYGSLFRTHILGCPTVVCMEPELNRRTLASDGAGFVPGYPQSMLDILGPNNIAAVHGPLHRAMRGAMLALTRAHMIRAALLPKIDAFMRAHLHGWAGRRVDIQEMTKEMALLSALRQIAGISAGPLSDALKAELYTLVLGTFSLPINIPGTNYSKGLQARKKLVAMLRQMIADRRSSGCAQDDMLDALLSGNEGTRAKLTDDQIIDLLITLIYSGYETVSTTSMMAVKYLSDNPKALEQIRKEHLDIRKAKSPDDALDWNDYKSMTFTKAVIYETLRLATVVNGLLRKTTQDVEMNGYVIPKGWRIYVYTREINYDPFLYPEPMVFNPWRWLETNLESHPHFMLFGGGARMCPGKEVGTVEIATFLHYFITRYRWEEEGNNTISKFPRVAAPNGLHIRVQDY

SEQ ID NO: 935 - DNA, 2973 bp, Sorghum bicolor
atggccatctcggaggaaccagagggggccgcgggcgatggtggtggggtgacgacgcgcgggagcaaagggcgggggaaaggcgccgcgaaggggcgcgggaggcccaagcgccggagcgacgacaggcccttcgcggcgccggcgatggatggggtggcgttcagggacatggtgcttagggagaggaggcacgcggccaacgtcttctgcgagcgcgacaccgatgatgacaatgaggagattgccaccaaccaattcaagcctcagagaaagaagagaaatgatgctggcaagaagaggggtcctagaaaaacgaaaccagaacatgtggacaacagcaaggccgacttccccaacagcaaatgccacggtgacatgaagggggatggttccgagacagttagggacaaggttttacagactgcaaagaagaggaagaaaggagatgcagggaaggtttctgtcacaaaaaggttgaaaagagagaatgaagaacaaaagaaggccttatcctccaagcgtaaagattgtgatgaaactaaaaggaaagggaagaagatgttgactggggataatgccctgatgtgccaccagtgccaaaggaatgataaagggagggtggtctggtgtaattcatgcaagaataagcgcttctgcgtgccatgcatccaacgatggtatcctggtttgtcagaagatgaatttgcttcacaatgcccgtattgtcgcaagaactgtaattgcaagggatgcctacgaatgcgaggagttgaagaggagcagacggaggagaagaaattagaggctaaaatacaaggtgtttcgatgaatgaggtgaagttggaacaggctgaatgtgatatagatgaacgcgtcttctgcaataactgtaaaacttctgtagttgattttcatagaagctgcaagtactgtttttatgatttgtgcctttcatgctgtggggagatccgcaaaggtgagattcctggaggagaggaggtaaagatcttagagcctgaaccaaaagacaagacttatatttttgctaccaataatcagttccaatggaaaaatgtgtcttccaatggaatgggttctagtgaggccccaaagaagtctctactactgtggaaatcagaaagtgatggtagcatatgttgcccaccgaaggagctaggaggctgtggtggttcagttttggacctcaaatgcttgttcccagagaaattactttctgacttagaagaacgagctgacagaattgtgaggagtaaagtatttgcaaaagcagtaaccaaaagaattgatcagtgcccttgttatgaccattcaggaagtgtaagaattcatgatgtgcgagaggctgcaaataggaaaggctcaagtgataatcacatctactgcccagttgccactgccatcaaggaggatgacttagtgcactttcagatgcattggacaaaaggtgagccagttatagtttctgacgttcttcagttgacctctggtctcagttgggagccattagttatgtggcgggcattgcgagagaaaaagactaatggtgatgttgaagatgagcactttgctgtcagggcaatagactgccttgattggaatgaggtggaaattaatatacatatgttttttatgggatatatgaaaggcagaatgcacaccacagtacactggcctgagatgcttaagctgaaggactggccaccatctagttcatttgatcagaggttgcctcgccatggcgctgagtttatcagtgcattgccatttcctgagtacactgatcctcgatatggtccactaaatcttgcagtcaagcttcctgatggtgcactgaagccagatcttggacccaaaacttacattgcttatggatttcaccaagagttaggcaggggtgattctgtgaccaagcttcactgcgacatgtctgatgcagtaaatatattaacacatacaacacaagtgacctatgagggttatcaacataagaagatagagaaactcagaaagaaaatgaaagaacaagatcttcaggaactttatggtgttttagaatctggcactgaacgagacctattatcatcttctactgattccaggaatttaaccattgacgaaacatcaaagatctcatgtaaagatgcaggccagtgttcagattacattgacaagaataatagttatgctgggatgcataatggtgctcagtgtattacgggcaagagtggagaccatgagaaaactggtggtgctttgtgggatattttccgaagagaagattctgacaagctacaagattatcttaggaaacatgccaaagaattccggcatatcaattgcaatcctgtgaaacaggttattcacccaattcacgatcagattttctacttaactgaggagcataagagaaagctcaaggaagaatatggtgttgaaccctggacgtttgagcagaggcttggtgaagcggtttttattcctgctggatgtcctcaccaagtgaggaatctgaagtcttgcatcaaggttgcaatggactttgtttccccagaaaacgtcgatgagtgcataaaactgactggagagtttaggcgacttccacctggtcacagggctaaagaggataaactggagattaagaagattgctcttcatgctctgaaccaagtaataaatttcttggatcctttctctgaggggttgaagagtggagctgcccaacccaagaataaaaaagaagctgatgctgatgctgaagcacagaagaagcctaaaaggggtcgcccatgtcgcaagtcgaacgatgaagctactgacgataagcccaaaaagaagcctggtcgtcccagaggtgagaagagcggagacggcaagtccaaagatggtgctgttgatgagaagcctcctaaaatgcagggcaatcgcctgaaaggctctagcaagcggtag

SEQ ID NO: 936 - protein, 990 aa, Sorghum bicolor
MAISEEPEGAAGDGGGVTTRGSKGRGKGAAKGRGRPKRRSDDRPFAAPAMDGVAFRDMVLRERRHAANVFCERDTDDDNEEIATNQFKPQRKKRNDAGKKRGPRKTKPEHVDNSKADFPNSKCHGDMKGDGSETVRDKVLQTAKKRKKGDAGKVSVTKRLKRENEEQKKALSSKRKDCDETKRKGKKMLTGDNALMCHQCQRNDKGRVVWCNSCKNKRFCVPCIQRWYPGLSEDEFASQCPYCRKNCNCKGCLRMRGVEEEQTEEKKLEAKIQGVSMNEVKLEQAECDIDERVFCNNCKTSVVDFHRSCKYCFYDLCLSCCGEIRKGEIPGGEEVKILEPEPKDKTYIFATNNQFQWKNVSSNGMGSSEAPKKSLLLWKSESDGSICCPPKELGGCGGSVLDLKCLFPEKLLSDLEERADRIVRSKVFAKAVTKRIDQCPCYDHSGSVRIHDVREAANRKGSSDNHIYCPVATAIKEDDLVHFQMHWTKGEPVIVSDVLQLTSGLSWEPLVMWRALREKKTNGDVEDEHFAVRAIDCLDWNEVEINIHMFFMGYMKGRMHTTVHWPEMLKLKDWPPSSSFDQRLPRHGAEFISALPFPEYTDPRYGPLNLAVKLPDGALKPDLGPKTYIAYGFHQELGRGDSVTKLHCDMSDAVNILTHTTQVTYEGYQHKKIEKLRKKMKEQDLQELYGVLESGTERDLLSSSTDSRNLTIDETSKISCKDAGQCSDYIDKNNSYAGMHNGAQCITGKSGDHEKTGGALWDIFRREDSDKLQDYLRKHAKEFRHINCNPVKQVIHPIHDQIFYLTEEHKRKLKEEYGVEPWTFEQRLGEAVFIPAGCPHQVRNLKSCIKVAMDFVSPENVDECIKLTGEFRRLPPGHRAKEDKLEIKKIALHALNQVINFLDPFSEGLKSGAAQPKNKKEADADAEAQKKPKRGRPCRKSNDEATDDKPKKKPGRPRGEKSGDGKSKDGAVDEKPPKMQGNRLKGSSKR

SEQ ID NO: 937 - DNA, 486 bp, Sorghum bicolor
atggtgctgaagaccgaactttgccgcttcagcggccagaagatttatcctgggaagggcatccgatttattcgcgctgattctcaggttttcctttttgccaactcgaaatgcaagcgctacttccacaaccgtctgaagcctgcaaagcttacctggacagcaatgtacaggaagcagcacaagaaggatatccatgctgaagctgtgaagaagaggcgccgcaccaccaagaagccatactccaggtcaattgtgggtgcctccctggaagtgatccagaagaagagagctgagaagcccgaggtgcgcgatgctgctagggaagctgctcttcgcgagatcaaggagcgcatcaagaagaccaaggatgagaagaaggcaaagaaggcggaggtgaccaagtcccagaagtcgcagtcgaagggcgcggttcagaagggttccaagggccccaagctgggcggcggcggcggcaagcgctga

SEQ ID NO: 938 - protein, 161 aa, Sorghum bicolor
MVLKTELCRFSGQKIYPGKGIRFIRADSQVFLFANSKCKRYFHNRLKPAKLTWTAMYRKQHKKDIHAEAVKKRRRTTKKPYSRSIVGASLEVIQKKRAEKPEVRDAAREAALREIKERIKKTKDEKKAKKAEVTKSQKSQSKGAVQKGSKGPKLGGGGGKR

SEQ ID NO: 939 - DNA, 258 bp, Sorghum bicolor
atcaacaagctactatacaagattcgatccatacggatgtgtggctcattggcgttaaacatgtgtggagttgcctgtggtagacttgatttgtgttatgagatgggatttggtggcctctggtacggttcaaccaaatatatgagacatggctttattgttccttttcttattcacgagtgtattttggattatattaattatcatatgcaattgtccgagactataaactacgaaaaatatatcgttgtttttatt

SEQ ID NO: 940 - protein, 86 aa, Sorghum bicolor
INKLLYKIRSIRMCGSLALNMCGVACGRLDLCYEMGFGGLWYGSTKYMRHGFIVPFLIHECILDYINYHMQLSETINYEKYIVVFI

SEQ ID NO: 941 - DNA, 954 bp, Sorghum bicolor
atggagcctcatcacgcaaacaagccaaagccaaagctgagcatgaagcattccaagttcatcttctgcaagctctacatttcagaaacccgcaatactatggctatggacacaatcgagcatgcaagcaagagtgatgctcaggttgttgtcgtcagccagttaggagatcatcactacaaccgcttccgctacacgcttgtctcctacatcgtcgatgacagctcaactggagaagtgatatatagcccaatcaggaaggtgttgctggcgatgattgaggctgcatttgcaaccataaaccttgaatcacagtcagggacgcatccaaggatcggtgtcgtcgatgacttgtccttccaccccgtgggtcaagccacaattgaggatgctgcttctttggctaagcaggtagcatctgacattggaaatggcttacaagtcccagtgttcctgtatgcagcagcccacccaacaggaaagtctgtgggtgcaattcggcgtgagcttggctactaccgtccaaattacaaggaaaaccagtggttaggtagcgtactccctgatgttctgccagttaagcctgatgtgggtccaactcatgtctcacataagagaggtgccacaacagttggcgttacgccttggattgagggctacaatatcccagtactgtctaaggatgtcccagctgtgaggaggattacccgcagggtgactggacggagtggagggcttccaacggtgcaagctcttgcactcttccatggagatgattgcacagagattgcatgcttgttggatccagatcatgtcagtgcctatcaagttcagaccgtggtggagcagattgcaggagagcaaggacttgaagttgagcaggggtactacactgacataaccaaggatgcagcgctcgataagtatttgaagattgcttgcactgatgattga

SEQ ID NO: 942 - protein, 317 aa, Sorghum bicolor
MEPHHANKPKPKLSMKHSKFIFCKLYISETRNTMAMDTIEHASKSDAQVVVVSQLGDHHYNRFRYTLVSYIVDDSSTGEVIYSPIRKVLLAMIEAAFATINLESQSGTHPRIGVVDDLSFHPVGQATIEDAASLAKQVASDIGNGLQVPVFLYAAAHPTGKSVGAIRRELGYYRPNYKENQWLGSVLPDVLPVKPDVGPTHVSHKRGATTVGVTPWIEGYNIPVLSKDVPAVRRITRRVTGRSGGLPTVQALALFHGDDCTEIACLLDPDHVSAYQVQTVVEQIAGEQGLEVEQGYYTDITKDAALDKYLKIACTDD

SEQ ID NO: 943 - DNA, 2520 bp, Sorghum bicolor
atggttctcgctgccgagagctcgaggggtagagaatatggcggtgaccggccggcggaggtcgtcgtcgtcgacatcgagagcggcggcggcagcctggatggagcgtcgtcgtcgtccatcgtggataggcaggactcgctgttccgggaggcggtgacgggtcatcaccgccgtgctgccggcggcgcagggcactctgatcatgatagctgggggacgacgctgcggctggcgttccagtgcgtgggcatcctgtacggcgacgtcggcacgtcgccgctgtatgtctactccaccaccttcggccacggcggcgacggcggcggcgttggccaccctgacgacatcctcggggtgctctccctcatcatctacagcttcgtgctcttcaccgtcatcaagatcgtcgtggttgcgctccacgccaacgatgacggggatggaggaacgtttgcactctactctttgatttcgagatacgccaaggtgagtctgctcccaaaccatcaggctgaagatgagctggtctccagctacagcaccaaccttgggaagccgtcggccacactaaggagagctcattggctgaagcatttgcttgagacaagcaagtcggcgaagatctccctgtttctccttaccatccttgcaattgcgatggtcatcagcgatgctgttttaactcctcctatttcggtgctctcagctgtcagtggcctgaaggaaaaggtgcctgatttgaccacagatcaaatagtctggatcaccgtggcaattttggtagttctgtttgctatccaacgcttcggaaccgacaaagttggctacttgttcgcaccaatcatcctgctgtggttgcttctcattggaggagtcgggctctataacctgatcaaatatgatgtcggtgtattgaggtccttcaacccaaaatacatcattgactatttcaggagaaacaagaaggaaggatgggtctcacttggtgatattctccttgtttttacaggaacagaagctctttttgctaatctgggatacttcagcattagatccattcagttaagctttagccttggactactgccatctgtattgcttacttacatcggacaagcagcatacctaaggaagcaccccgaacattttgctaacactttctttagatcaactccaagcgctctgttctggccgacgtttatcttggcaattgcggcatccatcataggaagccaagcaatgatctcatgtgcgtttgcaactgtttcacatttacaaacactcagttgcttcccgagggttaggatactgcacacgtcaaagcggtttcatggacagctgtatgttcctgaagtcaatttactgctttgcatagctgcttgcgtcgtgactgtcagtttcaagacaacgaccattatcggaaaagcccatgaaatctgtgtcatccttgtgatgctcatcacgacactgctgatgacaatcgtgatgctcttggtgtggaaaatcaatatctggtggattgcgctcttcttcatcgtcttcgttccgaccgagtccatctacctatcatctgtgctatacaagttcactcatggaccatacatacccgtggccatgtcagcagttctaatggtggtgatgattgtttggcattacgtgcacgtcaaacggtacaaatatgagctgaagcacaccttatcccctgccaaggctgaaaagctgcttgagaagagcgatctgaagaggatcccaggagttgggctcttctacactgagctagtgcaaggcatcccacccatattccctcacctcatggagaaggtcccggcgattcactcggtcctgatcttcgtctccatcaagcacttacatgttccccatgtcgacgcctccgaacgcttcctcttccgacaagtagagcccaaggagtacaaagtatttcgatgcgtggcgcggtatgggtaccgggactccattggtgaggaggcagaagattttgtcctagcactggttgagagcctccagtactacatacgagatgtcaacctctactcagtggatgagatgcagaatgttagctacccgatttctcgagatcagagcttgtctcgggacaagccttctggaaggcatgccatctatgctgaggagatgattacgccgatccaatcgttctccgagctcacaacactgccaaatggttggagcaatcgtctaccacagtttcagtatagtagaattgatgatggttgttatgagcaggcatcaaagatgaatattgaggagttagccaagattgaggaggaacagaaggtgattcaaagagaagcagagaaaggtgtggtgtacattattggagaggctgaggtagtggcaaggcctcagtcctcgctccttaagaagattgtgatcaactacatatactccttcctaaggaaaaacttcatgcaaggagagaagatgttatcgattccacatggcaagctactgaaagttggaatctcatatgaaatctag

SEQ ID NO: 944 - protein, 839 aa, Sorghum bicolor
MVLAAESSRGREYGGDRPAEVVVVDIESGGGSLDGASSSSIVDRQDSLFREAVTGHHRRAAGGAGHSDHDSWGTTLRLAFQCVGILYGDVGTSPLYVYSTTFGHGGDGGGVGHPDDILGVLSLIIYSFVLFTVIKIVVVALHANDDGDGGTFALYSLISRYAKVSLLPNHQAEDELVSSYSTNLGKPSATLRRAHWLKHLLETSKSAKISLFLLTILAIAMVISDAVLTPPISVLSAVSGLKEKVPDLTTDQIVWITVAILVVLFAIQRFGTDKVGYLFAPIILLWLLLIGGVGLYNLIKYDVGVLRSFNPKYIIDYFRRNKKEGWVSLGDILLVFTGTEALFANLGYFSIRSIQLSFSLGLLPSVLLTYIGQAAYLRKHPEHFANTFFRSTPSALFWPTFILAIAASIIGSQAMISCAFATVSHLQTLSCFPRVRILHTSKRFHGQLYVPEVNLLLCIAACVVTVSFKTTTIIGKAHEICVILVMLITTLLMTIVMLLVWKINIWWIALFFIVFVPTESIYLSSVLYKFTHGPYIPVAMSAVLMVVMIVWHYVHVKRYKYELKHTLSPAKAEKLLEKSDLKRIPGVGLFYTELVQGIPPIFPHLMEKVPAIHSVLIFVSIKHLHVPHVDASERFLFRQVEPKEYKVFRCVARYGYRDSIGEEAEDFVLALVESLQYYIRDVNLYSVDEMQNVSYPISRDQSLSRDKPSGRHAIYAEEMITPIQSFSELTTLPNGWSNRLPQFQYSRIDDGCYEQASKMNIEELAKIEEEQKVIQREAEKGVVYIIGEAEVVARPQSSLLKKIVINYIYSFLRKNFMQGEKMLSIPHGKLLKVGISYEI

SEQ ID NO: 945 - DNA, 450 bp, Sorghum bicolor
atgatcagtgccaagagacttgttgagatggcaaagaagtggcagagaatggctgccctggcgaggaagcggctgacggcgaatccggggaaacaagccgccgatggttcgtgcggcgcatcgacatcggtggccgtcaagggccactgcgtcgtgtactcctcggacgggtggcggttcgaggtcccgctggcttatctcggcacagcggtgttcagcgagctcctgtccatgtcgcaggaggagtttgggtttgccggcaacgatggcaggatcacgttgccctgtgacgccgcagtgatggagtacgtgatgtgtttgcttgggcgagacgcctctgaagaggttgtgaggtcgttgttgagctccatcatctccatggtcagaccttgccaccacagcgtcagtggcatggtgccatcgttgcgccaatcagctatctgtgtatag

SEQ ID NO: 946 - protein, 149 aa, Sorghum bicolor
MISAKRLVEMAKKWQRMAALARKRLTANPGKQAADGSCGASTSVAVKGHCVVYSSDGWRFEVPLAYLGTAVFSELLSMSQEEFGFAGNDGRITLPCDAAVMEYVMCLLGRDASEEVVRSLLSSIISMVRPCHHSVSGMVPSLRQSAICV

SEQ ID NO: 947 - DNA, 1230 bp, Sorghum bicolor
atgatgcagccgccgccgccacagcagcagcagcaatgggcaatggcgccgccgcccccgccgcagtactaccaggcgggacaccccccgccgccgcccccgcagttctaccaggcgggccctccgcctcctgctatgtggggccagccgccgccgcaagcggccccggccccggcgccggcaccgtccggcggtggggcgggggacgaggccaggaccctctggatcggggacctgcagtactggatggacgagaactacctctacagctgcttctcccaggccggcgaggttatttctgtgaagataattcgaaacaagcagactgggcaacctgagggttatggttttattgaattcggcaaccatgctttagctgaacaagttctgcagaattataatggtcaaatgatgcctaatgttaatcaacctttcaaattgaattgggctaccagtggggctggtgagaaacgtggagatgatggttcagattatactatatttgttggggacttggcctcggatgttacagatttcattctacaagatacattcaagagtcgttatccatcagttaagagtgcaaaagttgtcttcgacagaactacaggccgctcgaaaggctatggttttgttaagtttgcagatttggatgaacagacacgggcaatgactgaaatgaatggacaatactgttctagcaggcccatgcgccttggaccagcatccaacaagaagaatactggtggacaaccacagccatcgagtactatttaccagaatacccaaggaactgattctgatagtgatccaaacaatactactgtatttgttggtggtcttgatccgagtgtgactgatgagcttctcaagcaaaccttcagtccatacggagagcttctctatgtcaaaatacctgtaggaaagcgttgtggatttgtccaatattctaacagggcttcagctgaggaggccataaggatgctaaatggaagccagctgggaggtcagagcataaggctctcatggggtcgtagccctgcaaacaagcagcctcagcaagagcagaaccaatggagtggtggtggctattatgggtatccccaaggatatgatccatatggttatgctcgcccccctcaagatcctgccatgtacgcctacacaccatatccagggtatggaaattaccagcagcagccaccacagcagcccccaccacaacagtaa

SEQ ID NO: 948 - protein, 409 aa, Sorghum bicolor
MMQPPPPQQQQQWAMAPPPPPQYYQAGHPPPPPPQFYQAGPPPPAMWGQPPPQAAPAPAPAPSGGGAGDEARTLWIGDLQYWMDENYLYSCFSQAGEVISVKIIRNKQTGQPEGYGFIEFGNHALAEQVLQNYNGQMMPNVNQPFKLNWATSGAGEKRGDDGSDYTIFVGDLASDVTDFILQDTFKSRYPSVKSAKVVFDRTTGRSKGYGFVKFADLDEQTRAMTEMNGQYCSSRPMRLGPASNKKNTGGQPQPSSTIYQNTQGTDSDSDPNNTTVFVGGLDPSVTDELLKQTFSPYGELLYVKIPVGKRCGFVQYSNRASAEEAIRMLNGSQLGGQSIRLSWGRSPANKQPQQEQNQWSGGGYYGYPQGYDPYGYARPPQDPAMYAYTPYPGYGNYQQQPPQQPPPQQ

SEQ ID NO: 949 - DNA, 366 bp, Sorghum bicolor
atggcggcagcgccggtggaggtgggcgcgcagggcacggtgggctcgctggtgctccgggaggtcgagtacttccggcggatggaggtcgccggcggccacggcaagaagagcagcagcaaggtcgttggagccagcggcggcagcggcagcggcagcccgtggagcgacagcggcaagaagccgaagccgacgacgaagaagaagggtgccgtagcagcaggcaatgggtccttcttgccgaggatgtgctcgtcggcggaggtcgccgaggaccccggcagcggccggagggagcggccgtccagggtccgctaccggcctctgggcgacgacgacggggacgctctgcctcagcaggactag

SEQ ID NO: 950 - protein, 121 aa, Sorghum bicolor
MAAAPVEVGAQGTVGSLVLREVEYFRRMEVAGGHGKKSSSKVVGASGGSGSGSPWSDSGKKPKPTTKKKGAVAAGNGSFLPRMCSSAEVAEDPGSGRRERPSRVRYRPLGDDDGDALPQQD

SEQ ID NO: 951 - DNA, 1074 bp, Sorghum bicolor
atggcagcgcgcccggttcttccttctcctgctctcctcttgcttcccctgctgctgcttgtgactgcttcgtcaggtgccgcccatggctacggccacggcggcgacgacgacgacggtgcgggtaagctcagggtcgggttctacaaggactcgtgcccggacgccgaggcgatcgtccgcagggtcgtcgccaaggccgtccacgaggatcccacggccaatgcgccgctgctcaggcttcacttccacgactgcttcgtcaggggctgcgaggggtccgtgctcatcaactccaccaagggcaacaaggcggagaaggacgccaagcccaacctcacgctggacgccttcgacgtcatcgacgacatcaaggacgcgctggagaagcgatgccccggcaccgtctcctgcgccgacatcctcgccatcgccgccagggacgccgtctcgctggccaccaaggcggtgaccaagggaaggtggagcaaggacgggaacctctaccaggtggagaccggcaggcgggacggccgcgtctccagcgccaaggaggccgtcaagaacctgccggactccatggacggcatccgcaagctcatcaggaggttcgcctccaagaacctcagcatcaaggatctcgctgttctctcaggtgcccacgcgatcgggaaatcgcactgcccgtcgatcgccaagcgtctgcgcaactacacggcgcaccgggacagcgacccgacgctggacggcgcgtacgcggcggagctgaggcggacgtgccggagccgccgggacaagacgacggagctggagatggtgcccggcagctccacgacgttcgacacggcctactacggcctggtcgtgaagcggacggcgctcttccactccgacgaggcgctgctcaggaaccaggagaccagggcgctcgtctaccgctacagggacgccgccgccgggtcggagcaggcgttcctgagggactttggggtgtccatggtgaacatgggcagggtcggcgtgctcaccggcgaccagggagagatcaggaagagatgtgccttcgtcaactag

SEQ ID NO: 952 - protein, 357 aa, Sorghum bicolor
MAARPVLPSPALLLLPLLLLVTASSGAAHGYGHGGDDDDGAGKLRVGFYKDSCPDAEAIVRRVVAKAVHEDPTANAPLLRLHFHDCFVRGCEGSVLINSTKGNKAEKDAKPNLTLDAFDVIDDIKDALEKRCPGTVSCADILAIAARDAVSLATKAVTKGRWSKDGNLYQVETGRRDGRVSSAKEAVKNLPDSMDGIRKLIRRFASKNLSIKDLAVLSGAHAIGKSHCPSIAKRLRNYTAHRDSDPTLDGAYAAELRRTCRSRRDKTTELEMVPGSSTTFDTAYYGLVVKRTALFHSDEALLRNQETRALVYRYRDAAAGSEQAFLRDFGVSMVNMGRVGVLTGDQGEIRKRCAFVN

SEQ ID NO: 953 - DNA, 384 bp, Sorghum bicolor
atggaaaggaagaaaaatgaatatacgaagaagcaaagagagagagagaacaagagaaacgagagagaggagagagaaaacgaagattcttccaatcaaaaggtaatgatgaaaactttcatcacctgccagatacacagaggaaagaggagtcaaagcaggccatcattacaccaatctttgctgctcctcgattcccaacaaacaagcaaacaaaaaaggcacagtggagtaataagatccaggagtggaagtacagtaccccacaacatactaagaacacccagggatctcacaaacactccagctaacgagtatttcaaaatcaaagagccagaccaaatttatatagtactagctcctaactctcgcgatatcatttga

SEQ ID NO: 954 - protein, 127 aa, Sorghum bicolor
MERKKNEYTKKQRERENKRNEREERENEDSSNQKVMMKTFITCQIHRGKRSQSRPSLHQSLLLLDSQQTSKQKRHSGVIRSRSGSTVPHNILRTPRDLTNTPANEYFKIKEPDQIYIVLAPNSRDII

SEQ ID NO: 955 - DNA, 906 bp, Sorghum bicolor; identical to SEQ ID NO: 463

SEQ ID NO: 956 - protein, 301 aa, Sorghum bicolor; identical to SEQ ID NO: 464

SEQ ID NO: 957 - DNA, 858 bp, Sorghum bicolor
atggcgctcgccgccccttcttccctccgccgcctcccgaccacgccaccgcatgtgctgtctccgccctgtgcctaccgcctccgctcgcgccctctgcgggagccccgtctctgccggagactcgtcgccgcggcggcggccgccacggctccactcgcttcgtcgcccaccaccgcggacacggagcggaggaagcacgagctgctgcgcgcggttcaggaaacgcggcgcggattcgcggcggggcccgaccaacgcgctgccatcgaggaggccgtcgtggccgtggaggagcgtggtgcggggaaggggacgccgctagatctcgcggcgctcgatggcacctggaggctgtgttacacatcggcgtcagacgtgcttgtgctgttcgaggcggccgagaggcttccacccctgcaggtggggcaaatatatcagaaatttgagtgcaaagatcgatcagatggtggaactgtgcggaatgttgtaaggtggagcatcgagaacttgctggaggagcaagaaggtgcaacactgatggtctctgcgaagtttgttgtcctgtctaaacgcaatatctttcttcaatttgaggaggtcgctgttgaaaatatcaagattagtgagcaactgcaggcattaatagctcctgctatacttcctcggtcatttttgagccttcagatattgcagttccttaaaacctttcgagctcaagttcctgttggtggtcctgaaagacgatcacctggaggactatattatctttcttaccttgatcgtgatatgctcctgggtcgttcagttggtggtgggggagtatttgttttcacaaaagcacaacctcttacgtaa

SEQ ID NO: 958 - protein, 285 aa, Sorghum bicolor
MALAAPSSLRRLPTTPPHVLSPPCAYRLRSRPLREPRLCRRLVAAAAAATAPLASSPTTADTERRKHELLRAVQETRRGFAAGPDQRAAIEEAVVAVEERGAGKGTPLDLAALDGTWRLCYTSASDVLVLFEAAERLPPLQVGQIYQKFECKDRSDGGTVRNVVRWSIENLLEEQEGATLMVSAKFVVLSKRNIFLQFEEVAVENIKISEQLQALIAPAILPRSFLSLQILQFLKTFRAQVPVGGPERRSPGGLYYLSYLDRDMLLGRSVGGGGVFVFTKAQPLT

SEQ ID NO: 959 - DNA, 432 bp, Sorghum bicolor
atggaggtatttggcaaatctgtgattgctgagcccagcaatgtgattttcttgtctgcaatccttaacacagaagggtcaaaccctagtcacaagtgtgacaagaggtgccagaacgagcacatttttgggaacatgtaccgttgcaaactcactggaaccactcacatctgcgacaaaaactgtaaccagaggatcctctatgacaaccataactcgctctgccgagtgagtggacagttttttccgctctctccattggagcagcaagcagtgaggggtatccgcaggaagcatgaagtggacagcaatgaaggctgttcctttaagcgcaggcgtggtgcacagctgcatccttcccccttcgagaggtcctactctgctgtgtctccaatcccgagccaggttggagatggcatggacctgagctag

SEQ ID NO: 960 - protein, 143 aa, Sorghum bicolor
MEVFGKSVIAEPSNVIFLSAILNTEGSNPSHKCDKRCQNEHIFGNMYRCKLTGTTHICDKNCNQRILYDNHNSLCRVSGQFFPLSPLEQQAVRGIRRKHEVDSNEGCSFKRRRGAQLHPSPFERSYSAVSPIPSQVGDGMDLS

SEQ ID NO: 961 - DNA, 3720 bp, Sorghum bicolor
atggaggaaaccgccgccgcagccgctgcttgggcatctaatgccgccacgcccgccccgtccgagcccacgggatcccctgctgatgccggagcctccgctgatcgtaccgccgtcggtgacgatgagcacgactccaaggaggtcgtcctgcgcaggtacttcctccaggagtgggagttggtctccgcgatcctccgcagcatcgtcgccggcggcggcgttgccgaatccgccgatgtccacaggatccgctctatcatggacaaatatcaagaagagggtcaactactagagccatacctggagaacattgtctcaccacttatgtcgttggttcggtcaaagacaatggaacttggtgctggtactgatgaactccttgacattatcaagcctctgtgtatcatcatctacacccttgtcacagtgtgcgggtacaagagtgtcatcagattcttccctcaccaggtttcagatcttgagctcgcagttgctctccttgagaagtgtcatacaatgagttcggccactgctcttaggcaagagagcacaggagaaatggagactaaatgtgttgttctattgtggctttatatactggtcctgatcccatttgacatatccactgtggatacaagcattgctactgctgataacgtggatgggcctgaggtcgttccactggtgacaagaatattggacatctgtaaggattatctctccagttctggtccaatgagaaggatgtcaggattattgcttgcaaggctcttgactcgtcctgacatggcaaaggctttcagcagttttatggactgggcacacaagatgttattgtctgtaacagatgactttgtcgatcaatttagatccattggtatagtggaagctttagcatcaatatttaagattggtaaccgtagagcactgcatgatgctgtttctggtacttggagtgattgttcaattgtgatgaagactaatgtctcagccaggagtccacttcttagaaaattcctggtgaaactggcccagagagttgctctcattagcttgcctccacgttcgccatcatggcggtataaggcaattagcagttccttgggtgcaaacctttcaagttatacagctggagaagtgtattcaagtggatcaaacgcacgagttaatattgatcatataggcatgtgttttttggaagaagatatggatgttccagaaatagtagaagagattatcgacttgctattgactggtctgagggattcagatacaattgtaaggtggtctgctgccaaaggaattggtaggataactgcacgtttaacacctgcattgtcggaagaagtgctatcatcaatcttgcaacttttttctcctggggagggtgatggctcctggcatggaggctgtttagccttggctgaacttgctcggagagggttattgttgccttctagctttcctgatgttgttcctgttatagtaaaggctctacactatgatgtacgaagaggtccacatagcattgggtcacatgttaattgcagaagagctgcttctgctgcctttcaagagaatgttggaagacagggaacttttccacatggcattgatattgtgaatacaacagattactttgcactggcttcccgatcaaactcttatctgaatgttgctgtttctgttgctcagtacaaggagtatctttatccttttgcagatgagctactttgcaataaaataactcactgggagaaaagcttaagagagctggcagctcaggcgctttctttgcttgtacaatatgatatggattactttgctggacatgcccttgaaaagttagttccgtgcactctatcatcggacttgtgtactcgacatggagccactttagctgctggcgaggttgctttaaagttgtaccagctaggttttacctttactacagacatgcagaaagctttggcaggtattgttcctgcaatcgaaaaagcgcgcctttatcggggcaaaggaggagagatcatgcgctctgctgtttctcgattcatttcatgcatttctatagctgggatatccttgaatgacaagacgaagaaaagtttgttggaaacccttaatgagaatttgaggcatcccaattctcaaatacagtgtgctgctgttgaggcattgaagcattttattccaacatacctggtatcttctggtgaaaaaattgcaagtgatattatttcaaaatatgtggcacttctagatgacccaaatgtggctgcaagacgaggagctgcgctggcccttggaatattaccatacaaattcttgatgttgaaatggatgcctgtcatgagtaaactctgtagctcatgcacgattgaggataagcctgatgaccctgatgctgaagcacgtgtgaactctgttagggggctaatttcggtttgcgatacgctaacagcatcttttgatcagagctcaaatggtggagattctctatatgcatacataaaagattatgtcgtgcgagctttatttagagcactcgacgattatgctgtggacaacagaggagatgtgggttcttgggtacgtgaagcagcaatggatgcactagtacgctgcagcttcatcctctgcaagagagatattgttgcattgagagcagcatcagccactggccatgagtctgaactgggtgatatggaagtaaatgcaagtagtactgcacaccggctatttgattctggcattgcacaggatctggtagcaggaattgcaaaacaagcagttgagaaaatagataagatgagagaaatagctatcaagaccctgcagagaattctgtaccaccaggaacacctcatcccatttataccacacagggaactgctggaagaaattattcccaacagcacagatttggagtgggcggttcctactgtatcatatccacgattggtgaaacttcttcaggtcagctattatagcaagtctgtgctctcagggctcgtgatttctacaggtggattgcaggagtctttgaaaaaagcttcaacgacagctttggtagggtatctccaagattcagacatcaatactaattgtgaagggaaaagtagagagtatctattgagttctgatcttctatgggtcctccagcactaccagaaatgtgatcgtgtaattactcccacattgaagactattgaggctctcttcagtaaaaagattttcttgaacaaggaggggtacagtgagttctacagtggactggtagattcggtgggctctgagctgaagggatccaaggatttcacaaagttatgtgcaggtctctcaatccttggatacatttcttcacagtcagatggaacttgcactaaggcattttctcaactcctcacattcctaggccacagataccccaagatccgaaaagctgcagcagaccaggtgtaccttgtgctgctgcaaaaagatgatcttattatgtcggagaatatagataaagctcaggaattacttgcggagacatgctgggaaggagatgcggaggaagcaaggcgcaggaggtcagaaatcaacgagatggctggtttcagggcgaccactacacagaagtctggaaaccaagaaacaagaagaacggttgccacttcgaacgatgagaacaaatcttattcatcgttggtcgatttcagcggatactaa

SEQ ID NO: 962 - protein, 1239 aa, Sorghum bicolor
MEETAAAAAAWASNAATPAPSEPTGSPADAGASADRTAVGDDEHDSKEVVLRRYFLQEWELVSAILRSIVAGGGVAESADVHRIRSIMDKYQEEGQLLEPYLENIVSPLMSLVRSKTMELGAGTDELLDIIKPLCIIIYTLVTVCGYKSVIRFFPHQVSDLELAVALLEKCHTMSSATALRQESTGEMETKCVVLLWLYILVLIPFDISTVDTSIATADNVDGPEVVPLVTRILDICKDYLSSSGPMRRMSGLLLARLLTRPDMAKAFSSFMDWAHKMLLSVTDDFVDQFRSIGIVEALASIFKIGNRRALHDAVSGTWSDCSIVMKTNVSARSPLLRKFLVKLAQRVALISLPPRSPSWRYKAISSSLGANLSSYTAGEVYSSGSNARVNIDHIGMCFLEEDMDVPEIVEEIIDLLLTGLRDSDTIVRWSAAKGIGRITARLTPALSEEVLSSILQLFSPGEGDGSWHGGCLALAELARRGLLLPSSFPDVVPVIVKALHYDVRRGPHSIGSHVNCRRAASAAFQENVGRQGTFPHGIDIVNTTDYFALASRSNSYLNVAVSVAQYKEYLYPFADELLCNKITHWEKSLRELAAQALSLLVQYDMDYFAGHALEKLVPCTLSSDLCTRHGATLAAGEVALKLYQLGFTFTTDMQKALAGIVPAIEKARLYRGKGGEIMRSAVSRFISCISIAGISLNDKTKKSLLETLNENLRHPNSQIQCAAVEALKHFIPTYLVSSGEKIASDIISKYVALLDDPNVAARRGAALALGILPYKFLMLKWMPVMSKLCSSCTIEDKPDDPDAEARVNSVRGLISVCDTLTASFDQSSNGGDSLYAYIKDYVVRALFRALDDYAVDNRGDVGSWVREAAMDALVRCSFILCKRDIVALRAASATGHESELGDMEVNASSTAHRLFDSGIAQDLVAGIAKQAVEKIDKMREIAIKTLQRILYHQEHLIPFIPHRELLEEIIPNSTDLEWAVPTVSYPRLVKLLQVSYYSKSVLSGLVISTGGLQESLKKASTTALVGYLQDSDINTNCEGKSREYLLSSDLLWVLQHYQKCDRVITPTLKTIEALFSKKIFLNKEGYSEFYSGLVDSVGSELKGSKDFTKLCAGLSILGYISSQSDGTCTKAFSQLLTFLGHRYPKIRKAAADQVYLVLLQKDDLIMSENIDKAQELLAETCWEGDAEEARRRRSEINEMAGFRATTTQKSGNQETRRTVATSNDENKSYSSLVDFSGY

SEQ ID NO: 963 - DNA, 963 bp, Sorghum bicolor
atgtcgtcctcgtcctcgtcgtcctccgctgcctccgcggccacggtgttcccgccgtccccgcagctgccgccgtccccgctcctggtggagaacctcccgccgctgcatcagctcacgccggtagcggcggcggaggccgccgcgccggcctccgagcagctctgctacgtgcactgccacttctgcgacaccgtcctcgtcgtgagcgtgcctacgagcagcttgttcaagacggtgacggtacgatgcggccactgcagcagcttgctcactgtcaacatgaggggcctcctcttcccgggaacgccgacgaacacagccgcagcggccgcaccaccagctgctgtcaccgccagtaccaccaccaccaccaccaccaccatcaccacggcgccgccgccggccacctcggtcaacaacgggcagttccacttcccccagtcggtcgacctcgcgcccaaccctcaccaccaatccctcctgctggatgagatatccagcgcgaacccgaggctgcagttgctggagcagcacggcctcggcggcctgatcccgagcggcaggaacgcggccgcgccggccccgcccccgccgcctgcagcggccggtaaaggggccaaagagccgtcgccgcgcactaaccccgtcatcaacagacctccggagaagaggcagcgcgtgccgtcggcgtacaaccgcttcatcaaggacgaaatccaacgcatcaaggctggcaatcccgacatctcgcacagggaggccttcagcgcggccgccaagaactgggcgcactttccacacatccactttggactcatgccggatcaccaggggctcaagaagacaagcctgcttcctcaggatctccagagaaaggacgggcttctaaaggaagggctctacgcggcggcagccgccgccgccgctgcggcagccaatatgggggttgctccatactaa

SEQ ID NO: 964 - protein, 320 aa, Sorghum bicolor
MSSSSSSSSAASAATVFPPSPQLPPSPLLVENLPPLHQLTPVAAAEAAAPASEQLCYVHCHFCDTVLVVSVPTSSLFKTVTVRCGHCSSLLTVNMRGLLFPGTPTNTAAAAAPPAAVTASTTTTTTTTITTAPPPATSVNNGQFHFPQSVDLAPNPHHQSLLLDEISSANPRLQLLEQHGLGGLIPSGRNAAAPAPPPPPAAAGKGAKEPSPRTNPVINRPPEKRQRVPSAYNRFIKDEIQRIKAGNPDISHREAFSAAAKNWAHFPHIHFGLMPDHQGLKKTSLLPQDLQRKDGLLKEGLYAAAAAAAAAAANMGVAPY

SEQ ID NO: 965 - DNA, 225 bp, Sorghum bicolor
atgggggaacgaacgaagaaaaccaaagaatattattgtgacgagatctacatgttgctgtgtactgtaactctgacggacaaaccacaccgcaggcacccccctgctacatacccggggggtacctgtctggcctggcctggcctccgcgaggcctctggtctggagcctctcttcataaaaagctcatccagtcgcccacctgtacatctaatctttttttag

SEQ ID NO: 966 - protein, 74 aa, Sorghum bicolor
MGERTKKTKEYYCDEIYMLLCTVTLTDKPHRRHPPATYPGGTCLAWPGLREASGLEPLFIKSSSSRPPVHLIFF

SEQ ID NO: 967 - DNA, 2376 bp, Sorghum bicolor
atgagtcctgtgcaagatgggttgttgataagaaaacctccaggcatgaggtttccatcaagaagaaatgtgcctacatctgttgacccagtgggccatctccacaatggcagcagtttcgatgccgtctcggtgtctggttcagatggaagttctgggagatatacccccaagattagcgcaagcatgcacaactcatttcttcaggatagtagcaatgctctctctccatttgccaacaatggcaccgtgggaaacccattgaccagttccggtgactggtcaggaagctcagctcctgatgctagtacggatgggtcaacgagcaattctggcgaggcagggttaagaggggaagatgatgacgtggagaagctaagaagtgaggtagccactttaaccaggaaattggatgtctcagatatggagttgcagactctccgaaagcagattgtgaaggagagtcggcgtgggcaagatctctccaaggagatgagcagcctgagggaggagagggatgcactcagaagagaatgtgaaggacttagaggggcaaggaagactatccatgattcaaatggctcagggaaacggctctcagatggggatgacccatggtcacagattgaagaactgaagcaagatctgagtcatgagaagaatctaaatgcggatcttcgtctacaactgcaaaagatgcaggaatccaactctgagctgcttctggctgtgaaagatcttgatgagatgttggagcaaaagaacagagagatttccattttgcaagaggatacacgggatgatccgcaggaggcagaatatgagcatgcactgtcaaatgtgcacaattctggacacaaaatagccttatctgaatcgagttcataccaagagaaggaagatgagcttatgctagatgcactagcaaagaagcgtgatgacatctctacctctgagcttgaaaagaaaatccttgagttgagcaatgaaattgagttgtacaagaaagatcgtgaggatatcgagatgcagatggagcaacttgcacttgattatgagattctaaagcaagagaaccatgacatatctacaaggctggagcaaacacaactcagagagcagctaaggatgcaatatgagtgttcagctcatttgtctattataagtgatcttgaggccaatgttgagagcttggataatgaactccagacacaggctaaaaagtttgaggctgacatagcagaaataatgagcgcaaaggtggaacaagagcaacgggccattaaggctgaggattctctgaggaagataagatggaataatgcaactactgcagaacgacttcaggaggaattcaaggtgttgtcttcacaggtatcttctgctttcagtgcaaacgaacgacaccttgtgcaagcaaggaaagaggtggcggagctgcagctgcagaagagccagttggaagagttactgcagaaggctcaaggagatctcggatcagttcaggatcagcaccgggtaaaggtccaacagttaataaccctagtggatttcaagtcaaaggagatagacaggctactgatggagctcaaaagcaagagtgacgagttccatagccaaaaaagatgtgatgaagcaaggatgaatgctctgtcagaagaaattgacctactcaatgccaagattgacaagctatccagtgagagaaacgagctcttcgaaaagaatgagcagaaagataaggagttagctggaattagtgaaaaggacatgcaattgcaagacaaaactgctgagattacttcactaaataaagagcttgtatccctcaaggaccaagtgaagatgcatttggacgaactacacaatttaaaacgtttgaagaacgagaaggaggagacaattggaaagctgcaaatagatattgggtcactgaaactccagtgcgacaacttgaagactttgctgtccaagaaggagtctgagaaagacaaccttgcttctcaggtgctgaaactgagaagatcccttgaaacccgggaaggggcaaaggcaaatggtcaaaattcagatgcgaaggacaatcagcacactaataataagcgcaccaaacacaataccggctccactgggagcactactgcactgccaagcaccaacagacagggtgactgcaatgggcttgacatgagtaacgcggctgaccagtcagcaaaggagctggcctcactgaaggagaggaacaaggcgatggaggaggagctgaaggagctgcacgaacggtactcagggattagcctgaagttcgcggaggtggaaggcgagcggcagcagctcgtgatgacggttcggtcgctgaagaactccttgcggtga

SEQ ID NO: 968 - protein, 791 aa, Sorghum bicolor
MSPVQDGLLIRKPPGMRFPSRRNVPTSVDPVGHLHNGSSFDAVSVSGSDGSSGRYTPKISASMHNSFLQDSSNALSPFANNGTVGNPLTSSGDWSGSSAPDASTDGSTSNSGEAGLRGEDDDVEKLRSEVATLTRKLDVSDMELQTLRKQIVKESRRGQDLSKEMSSLREERDALRRECEGLRGARKTIHDSNGSGKRLSDGDDPWSQIEELKQDLSHEKNLNADLRLQLQKMQESNSELLLAVKDLDEMLEQKNREISILQEDTRDDPQEAEYEHALSNVHNSGHKIALSESSSYQEKEDELMLDALAKKRDDISTSELEKKILELSNEIELYKKDREDIEMQMEQLALDYEILKQENHDISTRLEQTQLREQLRMQYECSAHLSIISDLEANVESLDNELQTQAKKFEADIAEIMSAKVEQEQRAIKAEDSLRKIRWNNATTAERLQEEFKVLSSQVSSAFSANERHLVQARKEVAELQLQKSQLEELLQKAQGDLGSVQDQHRVKVQQLITLVDFKSKEIDRLLMELKSKSDEFHSQKRCDEARMNALSEEIDLLNAKIDKLSSERNELFEKNEQKDKELAGISEKDMQLQDKTAEITSLNKELVSLKDQVKMHLDELHNLKRLKNEKEETIGKLQIDIGSLKLQCDNLKTLLSKKESEKDNLASQVLKLRRSLETREGAKANGQNSDAKDNQHTNNKRTKHNTGSTGSTTALPSTNRQGDCNGLDMSNAADQSAKELASLKERNKAMEEELKELHERYSGISLKFAEVEGERQQLVMTVRSLKNSLR

SEQ ID NO: 969 - DNA, 600 bp, Sorghum bicolor
atggctaccgtgaggggaatccgtgctctctatgcagttgtcgcgctgctacttctcatggcccttcacacaccaggccggctggcgcaggcggccttcccataccgttccctgctccagacctgccagcccagcggctccatccccggccgttccggcaactgcaacacggagaacggctccgagtgctgcaagaacgggcagagctacaccacctacgactgctcgccgcccgtcacgggtagcaccggcgccctactcacgctcaacagcttcgccgagggcggggacggcggcggtgccgccgcctgcacgggggagttctacgacgacagcaagaaggtggtcgcgctgtcaactggctggtacaacggcggtagccggtgtagcaagcacatcgtgatccgcgcgacgagcaacgggaacaccgtgagggcgttggtcgtcgacgagtgcgactccaccgtaggctgcgacaaggaccacaactttgagccgccgtgccggaacaacatcgtcgacgggtcaccggcggtgtgggacgctctggggctcaacacggacgacggccaggcccagatcacctggtccgacgagtga

SEQ ID NO: 970 - protein, 199 aa, Sorghum bicolor
MATVRGIRALYAVVALLLLMALHTPGRLAQAAFPYRSLLQTCQPSGSIPGRSGNCNTENGSECCKNGQSYTTYDCSPPVTGSTGALLTLNSFAEGGDGGGAAACTGEFYDDSKKVVALSTGWYNGGSRCSKHIVIRATSNGNTVRALVVDECDSTVGCDKDHNFEPPCRNNIVDGSPAVWDALGLNTDDGQAQITWSDE

SEQ ID NO: 971 - DNA, 2718 bp, Sorghum bicolor
atgttcctcctcagagccaccagcagcagcaccaccacggccacctcctcgctcctcctccgatgccgtccgctcccctcgcctaaaaccctagcactcgccccgcctcctactatcctccccttctgcttccgctcccgcctctccgcctccgcatcctccgcctctcgccgccgccgtgcgaccgcggcagccgctgcaggcaaatccggggagaagaagccgccgaccgcgagggccaagcaggccgacgcagggcctgcagcggcggcggcggccggaatgtcggcctccggtggcggatcctcggggaagcgcacggtggcggacgtgctgatggggaacgcacgggccgctgccagcaaggcgaagaaggcagcgccgtcgccgaagaagccccgggcgaaggctgacggcgcggaggccgaactggaggctgcggcggtagcggagaaaccgccttcgccggtgaggtccaagcgggcgtcgtccccagcgaagtcccccaaattgctggctgatgggtctacatcgccggctaagtccaagggtccagccgcggccgctcaattggatgcggcgaaggagaattccccgtcgccaaagaggtccaaaaccctagccgctaaatccgacacccagccttctggtgaaggtgttgtctcgcacaccgatgggaagaaggggtcacccgcgcccaccaaggctaaaggccaggcttcgcaacaagaggagaagaagcgggccacttcacccaagaaggctaaaaccacagattccgattcggcaaagacagaggagaagaacaccacccgggccacttcacccaagaaggctaaaaccacagattcccgaaaggcagaggagaagaacaccaccctagagctaaagaagaaaggcagtgagtttgacccgatggctgctgcctattggaagcctggtgagcccgtgccattcctgtttctggctcgggcacttgatctcatctccaacgagagtggccgcattgttattacagaaatcctatcaaacgtgtttcgcacagtgatggcaacaacaccggatgatctcctcgcaactgtgtacctctcagccaaccggattgcgccacctcatgaggggattgagcttgggattggggatgcatcagtcatccgtgcacttgcagaggcatatggacgcaaagaggagcacgttaagaaggaccttaaggaattgggtgatttggggcttgtggcaaaagcaagcaggtcatcgcagaagatgatgtttaagccaaaaccactgacaatagctcgggtgcttagcacttttcgggcaattgcaaaggaatcgggcaaagacagtcaagataaaaaaagaaaccatatgaagggacttcttgttgctgctactgactgtgaaccccagtacatcacacgccttcttcagtcaaagatgaggattgggctggcagagaaaactgtccaaatggctcttgggcaagctgctgtatattctgataaaaattcttcgccaccaaaagttcaatcacctttcgaagaggctgcaaaaataattaaacaagcatattcagttcttccaatatatgataaaattgtcccagcgatacttgaagtaggagtttggaagcttccagagacatgcaaattttccataggtgtccctgttggccctatgttagcaaaagcaacaaaatctgtctcagagatcattgacaagtttcagggtcttgaatacacttgtgagtacaagtatgatggtgaaagggctcagatacattgcatggaggatggttcagtagagatttatagtcggaatgctgaaagaaacactggaaagtatccagatgttgttgatgcagtttctagatttaggaagcctacagtcaaatcatttgtcttggactgtgaaattgttgcctatgatcgtgaaaaacagaaaattttgccttttcagatacttagcacaagggctcgcaagggtgttaccataaatgacatcaaagtttcagtctgtacttttggctttgatattctttacataaacgggaaacctcttctccaggaacaactcaaaattcgtcgagagcatctttacaactccttcgaagaagtgccaggtgtttttcaattggctactgcaattacatcaaatgacctggaggagatacagaaatttcttgacacagctgtcaactccagttgtgaagggttgattatcaagacattggataaagacgctacatatgagccagcgaagcgatcaaacaattggttgaaactgaagaaggattacatggatagcattggtgactctttggacttagtacctattgctgccttctatggtagaggaaaacgaacaggtgtctttggatcattcctcctggcatgctatgatgagcagaatgaagagtatcaaacaatatgcaacataggtactggattttctgagcaacagcttgaagaacgttctgcgagccttcgaagtaaagtgatagaaaaaccaaaggcatactatagatttgctgacacaatggaccctgatgtgtggtttgagccatcagaggtgtgggaggtcaaagctgcagatctgagcataagccctgtacatcgtgctgctaatggtatagtcgatcccaataaggtcgctgacatgtaccggtctcaaaagatcaaccatggttataaccaggaggatgaggacgatgactga

SEQ ID NO: 972 - protein, 905 aa, Sorghum bicolor
MFLLRATSSSTTTATSSLLLRCRPLPSPKTLALAPPPTILPFCFRSRLSASASSASRRRRATAAAAAGKSGEKKPPTARAKQADAGPAAAAAAGMSASGGGSSGKRTVADVLMGNARAAASKAKKAAPSPKKPRAKADGAEAELEAAAVAEKPPSPVRSKRASSPAKSPKLLADGSTSPAKSKGPAAAAQLDAAKENSPSPKRSKTLAAKSDTQPSGEGVVSHTDGKKGSPAPTKAKGQASQQEEKKRATSPKKAKTTDSDSAKTEEKNTTRATSPKKAKTTDSRKAEEKNTTLELKKKGSEFDPMAAAYWKPGEPVPFLFLARALDLISNESGRIVITEILSNVFRTVMATTPDDLLATVYLSANRIAPPHEGIELGIGDASVIRALAEAYGRKEEHVKKDLKELGDLGLVAKASRSSQKMMFKPKPLTIARVLSTFRAIAKESGKDSQDKKRNHMKGLLVAATDCEPQYITRLLQSKMRIGLAEKTVQMALGQAAVYSDKNSSPPKVQSPFEEAAKIIKQAYSVLPIYDKIVPAILEVGVWKLPETCKFSIGVPVGPMLAKATKSVSEIIDKFQGLEYTCEYKYDGERAQIHCMEDGSVEIYSRNAERNTGKYPDVVDAVSRFRKPTVKSFVLDCEIVAYDREKQKILPFQILSTRARKGVTINDIKVSVCTFGFDILYINGKPLLQEQLKIRREHLYNSFEEVPGVFQLATAITSNDLEEIQKFLDTAVNSSCEGLIIKTLDKDATYEPAKRSNNWLKLKKDYMDSIGDSLDLVPIAAFYGRGKRTGVFGSFLLACYDEQNEEYQTICNIGTGFSEQQLEERSASLRSKVIEKPKAYYRFADTMDPDVWFEPSEVWEVKAADLSISPVHRAANGIVDPNKVADMYRSQKINHGYNQEDEDDD

SEQ ID NO: 973 - DNA, 2115 bp, Sorghum bicolor
atggcttccgtctccacggcgccgcgcgccccgctcccggcggtggcctcctcgtcctcgtcgtccgcgcggcaggtggatccgaaccctagcggcagcagcttcctcgccgggcggcgcctccgcgtcgtccgccgcctcgccggcgcggccccgtcgcggcgcgctccgttggcctgctgctccgcgcgtagccccggcgcggacgccggcggcgatgagcggcgccggcggggttgggacgcgatgctccacgacgccttccagggtgccgtgcggcggtggagcgagtacgtccgaaattactggcccccatcgacctctgttaaggaggtgggtacggggaagagggttgggagttctcacgagcaggaggtgatgaatgggggtgaagagaggaaggctggggatgaagagggaaaatggggctgggagaggtggaagcggcactttgctctcgttgaggagagcgagcgtctcgttgatgagctccagctgcaactccaggctgctgtttatagagaagactacaggagtgctcataaactgaggctggctattgctgctacagcaaaaaatgacactgtgggcagagctatctctgacttaaatatggccatagacgaggagcgctacaaggatgcggcatatatcagagatcatgctggcgcaggactgctggggtggtggtctggaatttctggaaatttggctgatccatatggtcttataattcgtataagtgctgaacatggtcggtatgtggcaagaagttatgatacgagacagctggcttctgacagccctggtctccctatatttgaaatatactttgcagaggcaaatggtggatacaacctgcaggcagtgcatctgaaaccagatgatagcgattctgaccaagtgccaaacatgttaagggagaaacttggcattgacagtataaacatatctagcagttcagtagggtctaagcatgaaaaattcgatggaagtgtaaacatggatgataaagatagtgatgacagcaacattgctgctggccctggttcaaaaaacttgtcaagcgatccaactgcagttcccaggattaaaatcttgaaagtggtacccatgcagaatgttgaccaagactacataatcaatatatttgatcagatttcagaggaagatgatgacaatgatgatcctgaagttgaaaatgaatcttcagaagatgttggtgatgaagataacagtggagtagcagaaacagtttctgcagaagagaacggtgatgaatctggtgacgaaagtgatattgaagccttggtttcaattgattttgtcagtgagaataacaacgactatgcttctcgtccatctgatgaagcttttgaacgaatgccggctagattagaaaaaagagaccgcttctcattttccttctatactgaagaattcagtaaaaagctagatgctggaaaggcccagcagacttcaaagaaaacagttggtttgcataccgatcagcaggattatgatggttttgtccagcttgatcgtgtaaagttgagtggcagcaacaaaaaactatcgatactgcaacttggcatcaaacaaaataacaacaaggttcagcaaaaactgcatggagttacccactttagtcgtattcagatgcctatatcttcagatcctcttaccggcttatatgtgaccgcctcaggacttgactcagaaattcttagtttgcaacgaaaatttggtcaatggcgggaggatggttcatctgaggagcatagtgacctattgttctatgagtatgttgaagctgtaaaattaacaggggacaaccttgtgccagctggtcaggttgtcttccgtgcaaaagttggtgaacgttatcagctccctcataagggaattatccctagagaacttggagtgattgctaggtacaaggggcaaaggaaaattgcagatcctggtttccaaaaccctcgatgggttgacggggagcttttgatactagatggaaagttcatcagagatggtcctgtgatagctttcttttactggacatctaattttcatcttttcgaattctttagacggttgaggctttctgactag

SEQ ID NO: 974 - protein, 704 aa, Sorghum bicolor
MASVSTAPRAPLPAVASSSSSSARQVDPNPSGSSFLAGRRLRVVRRLAGAAPSRRAPLACCSARSPGADAGGDERRRRGWDAMLHDAFQGAVRRWSEYVRNYWPPSTSVKEVGTGKRVGSSHEQEVMNGGEERKAGDEEGKWGWERWKRHFALVEESERLVDELQLQLQAAVYREDYRSAHKLRLAIAATAKNDTVGRAISDLNMAIDEERYKDAAYIRDHAGAGLLGWWSGISGNLADPYGLIIRISAEHGRYVARSYDTRQLASDSPGLPIFEIYFAEANGGYNLQAVHLKPDDSDSDQVPNMLREKLGIDSINISSSSVGSKHEKFDGSVNMDDKDSDDSNIAAGPGSKNLSSDPTAVPRIKILKVVPMQNVDQDYIINIFDQISEEDDDNDDPEVENESSEDVGDEDNSGVAETVSAEENGDESGDESDIEALVSIDFVSENNNDYASRPSDEAFERMPARLEKRDRFSFSFYTEEFSKKLDAGKAQQTSKKTVGLHTDQQDYDGFVQLDRVKLSGSNKKLSILQLGIKQNNNKVQQKLHGVTHFSRIQMPISSDPLTGLYVTASGLDSEILSLQRKFGQWREDGSSEEHSDLLFYEYVEAVKLTGDNLVPAGQVVFRAKVGERYQLPHKGIIPRELGVIARYKGQRKIADPGFQNPRWVDGELLILDGKFIRDGPVIAFFYWTSNFHLFEFFRRLRLSD

SEQ ID NO: 975 - DNA, 1164 bp, Sorghum bicolor
atgacgggcggcgccaatggcaggagccagcagagctccaggggcaaggcgatgctgctcgccttgggcaagggcttccctgaccaagttctgcctcaggagaaggttgtggagagctacctccaagacagcagctgcgacgatcccgccaccagggccaagcttgagcgcctttgcacgaccactacagtgaggacaaggtacactgtcatgtccaaggagctactggataagcacccagagctgaagatggagggtactccaacactgacaccccgccttgacatctgcaatgctgcggtgatcgaccttggtgcagctgcagctcgtgctgcccttgacgattggggccgccctgcagctgatattacccacctcatctacatctcatccagtgagcttcgtctcccagggggagacgttcacctggctgcccgccttggccttagcccaaacaccgtgcgcacttcccttctcttccttggctgctccggtggcgctgctgccctccgcactgccaaggacattgctgagaacaacccagggagccgtgtcctagtaacggctgccgagaccactgtgctaggtttccggccaccaagttatgaccgtccttatgaccttgttggtgctgccctgtttggtgatggtgcctcagctgtgattataggagcaggccccatggcaccagcagaagatcctttcttagagcttgagttctccacacaggagttcctgcctgggactgataaggtaattgatggcaagattgcagaggaaggaattaattttaaactagggcgtgatttgcctgagaagattgaaagccgcatagaaggtttctgcaggactctcatgaaccaggtagggataaaggatttcaatgatgtattttgggctgtgcatcctggaggaccagcaatattgaacaggcttgagttctgccttgaacttcagccagagaagctcaagattagcagaaaagccttgaagaactatgggaacgtgagcagcaatacaatcttctatgtgctggagtacttgagggacgagctaaagaaaggggcaataagcgaagagtggggattgatcttggcttttggcccaggcatcacctttgaaggactgctagtccgaggggttaagaaaaccttcacaagctaa

SEQ ID NO: 976 - protein, 387 aa, Sorghum bicolor
MTGGANGRSQQSSRGKAMLLALGKGFPDQVLPQEKVVESYLQDSSCDDPATRAKLERLCTTTTVRTRYTVMSKELLDKHPELKMEGTPTLTPRLDICNAAVIDLGAAAARAALDDWGRPAADITHLIYISSSELRLPGGDVHLAARLGLSPNTVRTSLLFLGCSGGAAALRTAKDIAENNPGSRVLVTAAETTVLGFRPPSYDRPYDLVGAALFGDGASAVIIGAGPMAPAEDPFLELEFSTQEFLPGTDKVIDGKIAEEGINFKLGRDLPEKIESRIEGFCRTLMNQVGIKDFNDVFWAVHPGGPAILNRLEFCLELQPEKLKISRKALKNYGNVSSNTIFYVLEYLRDELKKGAISEEWGLILAFGPGITFEGLLVRGVKKTFTS

SEQ ID NO: 977 - DNA, 573 bp, Sorghum bicolor
atggccggtcgccggagcagcctctccatggtcgcgtcgcaccggctgttcgcgcccgcggtgcaccctgtgggcggcgcagccgcagaccatggcgtggagctcgacgaggccgacgtcatctggggcggcggcggccagacgtcgtcctctccgtcgtcgtcgtcgtcgttcctgtcctccgcggccgacccgtacgcgcggtcgccgccggtggccgcgccgtcgtccaagcagaagccgcgtggcgcgggtggcgctccggctccggggccggcgtcggtgcccgtcaacatcccggactggtccaagatcctgggcgccgagtacgccgggagctgcgccgcggcgcgcgcggccgggtgggcggcgcacgacgaccgcgcggactttttcaccgacgactgcggcaccgggggccggcgctgggtgccaccccacgaggtggtgcagggccgggatcgcgcggcggcgtctttctccgtgcgcgagggcgtgggacgcacgctcaagggccgcgacctccgccgcgtccgcaacgccatctgggagaagaccggcttccaggactga

SEQ ID NO: 978 - protein, 190 aa, Sorghum bicolor
MAGRRSSLSMVASHRLFAPAVHPVGGAAADHGVELDEADVIWGGGGQTSSSPSSSSSFLSSAADPYARSPPVAAPSSKQKPRGAGGAPAPGPASVPVNIPDWSKILGAEYAGSCAAARAAGWAAHDDRADFFTDDCGTGGRRWVPPHEVVQGRDRAAASFSVREGVGRTLKGRDLRRVRNAIWEKTGFQD

SEQ ID NO: 979 - DNA, 1131 bp, Sorghum bicolor
atgaacgacgacgtggtcagcgagatcctgctccgcctcccgtccgccgccgttctccgctcccgtgccgtctgcagggcgtggcgccgcatcgccagcagcccagccttcgccgcggcccacgcccgccgccgcccgctggagctcatcttccagcgccacggtccgagcggcgcgctcgaaagcatcccggcggccgccctcgacgagcctcagcgccggtgcctcgacgttgagtaccccgaggaatctagctggcgaggctacaacctgatcgcttcctgcgacgggctcctgctgttccagcgaggtcgcggcggcggcacctactacgtctgcaacccggtaacccggcagtggacgacagtgctgcctcgtcccgccggcaccttcacgctgccctgcggcttctacgtccacgggccaacccgcgagcaccgcctgctgtgcctcacgagcgaccaccagggatcgcactacgtttactcgctcgaagccgcccaagcccggcggctgggacaagcgttgccggtcgtggggttgttggttgaccagccaatctgctccctcaaccatcgcgggaagcttcactggctgcgccatccccgggtcatcttctcgacagagaacctcatggcggccgaagacgacgacaagtacaagatcttggcgtttgacaccatgtcggagacgttccggcggatctcccgcccgccgctgaggaggagggacggcgtcgccgagttcttcctgctggagatggacgggatgctggccatggcggattttctcgatggttcgatgcacctttcggtgctggaggactataatgatgacaatagctggacacgtcgtctccaggtttatttgccggcaccgttgcagcatgcatgttgggcggtgaacgccgacgtggaaggagcagcagggcaggatgtgattcttctaggagacagcaggacatgttgggtggggctataccatgtcaagcagaagagggtgttaaagaaaattctacttgctgacaatgagaggcgtggaattgcgcctcccacgctggtgcatgccctcttatttagggacagccttgagcgacacaacttcttccatcttcatcatagtccacaataa

SEQ ID NO: 980 - protein, 376 aa, Sorghum bicolor
MNDDVVSEILLRLPSAAVLRSRAVCRAWRRIASSPAFAAAHARRRPLELIFQRHGPSGALESIPAAALDEPQRRCLDVEYPEESSWRGYNLIASCDGLLLFQRGRGGGTYYVCNPVTRQWTTVLPRPAGTFTLPCGFYVHGPTREHRLLCLTSDHQGSHYVYSLEAAQARRLGQALPVVGLLVDQPICSLNHRGKLHWLRHPRVIFSTENLMAAEDDDKYKILAFDTMSETFRRISRPPLRRRDGVAEFFLLEMDGMLAMADFLDGSMHLSVLEDYNDDNSWTRRLQVYLPAPLQHACWAVNADVEGAAGQDVILLGDSRTCWVGLYHVKQKRVLKKILLADNERRGIAPPTLVHALLFRDSLERHNFFHLHHSPQ

SEQ ID NO: 981 - DNA, 3498 bp, Sorghum bicolor
atgcagggcttccccggcggcgcccccgatccgcagcagctccaggccaccatgctcgccatcgagcaggcctgctccctcatccagctgcacatgaatccatctgaagcggaaaaggtgataacttcgctgcattcgtctctgatgccttatcaagcatgcagattcattcttgagacatcgcaaatgcctaatgcgagattccaagctgctggtgcaattggtgatgctgcagtaagggagtggggaatccttacagatgacaacaaaagaagcctaataatatattgtttaaactatgttatggagcatgcaagttctcctgatggctatgtgcaatcgaaagtttctgccgtggcagctagattactgaaaagaggctgggttgagttttcagaccaagagaaagcagctatcttctttgaggttgagcaatccatccggggtattcatgggcctaatcgacagtttgctgcaatcaatttcctggaaaccttggtttcagaattttctccttcaactgcttctgctatgagcctgcctaaggaatttcatgaacaatgtgaatactcactcgaagtgcagtttttgaaggatttttactgctgggcacaagctgctgtgttcaatactgctgacaaaatcttgaattcaactgtaacaatacctgacgagagagcatgttcagcagcattgcgcctgatgtttcagatactaagctggaatttcaagcatactgtggagcatgagagttcagatgctaagataaattctggcttgaggattgatacgataaatctgaagaagtttgaacgttcgttggtgaagccagggtctatgtggagagagattctaatatcaaacggacaccctacctgggttttgaacttttacaccaccttgcgccaaaagtactcatatgatacattgtggggtgattctccaattgctgtctcttgcagacagcttatagtgcagttgtgctccttggcaggctcagtgtttcctaatgataatggggatgcacagattaaacaccttatgctgatattatctgctgttgttctatggattgaacctcctgatgtaattgcagcatcgatccgaaatgggggaagtgaaagtgagttcatagatggttgccacgcccttctttcaatggcgtctttaactactggctcactttttgacaaccttctaaagtcagtaaggccttacggtacagttaatctgctttctgctttgacgtcagaagctgtcaagtccgttctgaataaccagagtgaagaggaaacatggggcatagattcccttgatattttgttagaaacatggaatgtgattctgggggacgtagatgccgacaaaagtccaatctcagttgatggagcacttgcagcttcaagtttgtttaagatcattgtggagtcacacttgaaggctgctgctgattctgcgttcgaggatactgatgatactgaatattttcatgtttctgtttcaaaacgtgatgagcagttagccttgtatgctctaatagcacgtgctgctgcagacactactattccatttcttgcacagttgttttcagaacgatttgcccggctaaatcagagaaatggtgaaagtgatcctactcaaacactggaagagctctattggctgttgttggttactagtcatgtcctaactgactcaggcgaaggagaaacactacttatccctgaagcattacaggctggattccctaatgtgattgaagcagcacagcatcctgttgttacactctcctggtctataataaatttttccaggcagtgtctagatccaggaattagggcaaaatacttcagtccacgactaatggaggctgtcatctggttcttggccagatgggttgcaacctacttagtgccacttgatgtgagtagaggaaaagtaagcagagaaattgatagtgagggtacaaatggatcccaacattccagaaaactgctaaacagttttgcttgggaaaataaccaaggagagcttgttcttgattttgttgttctcatttcaatgttagcacttactacatatcagggagaaactgagttgcagacactgacatgccagaagctacttgctacagttgttcgccggaaacacacatgcacttatcttgttcaactggattcatggcgtgatcttacaagagcttttgcaagtggacgctctttgctttcattgagtggacgtttacaaagatctctagcagaaacacttgcctgtgctgcttcctgcatcaaagatcctgaagcatctgcacagtacctgagggatctaatgggaccagtggcggggtgcctggtagaaaatgctagcagaagtgatctaaaatctgtggcacagcaagcagatgttgtttacatggtctgttgcctattggaacgactaagaggcgctgctagagctactcaaccccgcactcaaaaagttctatttgagatgggtcgtactgtgatgaacccacttttgactcttctggaggtctacaaaaatcattcctcagtcgtatacatgatactcaagtttgtggtggactttgttgatggtcaagctgtattcctggattctaaagaaacatcagctttggtgaacttttgcttgcgacttctccagatatactcctctcataacattgggaaggtaatgctctctctttcttcaagtctgcgtagtgagtcacaagcagaaaaatataaggatttgcgagctttgcttcgtcttctgacaaatatatgctcgaaggatttggttggctttctgtctgattgcgacggtgaaggttcacctgatattgcagaggttatctacgttggccttgatattgtgacccccttgatatctttggaccttctgaaataccctaaacttagtcgtgattattttgtgcttatgtcacacttgttggaagtgtacccggaaaaggttgctcacttaaatagagacgcttttacgaggattattggaagtcttgactttgggctccgtaatcaggatagcgatgttgttgagaggtgcctggcagcagtaaatgctcttgcttcataccatttcaaagagagattaggagggagaggaggactgaactcgcagctcatggaatctgaaggatcaaatggcaaactgcaggaaagcatatcaagtcacttcttgagacttctattgcaaatatttctttttgaagatttcagattggagttggcaggttatgctgcagatgctttgcttcctttattgttctgtgaacaggagttatatcagagattggtccatgagttgctcgagaaacagcagaatcctaccttgaaatcaaggctggcaactgcgttccataacctcacaagttcaaacaatctctcaagctcgctcgaccggccaaacaggcagagattcaggaaaaacctccttagcttcctggtggatgtctcaggcttcatgcagatcaagtag

SEQ ID NO: 982 - protein, 1165 aa, Sorghum bicolor
MQGFPGGAPDPQQLQATMLAIEQACSLIQLHMNPSEAEKVITSLHSSLMPYQACRFILETSQMPNARFQAAGAIGDAAVREWGILTDDNKRSLIIYCLNYVMEHASSPDGYVQSKVSAVAARLLKRGWVEFSDQEKAAIFFEVEQSIRGIHGPNRQFAAINFLETLVSEFSPSTASAMSLPKEFHEQCEYSLEVQFLKDFYCWAQAAVFNTADKILNSTVTIPDERACSAALRLMFQILSWNFKHTVEHESSDAKINSGLRIDTINLKKFERSLVKPGSMWREILISNGHPTWVLNFYTTLRQKYSYDTLWGDSPIAVSCRQLIVQLCSLAGSVFPNDNGDAQIKHLMLILSAVVLWIEPPDVIAASIRNGGSESEFIDGCHALLSMASLTTGSLFDNLLKSVRPYGTVNLLSALTSEAVKSVLNNQSEEETWGIDSLDILLETWNVILGDVDADKSPISVDGALAASSLFKIIVESHLKAAADSAFEDTDDTEYFHVSVSKRDEQLALYALIARAAADTTIPFLAQLFSERFARLNQRNGESDPTQTLEELYWLLLVTSHVLTDSGEGETLLIPEALQAGFPNVIEAAQHPVVTLSWSIINFSRQCLDPGIRAKYFSPRLMEAVIWFLARWVATYLVPLDVSRGKVSREIDSEGTNGSQHSRKLLNSFAWENNQGELVLDFVVLISMLALTTYQGETELQTLTCQKLLATVVRRKHTCTYLVQLDSWRDLTRAFASGRSLLSLSGRLQRSLAETLACAASCIKDPEASAQYLRDLMGPVAGCLVENASRSDLKSVAQQADVVYMVCCLLERLRGAARATQPRTQKVLFEMGRTVMNPLLTLLEVYKNHSSVVYMILKFVVDFVDGQAVFLDSKETSALVNFCLRLLQIYSSHNIGKVMLSLSSSLRSESQAEKYKDLRALLRLLTNICSKDLVGFLSDCDGEGSPDIAEVIYVGLDIVTPLISLDLLKYPKLSRDYFVLMSHLLEVYPEKVAHLNRDAFTRIIGSLDFGLRNQDSDVVERCLAAVNALASYHFKERLGGRGGLNSQLMESEGSNGKLQESISSHFLRLLLQIFLFEDFRLELAGYAADALLPLLFCEQELYQRLVHELLEKQQNPTLKSRLATAFHNLTSSNNLSSSLDRPNRQRFRKNLLSFLVDVSGFMQIK

SEQ ID NO: 983 - DNA, 2925 bp, Sorghum bicolor
atggtgagcggccacatcttccactgccggaagaactcgtggccggcggaggagtacgtcggccggaccgcgctgcagctgttggatttcgatggcggggcgccgccggagcaggcgtggcggaggcggctcaacagccacgctaacattctcaaggagttcagtgtcaccttcatggaggcaatgaggatgatgagccttggcctgagactctggtcgtatgttcgggaggaggcgtcacatggacggaaagctccgatcgatccattcacaaaagagcgctgtaaaccgtcagcttctcagggtgtgccacttggtgggatggggagcggtagcatttctagaggtttcaggggagagtttaagaattggcacatcatacctggtctgtgtgagagttcgccggtcatggagaaccagttctctatatttgtatctcgagatggggggaataagaaatactcatcagttttggctcctggacatcatgaaggtctgaagaaaaatagtgactctggaatttcttcatgggactggaatttgagtggtcaacactcgacctatcatgcattgttccctcgggcatggactgtttatgatggtgaaccagatccagaccttaaaatctcatgtcgtcaaatatcacctttcattcctcatgattacaaggatagcagccttccaacatctgtgtttgtgtatactctagtaaacactgggagagaccgtgcaaaagtaagcctgttaatgacatgggcgaattctattggaggtttttcacataattcaggaggccactacaatgagcccttcattgcggaagatggagtatcaggagtgcttctgcatcacaaaacagctaaggataatccaccagtcacttttgctgttgctgcctgcgaaactcagaatgtgaatgtgacagtcttgccagtgtttggcctttctggagaaaaccatgtttctgcaaaggaaatgtggaacaccatgcaacagaatggtcacttcgatcgggaaaatttcagtgctggttctagtatgccttcttctccaggacagaaactctgtgcagccgtctcagcctcaacttgggtagagccacatggtagatgtactgttgtgtttgctctggcttggtcctcacctaaagtaaagtttcaaaagggatgcacatataacaggaggtacacccaattctatggaacttctgagaaatcggctgttaatctggtacatgatgccttaacaaaatataaactttgggaagaagaaatcgagaagtggcaaaaccccatactcaaggatgaaagacttccagaatggtataagttcactctttttaatgagctttactttctggtagctggggggaccgtttggacagatggtcaacccccagcaatcgatgagaaaaacagtcctggttctattcagcagaagtcctcaaagaggggcactaaagacactaaacagggatctgttaaagataaccatgtcaacctgacagtggagcaagtacctcatggtggtcaaatgactaatagtgatgatcacagtgtatcaaagttcgcagcagttcatgggtcacaaatgcaagaacaagtcaatggactcaagtcagaagagccaattccttacttgatctcaaaggatggccctgaacatgttggcaagtttttgtatctagaaggagtggaatacatcatgtggaacacatatgatgtgcatttctatgcatcatttgctctccttgatttgttcccaaaaatagagttgagtatccaacgtgattttgccaatgctgtgctgtatgaagatcgacgcaaagtaaaatttttggctgatggcacatcaggaatccgcaaggttaaaggtgctgtgcctcatgaccttggaacgcatgatccgtggcatgaaatgaatgcatataacatacacgatacaagcaaatggaaagatttgaaccccaaatttgtgctccagatatacagagacttcgctgctacaggtgatatgcaattcggtcgagatgtttggcctgcagtctgtgctgctatggactatatggatcaatttgaccgtgatggtgatggtctcattgagaatgatggatttcctgatcaaacctatgatgcttggactgttcacggaatcagtgcttactgtggttgcctatggcttgctgcacttcaagctgcagctacaatggctcatcgtcttggggatcggcactttgctgaaaagtacaagctcaagttcataaaagccaaagcagtatatgaggcaaagttatggaatgggtcatatttcaattacgacagcggcacaagtagcaacagtagatccattcaagctgatcagctggcaggacagtggtatactgcctcgtcaggcttgcccccgctttttgacgagcacaagataagaactgctctgcagaaaatatttgaattcaatgtgatgaaggttaaaggaggacggatgggagctgtaaatggtatgactccaaagggaaaggtggacgagacatgcatgcaatctcgtgaaatctggactggtgttacatatgctgttgctgcaaatatgctgctccatggaatggagcatcaaggctttacaaccgcagaaggaatttttattgccggatggtcagaagaaggatatgggtattggttccaaacaccagaaggatggaccacagatgggcattatagatccctcgtatacatgcggcctcttgccatttgggcaatccaatatgcagtttctcctccaaaggctattcttgaggccccaaaagttaacctgatggaccgaatacatatatctcctcacatggcccgagcaattagcgagataagcattagaaagatagcacctgacaacagatgtttccctagctctgcctttcattgtgaatgctga

SEQ ID NO: 984 - protein, 974 aa, Sorghum bicolor
MVSGHIFHCRKNSWPAEEYVGRTALQLLDFDGGAPPEQAWRRRLNSHANILKEFSVTFMEAMRMMSLGLRLWSYVREEASHGRKAPIDPFTKERCKPSASQGVPLGGMGSGSISRGFRGEFKNWHIIPGLCESSPVMENQFSIFVSRDGGNKKYSSVLAPGHHEGLKKNSDSGISSWDWNLSGQHSTYHALFPRAWTVYDGEPDPDLKISCRQISPFIPHDYKDSSLPTSVFVYTLVNTGRDRAKVSLLMTWANSIGGFSHNSGGHYNEPFIAEDGVSGVLLHHKTAKDNPPVTFAVAACETQNVNVTVLPVFGLSGENHVSAKEMWNTMQQNGHFDRENFSAGSSMPSSPGQKLCAAVSASTWVEPHGRCTVVFALAWSSPKVKFQKGCTYNRRYTQFYGTSEKSAVNLVHDALTKYKLWEEEIEKWQNPILKDERLPEWYKFTLFNELYFLVAGGTVWTDGQPPAIDEKNSPGSIQQKSSKRGTKDTKQGSVKDNHVNLTVEQVPHGGQMTNSDDHSVSKFAAVHGSQMQEQVNGLKSEEPIPYLISKDGPEHVGKFLYLEGVEYIMWNTYDVHFYASFALLDLFPKIELSIQRDFANAVLYEDRRKVKFLADGTSGIRKVKGAVPHDLGTHDPWHEMNAYNIHDTSKWKDLNPKFVLQIYRDFAATGDMQFGRDVWPAVCAAMDYMDQFDRDGDGLIENDGFPDQTYDAWTVHGISAYCGCLWLAALQAAATMAHRLGDRHFAEKYKLKFIKAKAVYEAKLWNGSYFNYDSGTSSNSRSIQADQLAGQWYTASSGLPPLFDEHKIRTALQKIFEFNVMKVKGGRMGAVNGMTPKGKVDETCMQSREIWTGVTYAVAANMLLHGMEHQGFTTAEGIFIAGWSEEGYGYWFQTPEGWTTDGHYRSLVYMRPLAIWAIQYAVSPPKAILEAPKVNLMDRIHISPHMARAISEISIRKIAPDNRCFPSSAFHCEC

SEQ ID NO: 985 - DNA, 939 bp, Sorghum bicolor
atggcagaggatgggtacccggtgaagctgcacatctacgatcttagccaagggatggcgcggcagctctcggcgacgatcctcggcaaggctatcgaggctatttggcacaccggtgttgtcgtctacggccgcgagtactactttggcggcggcatccagcaaggccagcccggccggacgccctacggcacgcccatccgtgtggaggacctgggcgtcacccacgtccccagggaggtgttcgaggagttcctccgggagatcggcccgcgctacaccccggccacctacaagctcctcagccacaactgcaacaacttcagcaacgaggtcgcgcagttcctcgctggcgccgccatccccagctacatcctcgagctgccgaaccaagtgatgaacagcccggtcggcgctttgatattgccgatgatccaggggctggaggcgagcttgggagctggggctgtgccgcagccaccacaattcaggccggctcctgcagccccggttggcgccgccaccgtgactcggccgctgacgacgaaagacgacgtggtgccaagatcgacgactgctgatgatgataaaccggaggctgccaagacagcagcgggcaataatggcagtgccaatgacagcacggccgtagttccaccggcggtgcagcccgcagcagcaccggcgacatccgccggtgaggtgagcagcgcggcgcctactacggtttcaaccaagctggcggcgcctcctcctccagacccccttgcggcggcgaagagccgggtgcaggaggagataaagcgcgagttcgcggccatcatggcggccggcacggcgcgtgccggcgaggccgccgcgctggccacgcgcagggtcatggagcggcacggcctgcagcgcgccgctgccgctgccgctgccgcccaccgagggtag

SEQ ID NO: 986 - protein, 312 aa, Sorghum bicolor
MAEDGYPVKLHIYDLSQGMARQLSATILGKAIEAIWHTGVVVYGREYYFGGGIQQGQPGRTPYGTPIRVEDLGVTHVPREVFEEFLREIGPRYTPATYKLLSHNCNNFSNEVAQFLAGAAIPSYILELPNQVMNSPVGALILPMIQGLEASLGAGAVPQPPQFRPAPAAPVGAATVTRPLTTKDDVVPRSTTADDDKPEAAKTAAGNNGSANDSTAVVPPAVQPAAAPATSAGEVSSAAPTTVSTKLAAPPPPDPLAAAKSRVQEEIKREFAAIMAAGTARAGEAAALATRRVMERHGLQRAAAAAAAAHRG

SEQ ID NO: 987 - DNA, 501 bp, Sorghum bicolor
atggaggcgagcggcgagagggctgcggtggtgcggcgcctgatggaggtgaaggaggagtccgggaagaccttctcggaaatcgccgccgagacgggtctcaccaacgtctacgtggcgcagctgctgcggcgccaggcgcatctcaaggccgacacggtgcccgcgctgagggcggccctgcccacgctcaccgacgaactcgtccaactcatgatgcagccgcccttccggtcctacaaccccgacatcgtccaggagcccgccatttacagattgaatgaagctgttatgcattttggagagagcatcaaggaaatcatcaatgaggagtttggtgatggaatcatgtcagccatagatttctactgttcagttgacaaggttcaaggggctgatggaaaagatcgtgtagtggtcacatttgatggaaagtatctgccatacactgaacagaaatctgaacatatgatgtcaaggccaacccgcaagacatcttga

SEQ ID NO: 988 - protein, 166 aa, Sorghum bicolor
MEASGERAAVVRRLMEVKEESGKTFSEIAAETGLTNVYVAQLLRRQAHLKADTVPALRAALPTLTDELVQLMMQPPFRSYNPDIVQEPAIYRLNEAVMHFGESIKEIINEEFGDGIMSAIDFYCSVDKVQGADGKDRVVVTFDGKYLPYTEQKSEHMMSRPTRKTS

SEQ ID NO: 989 - DNA, 495 bp, Sorghum bicolor
atgccggctggccacgggctgcgctcgcggacgcgcgacctcttcgcgcgccccttccgcaagaagggctacatcccgctcaccacctacctccgcacctacaagattggcgactacgtcgacgtcaaggtgaacggcgccgtccacaaggggatgccgcacaagttctaccacggccgcaccggtcgcgtctggaacgtcaccaagcgcgccatcggcgtcgagatcaacaagcaggttaatggtcgcatcatcaggaagcgtatccatgtccgtgtggagcacgtgcagccgtcccgctgcacagaagagttccgcctgaggaaggcaaagaatgatcagctgaaggcggatgccaaggcacgtggtgaggtcatcagcaccaagaggcagccattgggtccgaagcctggattcatggttgagggcgccaccatcgagaccgtcactcccatcccgtacgatgtggtcaatgatctcaagggaggatactag

SEQ ID NO: 990 - protein, 164 aa, Sorghum bicolor
MPAGHGLRSRTRDLFARPFRKKGYIPLTTYLRTYKIGDYVDVKVNGAVHKGMPHKFYHGRTGRVWNVTKRAIGVEINKQVNGRIIRKRIHVRVEHVQPSRCTEEFRLRKAKNDQLKADAKARGEVISTKRQPLGPKPGFMVEGATIETVTPIPYDVVNDLKGGY

SEQ ID NO: 991 - DNA, 1593 bp, Sorghum bicolor
atggacctcccagagagctctgtcccctgcgcagacgagggcccggcacctcaccgtcttggccccgtcgaccgcgaggagctggtgcgcgccatgacacagtcgctctactcgctcgggtaccggcgggcggcggccgcgctcgaggtggagtccggcgtgccactgtacccgccggagcacgaccgcctgctgctcgaagtgatggccggccggtgggacgcgtccgcggagaccgtccgctcggtcgccggcgtcggcgacgcggaccgcgcggtcgcggagttcctagtatggaggggctactacctggagctcctggggatgcacggtgacgctggcctgcgccgggcgagggaggtgctacggcgccggattgcgccgctcagcgtcgacaggaggtgtgtacactggctggcgtgcgccatggtctccggtgagggggcggttgcgccggaggccgtggttgggtggaggattgcggtgttcttggatttgattgaggtgttgccaccatggttccatgtgcctagtgggcggttggagcatttggtggagagtgcggttaccaagcaggtagaatcttgtatatatcacaatttgccggatgagatcactctgtttgaagatcataggtgccatgaagagcatatcccctcccagtgtgcacagatattatgtggtcatagtaatgaagtttggtttgtaaggttctcaaataatggaaactacctggcatcatcttcaagtgactgcaccgctataatttggaaggtggaaaaggatgatacattgaccaagaagcactgcctcgagggtcaccaaaaaccaatttcctttgttgcttggagcccaaatgacagaatgctgctcacttgtggtactggtgaatctttaaaactgtggaatgttgatactggtgaatgtaaccttaaattcagaggctcagtagactacatcatcagttcatgtgcatggtttcctaattcggagaaaatagtatgtgccagctccgagcctgcaagttctccaaataggatcttcacttgtgatctagaaggtcaagagctggaagtatgggccggagatagaataccaaaagtcagtgatcttgctgtgacacctgatggccgacaccttatctttgtatcttgctatgatatctggattagagaacttccaaaggggcgggaatggagatttcgtgagaagcagacgatttcatctgtttctctctcaggtgatggacaatcactcgttgtgaaccttaccagtcaggagattcatttgtggaaaattaatgaaagttgtactgtgcctgaaaagttcaaggggcacaagcaagacaagtttgtgattaggtcttgctttggtggttcaaactctttgttcattgctagtggcagtgaggattcacaggtctacatttggaaaaggcacgtggagatgccaataaaggttttgcatggccacacgatgattgtgaactgtgtcagctggaatcctgcaaggccccatatgctggcttctgctagtgatgaccgcacggttcgaatatgggtagcgcgcaaaatgcatagtaaatattgttga

SEQ ID NO: 992 - protein, 530 aa, Sorghum bicolor
MDLPESSVPCADEGPAPHRLGPVDREELVRAMTQSLYSLGYRRAAAALEVESGVPLYPPEHDRLLLEVMAGRWDASAETVRSVAGVGDADRAVAEFLVWRGYYLELLGMHGDAGLRRAREVLRRRIAPLSVDRRCVHWLACAMVSGEGAVAPEAVVGWRIAVFLDLIEVLPPWFHVPSGRLEHLVESAVTKQVESCIYHNLPDEITLFEDHRCHEEHIPSQCAQILCGHSNEVWFVRFSNNGNYLASSSSDCTAIIWKVEKDDTLTKKHCLEGHQKPISFVAWSPNDRMLLTCGTGESLKLWNVDTGECNLKFRGSVDYIISSCAWFPNSEKIVCASSEPASSPNRIFTCDLEGQELEVWAGDRIPKVSDLAVTPDGRHLIFVSCYDIWIRELPKGREWRFREKQTISSVSLSGDGQSLVVNLTSQEIHLWKINESCTVPEKFKGHKQDKFVIRSCFGGSNSLFIASGSEDSQVYIWKRHVEMPIKVLHGHTMIVNCVSWNPARPHMLASASDDRTVRIWVARKMHSKYC

SEQ ID NO: 993 - DNA, 1089 bp, Sorghum bicolor
atgtccactgcgaccgcggccctcgccgccgcgcgatcccccgctgtcgcgcttctcagcctgcgccgccgcgcccacgcggctgctcccattcgcttccccggtctccgcgtcggctccggttgccgtcacgtagctatggcttccgcggcgcatgcccgcgcccccaccgacccgcttcccaagggtgctgattcatttttccgggcagtgatctcgaacatggaaaaggtttatttgagcaggaatcctacagccaaaaccattctagagcttgtacgatcttatgatggtgatcacatttgttatgaccaccttgctttccggacatttggggtcaatggttatggtataaactcactttctgaatttttcactgattttggttatgtacctcgcgaagaactcagatttccagctaaaaagcttagagcactatggttttccccgcccaccaatggtggctactctggaactggtacatatggacctttgccaaggatattcatttcagaactgcttgtggatgagttgactactcaaagccaggaaattatacataagtacattaaaacttctggcaatggaaataatcatgctgctcttgcaagtacttctggggagctgacatgggaaaagcccatctattcagatttccagattttgtctagtgaaagtgaatatgctgcatggactcttgttaatggctatgcactaaatcatgccacaattgccacccatcgcctagaatcagatatcagaaatattaataagttcaacaaatttgtggaggacaatggcttcaagttaaattcagaaggagggattctgaaagtgagtcctgatggtctccttcagcaaagttcaacagtagctgattcatcattgtttacatttgctgatggaataactgaatctattcctcgatcttacattgaatttgctgaacgtctcctgctaccacagttcaaagatttgcaagatgaagaggtgaaagaataccacaggcgtgatggttttgaggtgggcaatgcggacaagatattcgaaagtacatcgagggatcagctgacaaggacatctgcataa

SEQ ID NO: 994 - protein, 362 aa, Sorghum bicolor
MSTATAALAAARSPAVALLSLRRRAHAAAPIRFPGLRVGSGCRHVAMASAAHARAPTDPLPKGADSFFRAVISNMEKVYLSRNPTAKTILELVRSYDGDHICYDHLAFRTFGVNGYGINSLSEFFTDFGYVPREELRFPAKKLRALWFSPPTNGGYSGTGTYGPLPRIFISELLVDELTTQSQEIIHKYIKTSGNGNNHAALASTSGELTWEKPIYSDFQILSSESEYAAWTLVNGYALNHATIATHRLESDIRNINKFNKFVEDNGFKLNSEGGILKVSPDGLLQQSSTVADSSLFTFADGITESIPRSYIEFAERLLLPQFKDLQDEEVKEYHRRDGFEVGNADKIFESTSRDQLTRTSA

SEQ ID NO: 995 - DNA, 1449 bp, Sorghum bicolor; identical to SEQ ID NO: 569

SEQ ID NO: 996 - protein, 482 aa, Sorghum bicolor; identical to SEQ ID NO: 570

SEQ ID NO: 997 - DNA, 1524 bp, Sorghum bicolor
atggaggagaaggtgctcctcgccgtggccgtggccgtgctactcgtcgtcctctccaagctcaagtctttgctcgtcaccagggcgaagcttaacctgcccccggggccatggacgctgccgttgatagggagcgtccaccacctggtcaccagcccgtcgatctaccgggcaatgcgtgacctcgcgcaggagcacgggccgctcatgatgctccggctgggcgaggtgcccacgctggtggtgtcgtcgccggaggccgcgcaggcgatcaccaaggcgcacgacatcacgttcgccgaccgccacttgaacgccaccatcggcgtgctcacctttaacggcaccgacctggtgttcgggacctacggcgagcggtggcgccagctccgcaagatcaccgtgctggagctgctcagcgtcgcgcgcgtgcagtcgttccagcgcatccgcgaggaggaggtggcgcgcttcatgcggagcctcgccgcgtccgccggcgccggcggcgccgccgtcaacctgtccaagatgatatctcgattcatcaacgacaccttcgtgagggagtccgtcggcagccggtgcaagtaccaggacgactacctggatgccttcgacaccgcggtccggcagacgtcggtgctgaccgtggccgacctcttcccgtcgtcgaggctcatgcagattctcggcacggcgccacgcaacgcgctcaagtcccggaaccggatcacgcgcatcctggagcagatcatccacgagcaggtcgaggccatggaccgtggcgagaagacggcgcacgagagcttaatcggtgtcctgctcaggctgcagaaagaggccagcttgcccatcgagctcaccaacgacaccatcgtggcgctcatgtttgacttgttcggcgccggtagcgatacctcgtcgacgacactgaactggtgcatgacagagctaatccggtacccggcagcgatggccagagcgcaggccgaggtccgggaggccttcaaggggaagaccagaatcaccgaggatgacctcgccggggcagagcttagctacctgaagcttgtgatcaaggaagctctcaggatgcactgcccactgccgctcctgctcccgcggcagtgccgtgagacgtgccaggtcatgggctacgacatccctaagggcacatccgtgttcatcaacgtctgggcgatttgcagggacgccaagtactgggaagatgcagaggaattcaggccagagcggttcgagaacaccaaccttgactacaaggggacaaactacgagtttcttccgttcggatccggccgccgtatgtgcccgggagcaaaccttggactggctaacattgaactcgctctggcgagccttctgtatcactatgattggaagttgcctgatggagtgaagccagaggatgttcaggtttgtgagggtccaggattgatagcaaagaagaaaacaggcctgattttgcacccggttacctgtatcgctccagccgatgcgtaa

SEQ ID NO: 998 - protein, 507 aa, Sorghum bicolor
MEEKVLLAVAVAVLLVVLSKLKSLLVTRAKLNLPPGPWTLPLIGSVHHLVTSPSIYRAMRDLAQEHGPLMMLRLGEVPTLVVSSPEAAQAITKAHDITFADRHLNATIGVLTFNGTDLVFGTYGERWRQLRKITVLELLSVARVQSFQRIREEEVARFMRSLAASAGAGGAAVNLSKMISRFINDTFVRESVGSRCKYQDDYLDAFDTAVRQTSVLTVADLFPSSRLMQILGTAPRNALKSRNRITRILEQIIHEQVEAMDRGEKTAHESLIGVLLRLQKEASLPIELTNDTIVALMFDLFGAGSDTSSTTLNWCMTELIRYPAAMARAQAEVREAFKGKTRITEDDLAGAELSYLKLVIKEALRMHCPLPLLLPRQCRETCQVMGYDIPKGTSVFINVWAICRDAKYWEDAEEFRPERFENTNLDYKGTNYEFLPFGSGRRMCPGANLGLANIELALASLLYHYDWKLPDGVKPEDVQVCEGPGLIAKKKTGLILHPVTCIAPADA

SEQ ID NO: 999 - DNA, 1251 bp, Sorghum bicolor
atgcactgcttccggttcgcgagctgggagcgggaggccgacgagcggcgcggggcggcggcggcgacgacgacgacgacgggccgttccctgtccgcgcggtccaacagcagcacgacgtcgacggaccgcgacgtgcggcggtcggcgtccgagtgctccctgaacgcgtcggagctcagcagcgcgggctccctgggccggtgccggcagctgtcgctgtcgtcgcagcggccggccaacgcgctgcgcgtcttcaacttccaggagctcaagtcggccacccgcgggttcagccgcgcgctcatgctcggcgagggcggcttcggctgcgtctaccggggcaccatccggagcgcgctggagccgcgccggagcctggacgtcgccatcaagcagctcggccgcaagggcctgcagggccacaaggagtggatgacggaggtgaacgtgctcggggtggtggaccacgccaacctcgtcaagctcatcggctactgcgccgaggacgacgagcgggggatgcagctgctgctcgtctacgagttcatgcccaacggcagcctcgcggaccatctctcctccaggtcgccgcggccggcgtcgtggtcgatgaggctcagggtggcgcttgacacagctcgaggcttgaagtatctccatgaagaatccgaagtcaagataatatttcgtgacctgaagccttcgaacattcttctcgacgacaactggaacgcaaaactgtcagattttggcttggcaagattaggacctcaagaaggaagccatgtctccacagcggtggtggggacaattggatatgcagctcctgaatacatccacacgggacgcctcagcaccaagaatgacatatggagtttcggcgtcgtgctccttgagcttcttacaggccggcgacctctggaccggaacaggccaagaggcgagcaaaatctcgtggactggatgaagccctactcttccggcgccaagaagctcgagactgtaattgatccaaggcttcaagggaactacagcataaaatcagctgcccagcttgcgtcagtggcaaataagtgcctggtgcgccatgccaggtaccgtcccaagatgagtgaggtactggagatggtgcagaagatcgtcgagagcagtgaaattggaacaccggagcatcccctgatcagcaattcaaaggaattaagcatgctcctggactcgtggcagattgcaaaattgctccatacatag

SEQ ID NO: 1000 - protein, 416 aa, Sorghum bicolor
MHCFRFASWEREADERRGAAAATTTTTGRSLSARSNSSTTSTDRDVRRSASECSLNASELSSAGSLGRCRQLSLSSQRPANALRVFNFQELKSATRGFSRALMLGEGGFGCVYRGTIRSALEPRRSLDVAIKQLGRKGLQGHKEWMTEVNVLGVVDHANLVKLIGYCAEDDERGMQLLLVYEFMPNGSLADHLSSRSPRPASWSMRLRVALDTARGLKYLHEESEVKIIFRDLKPSNILLDDNWNAKLSDFGLARLGPQEGSHVSTAVVGTIGYAAPEYIHTGRLSTKNDIWSFGVVLLELLTGRRPLDRNRPRGEQNLVDWMKPYSSGAKKLETVIDPRLQGNYSIKSAAQLASVANKCLVRHARYRPKMSEVLEMVQKIVESSEIGTPEHPLISNSKELSMLLDSWQIAKLLHT

SEQ ID NO: 1001 - DNA, 771 bp, Sorghum bicolor
atggagacacccaaacctctggccgtcgtgttcctcgcggtggtcgcgctggctgccgcgccgccggccgtcgacgcctggtccaggggcaccgccacgttctacggcggcggcgacgcctcgggcacaatgggcggggcgtgcgggtacggcaacctgtacgcgacgggctacgggcagtacacggcggccctgagccaggtcctgtacaacgacggcgcgtcgtgcgggcagtgctaccagatctcgtgcgacccgcagacggacgcgcggtggtgccggcagggcgccggccccgtcacggtctcggccaccaacctgtgcccgcccaactacgcctactccggcagcaacggcggctggtgcaacccgccgcgggcgcacttcgacatgtcccagccggcgtggctcaagatcggcatctaccagggcggcatcatcccggtgctgtaccagcgcgtgccctgcgtgaagcagggcggcgtgcgcttcaccatcaccgggttcaaccactacgagctggtgctcatctccaacgtcgccggcagcggctcggtggccagcgcctgggtccagggcgccaacaccaaccgggtgcccatgagcaggaactggggcgccaactggcagtcgctggccgggatcgccggccaggcgctcaccttcggcgtcacgtccacaggcggacagagcatcgtcttcccgtacgtcgtgccgcagaactgggtgttcggcatgtcattcaccagcaacttgcagttctcctactaa

SEQ ID NO: 1002 - protein, 256 aa, Sorghum bicolor
METPKPLAVVFLAVVALAAAPPAVDAWSRGTATFYGGGDASGTMGGACGYGNLYATGYGQYTAALSQVLYNDGASCGQCYQISCDPQTDARWCRQGAGPVTVSATNLCPPNYAYSGSNGGWCNPPRAHFDMSQPAWLKIGIYQGGIIPVLYQRVPCVKQGGVRFTITGFNHYELVLISNVAGSGSVASAWVQGANTNRVPMSRNWGANWQSLAGIAGQALTFGVTSTGGQSIVFPYVVPQNWVFGMSFTSNLQFSY

SEQ ID NO: 1003 - DNA, 756 bp, Sorghum bicolor
atgaaaatcaacaagtccctagttttgtgcctatccttctcggcgtgcctagccctcgccgccgcaggctggtctcccggcaccgccacgttctacggcggagccgacggctctggcaccatgggtggtgcgtgcgggtacgacaacctgtacaacgccgggtacggcgtgaacaatgcggcgctgagctcgacgctgttcaacgacggcgcgtcgtgcgggcagtgctacctcatcacctgcgacgcgtcgcgtccgggcgggcagtggtgcaagccgggcaactccatcacggtgtccgccaccaacctgtgcccggccaactacgcgctccccaacggcgggtggtgcggcccggggcgcccccacttcgacatgtcgcagccggcgtgggagcgcatcggcatctacagcgccggcgtcatcccggtcctgtaccagcaggtcaagtgctcgcgcaccggcggcgtgcgcttcggcatcgccggctcccagtatttcctgctcgtcaacatccagaacctcggaggcagtggctccgtgggcgccgcctgggtgaagggcgacaggacggggtggatccagatgtccaggaactggggcgccaactggcaggcgctcgccgggctcgtcggccaggggctcagcttcgccgttaccactaccggcgggcagtacattcagttctggaacgtggtgcctaggtggtggcagttcggacagacctacaccacaacccagaatttctactactaa

SEQ ID NO: 1004 - protein, 251 aa, Sorghum bicolor
MKINKSLVLCLSFSACLALAAAGWSPGTATFYGGADGSGTMGGACGYDNLYNAGYGVNNAALSSTLFNDGASCGQCYLITCDASRPGGQWCKPGNSITVSATNLCPANYALPNGGWCGPGRPHFDMSQPAWERIGIYSAGVIPVLYQQVKCSRTGGVRFGIAGSQYFLLVNIQNLGGSGSVGAAWVKGDRTGWIQMSRNWGANWQALAGLVGQGLSFAVTTTGGQYIQFWNVVPRWWQFGQTYTTTQNFYY

SEQ ID NO: 1005 - DNA, 6759 bp, Sorghum bicolor
atggcgactgtggttcgtcatgattcaaggcagtactcttggttgtgggttagccatatcagccccaagaactcaaaatggctccaggaaaatatcaccgacatggacacaaaggttaaagcaatgatcaaacttatcaatgaagatgctgattcttttgcaaggagagcagagatgtactacaagaaacgtccagagctaatgaaattggtggaggaattctatcgagcataccgtgcgctggcagaaagatacgatcaggccactggggcacttcgccaggctcacagaacaatttctgaagcatttccaaatcagatgccgtcaatgtcagatgagtcaccctctgctttcagccaagagatggagcctcatactccagatatgtctactttcacacgtgcggcatttgattccgatgatcttcagaaggatggagttggtttgtcaccacaacatttaacctccaagaggaatggtacacaccctgaggaaaccagcgcattttcaagtcgaaaaggtctaaagctgttcaatgatttgtcatcgagtggtgaaaatgctcctcgtgctggttttgatggaaaggtacggaaaggcctaacttttgaaagcccagaagttaaagggaaagatgatatcagcaacgagatggcaaatttgcaacaagaagttgcaagactattagccgagagccagactctgaaacagcagatgttgtcagaatccgagcgggcaaacaaagctgaaaatgagatgcaaatcctcaaggcaacagtattgcaattaaatgctgataaagacacatcacttatgcaatataatcattcctctgagcgaatatctacattggagtccgagctctcgaaggcacaggctgaccttgagaagttaactgatgaaatggctgcagatgtccagaagttaattaacgctgaaacactcaatattgctttacagtctgaggctgagggtttggatcagaagatgaagatgcagcaacaagaactagaagaaaagcttaaggaattggagagtttccgttcaagcttccaggaggagcatgaaaagcgcatgcaagctgaaagtgctctactttcccaggggaaggaacttgctcaatctcatgaagaagtacagaggttggctatagaaataaagatggcaaatgaaaagttgaatgagctcaagcagaccaaggaggtccttgaggacactgtttgtgagctgaagaaggatgttgagcgccttacagaacaaaacctgtcctctgaggtgcttatacagaaacttggtgacgagataaatacactcaaggattcaaaaaatgaacttcaaagtgaaatacaaagccttaagagcaccatttcacagctaaacactgagaagaatgcagctgagcttcaacaccagcagtctgtggagcaagtttcggtactcgaatctcagctgtcaaagctacagtcagagctagatgagactgagcagaaagtacagttgctgacacaagatcttgaaaagaagaaagaagaagccgacaatgtccatttgaagctacaagatgaatgccataggcgtatgcaaattgaagcaactcttctcatgacagagggtctgcattcccagttgcaagaagaaatgaaaacactgacacaagattttgatggatcaacaaagaagcttagtgagttggaaaataataagttagacctggagagcacactgaaagaactgaataacaccattttaggtttgaactcggagaaggatgcagcactccttcagcaacaacagtctttagagaaagtatctgatttggagttagaactctcaaagatgcagttggaaatggagaagtctgaacaaaaaattctcttattggagcaagaaattgcacggaagaatgaaaatgtcgacagcctggagataactttgaaagatgaatgtgagaagaggctacaagcccaaacatcgcttgtgtcattggataaaatgtattcccagtcacaggaagacgttagtaggttgcagatagagattgagaagcagaatgtcaagttgaatgagttggagaacttgtcatccgagcttaacaacaccatcctactgataaacactgagaaagatgctaccctccatgagaaccagcagtcctcagcgagaatatcggatcttgaatctgaactcatggccttgaaaactgaactggagaatgttgaagggaaagttcagatgctagagcaagaactcatatctaagaaacaagaagcggattacctccaaattagcctacaagatgaaactcaaaaacgagttgaaggtgaatcatctcttcttatgatgacaaatcttcactccgagtcacaaaatgaagtgagagggttggcactggaactcgagaagctgaatggtaagttaagacaggtggagaacagtaaggttgatcttgagaacattgtaaccaagcattcagaggaaatccatatccttcgtgaacagaatctttctactgagcttatgataaaggaccttcatcttgaattggacgcattgaaggatttgaatgtgaaacttcaggcagaaatggggttacacataggtgaaaaagaagcacttcagagagaatttacttctcaaagggaagagaaggaaaatctagaggggatacatcacactctggttgatgagatggataccctaaaaactactgcaacaatgaaccagaagttgattgaggaattgcaaattacaaactcaaaactgaaggaggtgtgtgcaaggagtgaggttgagaaggcacttctctcggaaaaacttcaagaggtggagaagctatctgaagaatattcactcttggagaactcactttcagatgcaaatgctgaaatggatgcattgcgggagaagataaaagccctcgaggcttcagaaagctctctcaaggatataatttcctgtcatgtttctgagaaggctgttcttgtatcagagatagagatccttggtaaaagattatctgaggcttcagagaagaattctatcttggatatctcattatctgatatgaaaatggacctagaagatttgagaacaaagctgaaatattctgaagaatcctgtcaggctctccttgcaaataactcagctctttctggtgaaatggatgcattgagggagaagataaaagcacttgaggcttcagaaagctctctcaaggatataatttctggtcatgtttctgagaaggctgttcttgtatcagagatagagatccttggtaaaagattgtctgatgcttcagagaagaattctatcttggatatctcattatctgatatgaaaatggacctagaagatttgagaacaaagctgaaagattctgaagaatcctgtcaagctctccttgcaaataactcagctctttctggtgaagtggatgcattgagggagaatataaaagcactacaggcctcagaaagctctctgaaggatgcaatttcttgtcatgtttctgaaaaggctgttcttgcatcagagctagagatccttggtaaaagtttatctgaggcttcagagaagaattctatcttggatgtctcattaagtgatatgaaaactgagctagatgaactgagaacaaagctgaaagattctgaaaaatcctgccaggctcacctaacaaataattcagctctttctgctgaaaagaaccacctgttctctaagctggagagcattacattggccatgaaagccctagaaggtatgcatgccaatctggaacagaagcactcctctgtatccagagagaaggattttgcacatgatcaagtaagggaactgcaggatcagttgagaattaagaacgaggaatttgaagtgtcagcaaagtcacatcaactgcaagcaaacagctatgagaaacaaatttcttctctgcaagagaaaaaccattatatggaggaggtgcttcaacaggaacagcagaaaaacataagtgcttctattagcacagttattttggagaactgtttggtcgatgagcaagacaagaaggtcactcttttcactgaatgccaaaagtatgctgcggaaaatcattcagccaatatgttagtttcagagttgatggaggaagctagatatcatggggaggagagaaaaacattgctaacacacaatggaaaactgagggaagggatttcaaagcaaatgaaggttctgaatatctgcaaagatctaggacctgctgatttagctgaggacgaagttctgttgcagactgtttcagatgaaaccattaacattctgagacttagggatgaaactgaagatgcgaataggctgatggacactgagctctcagttctctcagtagttttgttgcaagtagggatggagctcagagacctgcacttacagaagtgcgcccttgagaaagaagtggagagtggagaagcagagtctctttctttgcaaaacaaaaaccaacaaatgttggaacagaatgaacaactaaggaatggattgcaggaaagcagtgaaagggaggaggtgctgaaaactgaagtattcatcatacaagagaaactatcttgcttgagggagtcctaccagacctcacaagatgaaatttccaacctgactgaaaaaaatgagtccttgtctaaggaatatcagtccttgagtgggaagtacaattccttggaagatgagaatgatactgttcttgaagaatgcatgatgctcgagaacttgtgcctgttctttaggggacataataatgagattgtatctgcattggcttctcttaccgatgagatggctttgttgagtttggctaagggtgatcttgatcttaaagtcaatgaactgagcagaaggtcagtggtgcttgaatcagaaaatagccacttaaaggagtatctcatctacttggtagaaattctcagaactcgattagtcctttcagagtttgatttggacatcaatcaaagtgtctgccaggagttggttgttgaacttgagaattgcatgacacagttggtgcagaaggatgatgagctaatggaagcagaagagaaggttcaactcttgcaagaaaagaaccgggaactctgtggagttgttgggtctcttcaggttgcgattgaaggtgctaaagtggtgaaaggagaactggagaagaaaatcacaagactgattgaacagtgttctagcaaggatgacgaaattttacttcttcaccaagacaatgaggcattgcaatcagaggttgagcagcgtgagagggaatttgttgttctgatggatgatgcaattacctcttctgtgaattctgcggtttatgaagaaaaagcattcgagcttatgatgaatggtaaagctacagagaatagagcaatatccctaaaggagttgctaatgaaggagatctcttcccgagatgctcatgttgaggagttgcagaaaaagttggctggcattcaggaagaacatgcagaactaaaagctgagttgaacacacatctagctctcatagcatcattgtctgatcatgtcagtgtgctggaagaagatacccgttctctgtcaaaaccatgtagtacagaaggcaaagaggaaactgcatgggtacatcatgtgcaagagggcaacgacgggctggaatctcattgcttacccaaaggaactccaaagttgcaagggttgattgcaagaatagaagcacttcaagtggttgtattaaatgctaaagatcgtcaagatcaggagtcagccaagtctgcagctaaattggcagcagcaagtacagaaattcaagagcttaaagcaagaggcagctcacgcatggaggcaaaagaaatatattctgaccttgagaaacaagatgttgaggtctccaaagggaagcaagtccagatcatgaaggatattgagctggacaaaatatctacttgtccaccatatggtgctggagctgccctctatccccttggaactggtgcaaatgttgaacttgatgacgatatgcttcagctgtgggaggctgcagagaggagctgcaagaacgaaacggccaagtcctcgtcatctgagcacgacatacaagcggtcgaggatctgaagagtgaatacccttcgtctgagctagtaaggggaagggaccttggaatcaataagctagaagtgtcaaagggagctgtagagcctcatgaggcgtggagcaagaacgtacttgagaggctcacttctgatgctcagaggctgttgagcatccaagcgagcattgaggagttgaagcacaaaatggaggggccgtcaaagggcaaatccccaatgaattctgagtacagcagtgtgagcacgcagctgcatgagacagagggttttgtcttggaacagatcaatttcaacaacaaattgaccaggaaggctgagaactatcctgcgttgtcagataatatgaacaccgagcgagaagggtattccagcaggaggaagatctccgagcaggtgcagaaagggtcagaaaatgtggcaaggttggaactggaacttcagaagatacagtatgtcttgctcaagcttgaggaagagcacgagtacagaaggctcaaggtctctgataagcgcacccgtgtgcttttgagagactatctgtatggaaggaaggaccgtggtggcgggcagaagaaaaagaagaagagggtcccgttctgtggttgtgttcgtccgaaatcaagaacagagccgtaa

SEQ ID NO: 1006 - protein, 2252 aa, Sorghum bicolor
MATVVRHDSRQYSWLWVSHISPKNSKWLQENITDMDTKVKAMIKLINEDADSFARRAEMYYKKRPELMKLVEEFYRAYRALAERYDQATGALRQAHRTISEAFPNQMPSMSDESPSAFSQEMEPHTPDMSTFTRAAFDSDDLQKDGVGLSPQHLTSKRNGTHPEETSAFSSRKGLKLFNDLSSSGENAPRAGFDGKVRKGLTFESPEVKGKDDISNEMANLQQEVARLLAESQTLKQQMLSESERANKAENEMQILKATVLQLNADKDTSLMQYNHSSERISTLESELSKAQADLEKLTDEMAADVQKLINAETLNIALQSEAEGLDQKMKMQQQELEEKLKELESFRSSFQEEHEKRMQAESALLSQGKELAQSHEEVQRLAIEIKMANEKLNELKQTKEVLEDTVCELKKDVERLTEQNLSSEVLIQKLGDEINTLKDSKNELQSEIQSLKSTISQLNTEKNAAELQHQQSVEQVSVLESQLSKLQSELDETEQKVQLLTQDLEKKKEEADNVHLKLQDECHRRMQIEATLLMTEGLHSQLQEEMKTLTQDFDGSTKKLSELENNKLDLESTLKELNNTILGLNSEKDAALLQQQQSLEKVSDLELELSKMQLEMEKSEQKILLLEQEIARKNENVDSLEITLKDECEKRLQAQTSLVSLDKMYSQSQEDVSRLQIEIEKQNVKLNELENLSSELNNTILLINTEKDATLHENQQSSARISDLESELMALKTELENVEGKVQMLEQELISKKQEADYLQISLQDETQKRVEGESSLLMMTNLHSESQNEVRGLALELEKLNGKLRQVENSKVDLENIVTKHSEEIHILREQNLSTELMIKDLHLELDALKDLNVKLQAEMGLHIGEKEALQREFTSQREEKENLEGIHHTLVDEMDTLKTTATMNQKLIEELQITNSKLKEVCARSEVEKALLSEKLQEVEKLSEEYSLLENSLSDANAEMDALREKIKALEASESSLKDIISCHVSEKAVLVSEIEILGKRLSEASEKNSILDISLSDMKMDLEDLRTKLKYSEESCQALLANNSALSGEMDALREKIKALEASESSLKDIISGHVSEKAVLVSEIEILGKRLSDASEKNSILDISLSDMKMDLEDLRTKLKDSEESCQALLANNSALSGEVDALRENIKALQASESSLKDAISCHVSEKAVLASELEILGKSLSEASEKNSILDVSLSDMKTELDELRTKLKDSEKSCQAHLTNNSALSAEKNHLFSKLESITLAMKALEGMHANLEQKHSSVSREKDFAHDQVRELQDQLRIKNEEFEVSAKSHQLQANSYEKQISSLQEKNHYMEEVLQQEQQKNISASISTVILENCLVDEQDKKVTLFTECQKYAAENHSANMLVSELMEEARYHGEERKTLLTHNGKLREGISKQMKVLNICKDLGPADLAEDEVLLQTVSDETINILRLRDETEDANRLMDTELSVLSVVLLQVGMELRDLHLQKCALEKEVESGEAESLSLQNKNQQMLEQNEQLRNGLQESSEREEVLKTEVFIIQEKLSCLRESYQTSQDEISNLTEKNESLSKEYQSLSGKYNSLEDENDTVLEECMMLENLCLFFRGHNNEIVSALASLTDEMALLSLAKGDLDLKVNELSRRSVVLESENSHLKEYLIYLVEILRTRLVLSEFDLDINQSVCQELVVELENCMTQLVQKDDELMEAEEKVQLLQEKNRELCGVVGSLQVAIEGAKVVKGELEKKITRLIEQCSSKDDEILLLHQDNEALQSEVEQREREFVVLMDDAITSSVNSAVYEEKAFELMMNGKATENRAISLKELLMKEISSRDAHVEELQKKLAGIQEEHAELKAELNTHLALIASLSDHVSVLEEDTRSLSKPCSTEGKEETAWVHHVQEGNDGLESHCLPKGTPKLQGLIARIEALQVVVLNAKDRQDQESAKSAAKLAAASTEIQELKARGSSRMEAKEIYSDLEKQDVEVSKGKQVQIMKDIELDKISTCPPYGAGAALYPLGTGANVELDDDMLQLWEAAERSCKNETAKSSSSEHDIQAVEDLKSEYPSSELVRGRDLGINKLEVSKGAVEPHEAWSKNVLERLTSDAQRLLSIQASIEELKHKMEGPSKGKSPMNSEYSSVSTQLHETEGFVLEQINFNNKLTRKAENYPALSDNMNTEREGYSSRRKISEQVQKGSENVARLELELQKIQYVLLKLEEEHEYRRLKVSDKRTRVLLRDYLYGRKDRGGGQKKKKKRVPFCGCVRPKSRTEP

SEQ ID NO: 1007 - DNA, 573 bp, Sorghum bicolor
atgcaggctcttgtgattgtcccggaggagcgcaaccaccatcaccgccaccctggtgcccgtagcaagtcatcgggtccacacttttcatcaccgcctacctctcgtggcttccgtggaatgaactgccggtctttccactctggtggctgcgtcggtgttctcccatccccaccacctccgcctgcccgcacctactcatccccggagcccaagacacccaagcagcagccacgccatggtggcaagcgaagccggcccatttccataagcccctccacatctcctcccacccattctgagctgtgggcgggcccagcattctccaactcaccaccacccagttcgctgcccatccccaaattctccctccgccagaagcgcagcatctctctcgagctgccaccagttgagcgctctgatgatgtggaggtcaggcagcatgctaaatcagcaccttcatccccagttgagggatcagggtatgacttcttcaatgatgatgcaattgctagtgctattgcaacggagaatctgaggaggattctccagttggatatcactgatcattga

SEQ ID NO: 1008 - protein, 190 aa, Sorghum bicolor
MQALVIVPEERNHHHRHPGARSKSSGPHFSSPPTSRGFRGMNCRSFHSGGCVGVLPSPPPPPARTYSSPEPKTPKQQPRHGGKRSRPISISPSTSPPTHSELWAGPAFSNSPPPSSLPIPKFSLRQKRSISLELPPVERSDDVEVRQHAKSAPSSPVEGSGYDFFNDDAIASAIATENLRRILQLDITDH

SEQ ID NO: 1009 - DNA, 1143 bp, Sorghum bicolor
atggggagcggcgagaagaccgtcaccgcttatggcgagtacacctatgctgagctggagagggagccctactggccaagtgagaagctgaggatttcgattactggtgctggtggtttcattggatcccacattgctcgccgtctgaagagcgagggccattacatcattgcctctgactggaagaagaatgagcacatgaccgaggacatgttctgccatgagttccaccttgttgacctcagggtcatggacaactgtctgaaggtcacccaaggtgtcgaccatgtctttaatcttgctgctgatatgggtggcatggggttcatccagtccaatcactctgtgatcatgtacaacaacaccatgatcagtttcaacatgctggaggctgcacgtatcaatggtgtgaagaggttcttctacgcttcaagtgcatgcatttaccctgaattcaagcagcttgacacaaatgtgagcctgaaggaatctgatgcctggcctgctgagcctcaagacgcctatggcttggagaagcttgcaactgaggagctgtgcaagcactacaccaaggactttggcatcgagtgccgcgttggccgcttccacaacatttacggcccttttggtacatggaaaggtggtcgtgagaaggcaccggccgccttctgcagaaaggctcagacatccacggagaggtttgagatgtggggtgatggtctccagacccgatccttcactttcatcgacgagtgtgttgagggtgttctgagattgaccaagtcagacttccgcgagccagtgaacatcggaagcgatgagatggtgagcatgaacgagatggctgagatcgtgctgagctttgaggataggaagctgcccatccaccacatccctggtccagagggggtccgtgggcgcaactctgacaacacccttatcaaggagaagcttggctgggccccaacaatgaagctcaaggatgggctgaggttcacctacttctggatcaaggagcagatcgagaaggagaagacccagggggttgacatcgcggcgtatgggtcgtccaaggtggtgtccacccaggcgcccgtgcagctgggctccctccgtgccgctgatggcaaggagggcctctga

SEQ ID NO: 1010 - protein, 380 aa, Sorghum bicolor
MGSGEKTVTAYGEYTYAELEREPYWPSEKLRISITGAGGFIGSHIARRLKSEGHYIIASDWKKNEHMTEDMFCHEFHLVDLRVMDNCLKVTQGVDHVFNLAADMGGMGFIQSNHSVIMYNNTMISFNMLEAARINGVKRFFYASSACIYPEFKQLDTNVSLKESDAWPAEPQDAYGLEKLATEELCKHYTKDFGIECRVGRFHNIYGPFGTWKGGREKAPAAFCRKAQTSTERFEMWGDGLQTRSFTFIDECVEGVLRLTKSDFREPVNIGSDEMVSMNEMAEIVLSFEDRKLPIHHIPGPEGVRGRNSDNTLIKEKLGWAPTMKLKDGLRFTYFWIKEQIEKEKTQGVDIAAYGSSKVVSTQAPVQLGSLRAADGKEGL

SEQ ID NO: 1011 - DNA, 2019 bp, Sorghum bicolor
atggggctgtcaatctcatacccaccggacgactacctgccagcagtggaggacaacatggggcggctcttcatccggtctctcagcttcgacgacatggaggccgacgccgagtcgcctttgtcttcgccttcgacttcgccttcggcattgccccccgcctttgcctccgggaagctcatcatagaaggctccctgagcttcaaaaggagagaggctgacagcattccgatgcagaatgtgttgtccatcaggagtcctaaacctcctgatagagaagcttgcaacatcatctgtgctggtgctgctacagctacttgtggctcatcaagattcgggccaatcggggaccgtccaccagattttgattaccccatggtcggaatggacagccccaagcaccaggccgcggctgtcaggctgcagaaggtgtacaagagcttcaggacaaggcggcagcttgcggattgtgctgttcttgtggaacaacgatggtggaagttgcttgactttgcactgctcaagcggaactcggtgtcattctttgacatagagaagcctgagactgctgtctcaaaatggtcccgggcaagaatgagggctgccaaggttggcaaaggtctctccaaggatgaaaaggcccagaaacttgcgctgcagcactggctcgaggcgattgaccctcgacatcgttatggccacaacctgcacttctactaccaccgctggctccattgccagagcaagcaaccattcttctattggttggatgtgggagaagggaaagatgtcaacttagaggagcattgctgtagatcgaagttgcacaagcaatgtatcaagtaccttggccctaaagaaagggaaaattatgaagtgatagtcgaggataagaggctgatgtacaagctgagccgtcagatagtcgacacgacgggaagcgccaaggggaccaagtggatctttgtgctcagtacctgcaagactctttacataggccagaagcagaagggcgtattccagcactcaagcttccttgcagggggggccacatctgctgcaggaagactggttgtggaggatggaattctcaaggctgtgtggcctcacagtgggcattatcggccgacggagcagaactttcaggagttcatgaacttcctcaaggacaggagtgtggagcttaccgatgtgaagttgagcccatctgaaggtgaagaagacggtgacttcagcctgagaggcagccactctcagctggacctgacccaactctgccagcaagaagagagccatggtgaacaggaggcagaatctgatcaacgccatggcaacgccgaagccgaagccgagacgtgcagccacgacgaagccacatctacagagacgtgcagcacgccgtcgccagcgacggcgacgacgatgaggaagagctcctcagacaacaggctgcaagggaagcggccacccaggctgctgatcagctccaacaacaacatagcaccgctgccgcccaccgcgcacagcagcagcggcggcggcaacgcgggcagggcgccgtcgcccggcgtgaaggatgtggagccggactcggccatgctgggcgagtgcctcgacttctgcaagcggaacctgttcgcggaggacggcgggtacgaggaccagtacctggacgacctggcggaggtgccggaggcgctcatcctcagccgcatcaactccaagcgggccatgcactcgtaccagctcggcaagcagctgcacttccactggagcaccggcgccgggccccggatcggctgcgtccgcgactacccgtccgagctccagttccgggcgctcgaggaggtcagcctgtcgccacggggcaggccgccgaggttcccgtcgcccaggccaggcgcgctcacgcccaacagcatccctgccgccaagtgcggctctctcatggcggagggagacggcatgcacgtgtcgctcaagcccaggcagaggagtgccacttggactgcattttga

SEQ ID NO: 1012 - protein, 672 aa, Sorghum bicolor
MGLSISYPPDDYLPAVEDNMGRLFIRSLSFDDMEADAESPLSSPSTSPSALPPAFASGKLIIEGSLSFKRREADSIPMQNVLSIRSPKPPDREACNIICAGAATATCGSSRFGPIGDRPPDFDYPMVGMDSPKHQAAAVRLQKVYKSFRTRRQLADCAVLVEQRWWKLLDFALLKRNSVSFFDIEKPETAVSKWSRARMRAAKVGKGLSKDEKAQKLALQHWLEAIDPRHRYGHNLHFYYHRWLHCQSKQPFFYWLDVGEGKDVNLEEHCCRSKLHKQCIKYLGPKERENYEVIVEDKRLMYKLSRQIVDTTGSAKGTKWIFVLSTCKTLYIGQKQKGVFQHSSFLAGGATSAAGRLVVEDGILKAVWPHSGHYRPTEQNFQEFMNFLKDRSVELTDVKLSPSEGEEDGDFSLRGSHSQLDLTQLCQQEESHGEQEAESDQRHGNAEAEAETCSHDEATSTETCSTPSPATATTMRKSSSDNRLQGKRPPRLLISSNNNIAPLPPTAHSSSGGGNAGRAPSPGVKDVEPDSAMLGECLDFCKRNLFAEDGGYEDQYLDDLAEVPEALILSRINSKRAMHSYQLGKQLHFHWSTGAGPRIGCVRDYPSELQFRALEEVSLSPRGRPPRFPSPRPGALTPNSIPAAKCGSLMAEGDGMHVSLKPRQRSATWTAF

SEQ ID NO: 1013 - DNA, 307 bp, Sorghum bicolor
gtgtcgcagatggacagaagttgggtgaatactagactatttagcaaggcacatctagatggggtcactgagttcatgaactttgtttctgataatttgggtgatagacaggagatattgtgtccatgtcctagtgataggggctgcaatgttgaagttgagatgaatgagactgaagatgacccagatgatgatagaatccatgagatggtacatgagctgtacacagctgaagaccatggaccaacaacaaagtccaagtttgcaaccataatagaagagatgaaacacgaactgcaccctgatg

SEQ ID NO: 1014 - protein, 103 aa, Sorghum bicolor
  misc_feature (103)..(103): Xaa can be any naturally occurring amino acid
VSQMDRSWVNTRLFSKAHLDGVTEFMNFVSDNLGDRQEILCPCPSDRGCNVEVEMNETEDDPDDDRIHEMVHELYTAEDHGPTTKSKFATIIEEMKHELHPDX

SEQ ID NO: 1015 - DNA, 1401 bp, Sorghum bicolor
atgaagcaaggaaggcgcgggagtaagaagcatgggagcggagcggcggcgctgtggctgctgctgcctcttctagttttgatagtgctcaagacaaatctcctgccacagtttgcacgctattccatggtcgggtcaccaccttctgcggcatcaacatccacacacggggtgaccagcaacgtcgatgcgacgaaagctctggcagcaccgccaataataagcagcaagttgacctgcaacttcagcaatcatcagtccaacacctgcagcatggaaggcgacttgcgcatccatggcaaatccgccactgtgtacgtcgtctcggcgtccacctaccgtccggaaaatgcgaccatcaagctccgcccgtatgcacgaaagtgggaggaccaggtgatgctgctggttcgtgaggtcaccatgcggtctagtccgcctgcaggcagtgccgccgccgacgacccaccaccaccaccgcagtgctcggttcggcacgacgtgccggcagtggttttctctaccggcggctacaacaggaacttcttccacgtgatgaccgacgtgatcatcccactctacctgacggcccgagagtacaatggccacgtccagctgcttgccaccgactacgagcccaagtggatcgccaagtacaaggccatcctcgccgcactgtcaagctacccagtcatagacttggactctgagcctgaggacaccgtgcgctgcttcccgtcggctcatgtcgggctggagagtcacaaggagctgggcatcgtcccgggtctctcccacaagggctacacaatggtgagcttccgggacttcatccgctccgcctactcgctgcagcggccacgggtgagcgccgggcggaagaagcctcggctcgtcatgatcctgcgccgcaactcgaggcagctcaagaatgaagacgacgccatcgccgccgcggccaatgtcggcttcgaggtggtagctgcgggaccagacgacgtcagtgacctggagcggttccccggggtggtcaactcctgcgacgtgctcatgggcgtgcacggtgctgggctggccaacatgctgttcctgcctcacaacgccacggtggtgcagatcatcccgtggggcgagctcaagtgggcgtgccggcattcgtacggagaccccgtgccagacatgggactccgttatctcgagtacgaggccacagcggaggagacctcgttgaaggacagctacccccgcgaccacgccgtgtttaccgacccgctctcaatacatcgccagggatttgacaagatgtggaacatcttcatcaacggacagcacgtcatcgtagacatcgaccgattcacagggttcatgaagcaactgtaccagtccatcacgacggagtag

SEQ ID NO: 1016 - protein, 466 aa, Sorghum bicolor
MKQGRRGSKKHGSGAAALWLLLPLLVLIVLKTNLLPQFARYSMVGSPPSAASTSTHGVTSNVDATKALAAPPIISSKLTCNFSNHQSNTCSMEGDLRIHGKSATVYVVSASTYRPENATIKLRPYARKWEDQVMLLVREVTMRSSPPAGSAAADDPPPPPQCSVRHDVPAVVFSTGGYNRNFFHVMTDVIIPLYLTAREYNGHVQLLATDYEPKWIAKYKAILAALSSYPVIDLDSEPEDTVRCFPSAHVGLESHKELGIVPGLSHKGYTMVSFRDFIRSAYSLQRPRVSAGRKKPRLVMILRRNSRQLKNEDDAIAAAANVGFEVVAAGPDDVSDLERFPGVVNSCDVLMGVHGAGLANMLFLPHNATVVQIIPWGELKWACRHSYGDPVPDMGLRYLEYEATAEETSLKDSYPRDHAVFTDPLSIHRQGFDKMWNIFINGQHVIVDIDRFTGFMKQLYQSITTE

SEQ ID NO: 1017 - DNA, 1248 bp, Sorghum bicolor
atggcgacactccatctgttgctggccctgctgcttctgctcccttccatctctgaggcgacgtcctcggcgctgctgggcatcagctacgggcgcgttggcaacaacctccctgcagcgacctcagtgccgcagattgtggcctccctgggcatcggccgcgtccgactctacgatgctgaccccaccaccatccgcgccttcgccaacacgggcgtcgagctcgtcgtcggcgtccctgacgagtgccttgccactgtctccacccccaacggcgccgcctcctgggtcggctccaacattgcccccgcgctcccggccaccaagatcgccttcctcaccgtcggcaacgaggtgctcaccggcgtcaacagctcctcgctttccaggtacctcctcccggcgatgcagtgcctccacgacgcgcttgcgcaggccggcctggacaagcaggtcgccgtcaccacggcgcacaacctcggcgtgctggccacgtcgtacccgccgtcgtcggcctacttccgcaaggacctcctcccgatgctctgccccatcctcgacttccacgcgcacgcggggtcgccgttcctggtcaatgcgtacccctacttcgcctacgccgaggaacccacgggcgtggagctcgagtatgcgctgctggaacccggccatgccggcgtcgccgacccggggaccgggctgcactacaccaacatgctcgcggcgcaggtcgacgccgtgtaccatgccatcgcggcggccaacagcgcggcggcgcgggccgtggaggtgcgcgtgtccgagaccgggtggccgtcggcgggggacgccaacgagaccggcgccacgccgcagaacgcggcgaggtacaacggcaatgtgatgcggctcgtggcccaggggaagggcacgccgatgcggccggcggcgccgctgcgcgtctatatgttcgcgctcttcaacgagaacatgaagcccgggccgacatcggagcgcagctacggcctcttcaagcccgacggaacgccggcgtacgagctctcctaccgcctcccgcaggacaacaccaccacctcctcctccggtggcagcgttaccggcggtggcggctaccatggccacggctacgggtcggacaacgccgggtactacagcatctcggccgctgccaaggcgacactgggttggtggacatggccacaggtagctgtggcagcacgtgtggctgtactggccatgccactgtga

SEQ ID NO: 1018 - protein, 415 aa, Sorghum bicolor
MATLHLLLALLLLLPSISEATSSALLGISYGRVGNNLPAATSVPQIVASLGIGRVRLYDADPTTIRAFANTGVELVVGVPDECLATVSTPNGAASWVGSNIAPALPATKIAFLTVGNEVLTGVNSSSLSRYLLPAMQCLHDALAQAGLDKQVAVTTAHNLGVLATSYPPSSAYFRKDLLPMLCPILDFHAHAGSPFLVNAYPYFAYAEEPTGVELEYALLEPGHAGVADPGTGLHYTNMLAAQVDAVYHAIAAANSAAARAVEVRVSETGWPSAGDANETGATPQNAARYNGNVMRLVAQGKGTPMRPAAPLRVYMFALFNENMKPGPTSERSYGLFKPDGTPAYELSYRLPQDNTTTSSSGGSVTGGGGYHGHGYGSDNAGYYSISAAAKATLGWWTWPQVAVAARVAVLAMPL

SEQ ID NO: 1019 - DNA, 1482 bp, Sorghum bicolor
atggaatctgccatagctgcggttgcaggtgaactcgtcagccgattcatctccttcgcctttagcagatattgctccagctacagctatgaaggattggaggagaagcgggagaggctgcgacaactcctgatgagggttcacaccgtcgtcgaggaggcagatgcgcgatacatcaccaactctgggatgctgatgcagctcaagctgctgtcggaggccatgtaccagggctaccatgcgctggataccttgacattccagctccacgacgacgaggaggactccacaaactgcatggttagcgactcatcaatctccttgtgttccgccactcgcttcaaacgtcaacgcacagttcttgcttcggcgaaaaaggacaaggtagccgcattggataatctggaaacagctgtggcgaacatatcagagttcgttgcgcttctgtgtgggtgtgatgagcgcttgtcccgtagaccctacgatgcatatctttacatcggcaatttcatgtttggtcgacatgccgaaaagcaaaagctcctcaacttcttactgcagcaaaacccatcagatgaccttgcaccacctcctgtcctgccaatcatcggtgctcttggagttgggaagaagactttggtcgcccatgtgtgtgctgacgagagggtacgctgcaaattcgcttcgattctgcatctgaacggtgaaaacttactgaatatcgtcgaccacgaaaaggccatgctgggaatgccgtcacttgtggttgttgagtttgtttcagatgttgatgacatgaaatggaatgagttttattcatttgtgacaagaacagctagtacaagaagcaaggtgatcatcatcagcaagcttggaacattagcaaggtttgggtcagtaagaccaatctttcttgatgctctgtcatacgaggagttgtggtacctcttcaagaacctagcatttggaagtgcggacccggcagagcatccaaggctagtacatatagcagaaggatttgccaaggaatttcatcagggtggatcacttgttacagcaaatgcattcgctgacgtgttgagaagcaacctgaatgctcaattctggctttcgatactgaacaagtgcagaaaagtgatggagaagaacctcttcgcttacgggcagctcccaaatttactcttcgatcaaggccgcgaggtagacatcacggatttcgtttcgagtcctgctattaatcccattcgcatcttaccttgtactactagtagggctctagccaaaacagaattaccaaaggtggcgtttggagaactactcctagatccttctgttagacccaaaggagaatttcgtctattgacatgggagtccaggttaccaccttatacttcatttattcacttggttccaaattccactcaagatctgcctcaaggacatagtttatcagggaggaagcgccacatagtgcctttctga

SEQ ID NO: 1020 - protein, 493 aa, Sorghum bicolor
MESAIAAVAGELVSRFISFAFSRYCSSYSYEGLEEKRERLRQLLMRVHTVVEEADARYITNSGMLMQLKLLSEAMYQGYHALDTLTFQLHDDEEDSTNCMVSDSSISLCSATRFKRQRTVLASAKKDKVAALDNLETAVANISEFVALLCGCDERLSRRPYDAYLYIGNFMFGRHAEKQKLLNFLLQQNPSDDLAPPPVLPIIGALGVGKKTLVAHVCADERVRCKFASILHLNGENLLNIVDHEKAMLGMPSLVVVEFVSDVDDMKWNEFYSFVTRTASTRSKVIIISKLGTLARFGSVRPIFLDALSYEELWYLFKNLAFGSADPAEHPRLVHIAEGFAKEFHQGGSLVTANAFADVLRSNLNAQFWLSILNKCRKVMEKNLFAYGQLPNLLFDQGREVDITDFVSSPAINPIRILPCTTSRALAKTELPKVAFGELLLDPSVRPKGEFRLLTWESRLPPYTSFIHLVPNSTQDLPQGHSLSGRKRHIVPF

SEQ ID NO: 1021 - DNA, 1035 bp, Sorghum bicolor
atggcgagcctcctcaagaagttcgtagacgctgagcagtgggacgccgaggacatcgccggccggctgggcatggtcttccacgccgccttcctcttcgccggtttccggccgtacggcgcgcagccacggtcgggacacctcctgaagaagcaatcacgcaagaaggggggaggctcgctctgcctctcccgacagtacaccgcgccggaccttgcgcaccgcgacggcgcggacgctgccgtgctgatgctgtgtgcgcaggggaggtacgccgcgctcctcgtgttcctcaccgcggacggcgacgacgacacgccggagatcgcgtacatggagcggctggatctcctcaccgtgtggccgctcctctcccgtagcctcggcggcgtggagccctgggcgtcgcggatctgcaaggcgctcgccgacggcgtgtgctggggcctcctccacgagctgtgcagcaggaacggcctaccgctgagcggcttcgcgtccctgcccgacgacctccagggagccgtcttggagaagctcaccgacggcaaggacctcgcgagggtggagtgcgttagctcccagctgaggctgctcgtcgctgagcgtgaccaccagctgtggaggaccttgtacaaggccctgcctgcgcgccagcgccggggctggtggcgtctgtggtggttcttccccgacgccgacagctccgacgaggagactctccgtgtcggatcgacctggaaggacaaatacgtggaggccaggcggcgttccaatcgtcccattccgcgctcgtggttcttcgactcctttgattttgaacccatctggatgattcgtcggagggacttgtcgtcatggccccttgactattggttcatacaagatccgccggaggaggagaagacacttcctccaagggtcgacaggagcggcgtccgccgccggaagctgccacggaacaacgacaagaagtggcatggtggtggtgccatccactcgccatcatctcgctatcgatggaagcatcgctag

SEQ ID NO: 1022 - protein, 344 aa, Sorghum bicolor
MASLLKKFVDAEQWDAEDIAGRLGMVFHAAFLFAGFRPYGAQPRSGHLLKKQSRKKGGGSLCLSRQYTAPDLAHRDGADAAVLMLCAQGRYAALLVFLTADGDDDTPEIAYMERLDLLTVWPLLSRSLGGVEPWASRICKALADGVCWGLLHELCSRNGLPLSGFASLPDDLQGAVLEKLTDGKDLARVECVSSQLRLLVAERDHQLWRTLYKALPARQRRGWWRLWWFFPDADSSDEETLRVGSTWKDKYVEARRRSNRPIPRSWFFDSFDFEPIWMIRRRDLSSWPLDYWFIQDPPEEEKTLPPRVDRSGVRRRKLPRNNDKKWHGGGAIHSPSSRYRWKHR

SEQ ID NO: 1023 - DNA, 1041 bp, Sorghum bicolor
atggcggcgtcttgtgtttcgaaggaaaggacaggcgtgcccgtggtagctctgagtctgggcaagccgatgccgcgcgtcggcttcggcacggcgtcggcgactctgggccaggccgagggccgcgccggcgtgacggaggccgtcctcagcgctctcagcgctgggtaccgccacttcgacacggcgtcggcgtacaactcggaggccgcggtcggggacgccgtcatccacgccgccgccgtccgcgacgacctctacatcacgacgaagctcgccatcaccgacgcgcaccccggccgtgttctgccggcgctacacaagtcactccggaatctgcagatggagtacgtggatctttatctcattcactttccggtgagcatgcggccgccggtggtggaaggaggcctggcggtggtgaaggaggacctggtagagatggacatgaagggggtgtgggaggagatggaggagtgccacaggcgagggcttgcgagggccattggcgtcagcaacttcagctgcaagaagctagaatacttgctatcctttgctaacattcccccggctgccaaccaggtggaggtgcacccacactgccgtcagaacaagctaagggcattttgcagggagaaaggaatccagctttgtgcattctcaccgctaggtgccaagggcacggcatgggctaacaactccgtcatggagtgccctgtcctcaagcagatagcccatgaaaagggcaagaccgtcgcccaggtgtgcattaggtgggtgtttgagcagggagattgcgtcatcgtaaaaagcttcaacgagaagaggatgcgagagaacctcgacatattcggctgggagctcacggaagacgaccgtcgcaaaatcagcggcctcccagaatcgagaggaaccttcgatttcttcgtccatgagtccgggcctttcaaaaccgccgaagagttttgggatggtgagatcgttgctggccaatccactaaccaagttgctgtccgtttggatccgaccagcttacagtaa

SEQ ID NO: 1024 - protein, 346 aa, Sorghum bicolor
MAASCVSKERTGVPVVALSLGKPMPRVGFGTASATLGQAEGRAGVTEAVLSALSAGYRHFDTASAYNSEAAVGDAVIHAAAVRDDLYITTKLAITDAHPGRVLPALHKSLRNLQMEYVDLYLIHFPVSMRPPVVEGGLAVVKEDLVEMDMKGVWEEMEECHRRGLARAIGVSNFSCKKLEYLLSFANIPPAANQVEVHPHCRQNKLRAFCREKGIQLCAFSPLGAKGTAWANNSVMECPVLKQIAHEKGKTVAQVCIRWVFEQGDCVIVKSFNEKRMRENLDIFGWELTEDDRRKISGLPESRGTFDFFVHESGPFKTAEEFWDGEIVAGQSTNQVAVRLDPTSLQ

SEQ ID NO: 1025 - DNA, 1710 bp, Sorghum bicolor
atggatacacaagatgaggagaggccactgattcatcccttgcccacacaggatgaatgttcagaattcacttgtgatgggacagttgatattaacaaccagcgtgctccgaagcggagcacggggaactggagggcatgcttctttattttaggtgctgaattcactgaatgtgtggccgtctacgcaatcacaaagaacttggtcagctacctcactggtgtcctccacgagagcaacgtcgatgctgcgacaaccgtgtccacctggatcggcacttcattcttcacaccgctcattggagctttcttagctgacacattctggggacgatattggacagttgtggtcttcctctcggtttacgcaattgggatgctcaccctgactgcatcagcgtttctcccactgctgatgggctcctcctacaaccgtggcattcatcgtgccgccacatacctgggcctctccctcaccgctctcggcaacggtggcataaagccatgtgttcctgcccttggtgccgatcagtttgacgcaaccgacccagtggagagggtgaaaaagggctcattcttcaactggttctacttctcagtcaacattggctcgctgctgtcggcaaccgtgatcgtctgggtgcaggacaacatcgggtggggagtcggattcgcgatcccggcagtgctcatggtgtctgggctgcccttgttcgtcgccggtcacaaggtttacaggtaccagagagtgggagggagtcctctcacgagggtctcccaggtggttgttgcagctgtgaggaactaccgtttggagttgcctgaagactgctctgctctgcatgaggtgcctggaaattgcaagattcagcatacaagtcagttcaggttctttgacaaggctaccattgtagtagcgccatcctccaacgagaaagctccaactgcaaacagtccatggaggctttgtacagtgtcccaggtcgaggagctcaaaatgctgctccggatgttccccgtgtgggcgtccatggtgctcttctttgccgccaccgcccagatgtcgtccacgttcatcgagcagggcgcagccatggacaaccacgtcggtccgttcaccgttcctcccgcgtccctcgccaccttcgacgtcgttgccgtcatggtctgcgtccccatctacgacaccgtgctggtgcctcttgcccggcggggaacgggcaaggagcggggcctgtcgcagttgcagcggctgggcgtcggcctcgggctgtccgtggctggcatggcgtacgcagcgctggtcgaggggaggcgcttgtctctcgcccgtagcacgcagccgtcggcgtcgatgagcatcatgtggcaggcgccggcgttcgcggtgctcggcgcgggcgaggtgttcactgccatcggcatcctcgagttcttctacgatcagtcgccggacgggatgaagagccttggcacggcccttgcgcagctcgccatcgcggccggcaactacctcaactctgccatgatcgccgccgtcgccgccgtcacgacgcgcaacggggaaccagggtggatccccgacgacctgaacaacgggcacctggactatttcttctggttgatggctcttcttggcgtggtgaacctgctgtacttcctgcattgctccattaggtacggaggcaacaagaacaacacatgttcttga

SEQ ID NO: 1026 - protein, 569 aa, Sorghum bicolor
MDTQDEERPLIHPLPTQDECSEFTCDGTVDINNQRAPKRSTGNWRACFFILGAEFTECVAVYAITKNLVSYLTGVLHESNVDAATTVSTWIGTSFFTPLIGAFLADTFWGRYWTVVVFLSVYAIGMLTLTASAFLPLLMGSSYNRGIHRAATYLGLSLTALGNGGIKPCVPALGADQFDATDPVERVKKGSFFNWFYFSVNIGSLLSATVIVWVQDNIGWGVGFAIPAVLMVSGLPLFVAGHKVYRYQRVGGSPLTRVSQVVVAAVRNYRLELPEDCSALHEVPGNCKIQHTSQFRFFDKATIVVAPSSNEKAPTANSPWRLCTVSQVEELKMLLRMFPVWASMVLFFAATAQMSSTFIEQGAAMDNHVGPFTVPPASLATFDVVAVMVCVPIYDTVLVPLARRGTGKERGLSQLQRLGVGLGLSVAGMAYAALVEGRRLSLARSTQPSASMSIMWQAPAFAVLGAGEVFTAIGILEFFYDQSPDGMKSLGTALAQLAIAAGNYLNSAMIAAVAAVTTRNGEPGWIPDDLNNGHLDYFFWLMALLGVVNLLYFLHCSIRYGGNKNNTCS

SEQ ID NO: 1027 - DNA, 204 bp, Sorghum bicolor
aggcggaggcacgttgcgcgccaccaacggcagagcccccaagcacgcgaagattacaccgaatcagaggcaatggtggaggtggttggggagggattcctacatatggaggagcacaggctagagttcacactgcagatggagaaggagcggatggagtcaaagatgaagcggacccaaaaaatgtcacacccttggccgccg

SEQ ID NO: 1028 - protein, 68 aa, Sorghum bicolor
RRRHVARHQRQSPQAREDYTESEAMVEVVGEGFLHMEEHRLEFTLQMEKERMESKMKRTQKMSHPWPP

SEQ ID NO: 1029 - DNA, 1017 bp, Sorghum bicolor
atggcttcctctagccctcatcatcgtgcagccgtcgtcgccggcgtgctgctggtggtggcggccgccctgtgctcccgcggcgccatggcgcagctgaccgcggactactacgactgcacatgccctgacgcctacaacatcgtgaagaatgtgctcatcgaggcgcacaagtcggacgtgcgcatctacgccagcctcacccgcctccatttccacgactgcttcgtccagggctgcgacggctcggtgctgttggacgccttgccgggggtggccaactctacggagaaattggcgccggcgaacaacaactcggcgcgggggttcccggtggtggacaaagtgaaggcggcgctggagaacgcctgccccggcgtcgtctcctgcgccgacatcctcgccctcgccgcagagatctccgtcgagctgtccggaggcccaaagtggagcgtgcttcttgggaggctagacagcaagacggccaacttcaaaagcgcagagaacctgccgtcgcccttcgacaacctcaccgtgctgcagcaaaagttcaccgccgtcggccttcacaccgtcgacctcgtcgccctctcaggggctcacacatttggccgggtgcagtgccagttcgtgacgagccggctgtacaacttcagcggcaccggccggccggaccctacgctcaacggcggctaccgggcgttcctgacccagaggtgccctctgaacggcaacgggtcagccctgaacgacttggatcccacgacgcccaacctcttcgacaaccactactacaccaacctcgaggtgaaccgaggcttcctcaactccgatcaggagctcaagtcctcgccgccggcgcagggcgtcacggcgcccatcgtcgaccagttcgccagcagccaggacgccttcttcgacaacttcgcgcagtccatgatcaacatgggcaacattcagccactcacggacccctccaagggagaagtccgctgcaactgccgagtggctaattaa

SEQ ID NO: 1030 - protein, 338 aa, Sorghum bicolor
MASSSPHHRAAVVAGVLLVVAAALCSRGAMAQLTADYYDCTCPDAYNIVKNVLIEAHKSDVRIYASLTRLHFHDCFVQGCDGSVLLDALPGVANSTEKLAPANNNSARGFPVVDKVKAALENACPGVVSCADILALAAEISVELSGGPKWSVLLGRLDSKTANFKSAENLPSPFDNLTVLQQKFTAVGLHTVDLVALSGAHTFGRVQCQFVTSRLYNFSGTGRPDPTLNGGYRAFLTQRCPLNGNGSALNDLDPTTPNLFDNHYYTNLEVNRGFLNSDQELKSSPPAQGVTAPIVDQFASSQDAFFDNFAQSMINMGNIQPLTDPSKGEVRCNCRVAN

SEQ ID NO: 1031 - DNA, 202 bp, Sorghum bicolor
atggagagcagcaagaacaagcagcagcggcagtccgtggacgcagcttccggcagcaagcccgccgccgccggcgccaggccgcactggaggcgccgggaccccgcggacacggcggtctacgtcgtccagcccgaccagttccgcgccgtcgtccagcaactcacgggcgccgcttcgtcgccgccgccgccgccagcgc

SEQ ID NO: 1032 - protein, 111 aa, Sorghum bicolor
MESSKNKQQRQSVDAASGSKPAAAGARPHWRRRDPADTAVYVVQPDQFRAVVQQLTGAASSPPPPPAPAAAAGRGGTSTNAAAAQREHGGGRTLGQIQQEVMAWANSDDDD

SEQ ID NO: 1033 - DNA, 870 bp, Sorghum bicolor
atggcggccgggagtgccagtgccacggcgtctctctccgtggcggcggcagcggctgctgctctgcgcgtcaggcggccatgcgctcgcgctcgcgcttgggccccctcgcagcggccgcagcaaggggcactcctcagcctcaagccttgcgcctcactggcaccacacgcgcctctgtggcgggcggagtcggatgccgcgggcggtggtgccggcgccggcgacgtcatgggcctccttctccgggagcgcatagtcttcctcggcaacgagatcgaggacttcctcgcggacgccgtcgtcagccagctcctcctcctcgacgccatcgatccggactctgacatccgcctcttcgtcaactcaccaggggggtccctcagtgcaacaatggccatctatgatgtaatgcagcttgtgagggcggatgtctccactattggaatgggcatagctggatcaacagcttctataatccttggtggtggcacgaagggcaagcgatttgccatgcccaacaccaggattatgatccatcagcctgtcggaggtgcaagtgggcaggccctagatgtagaggtccaagcgaaggagatattgacgaacaagaggaatgtcattcggatcgtgtcaggcttcacgggccgcactctggagcaggtagagaaagatattgacagagatcgttacatgggccctcttgaggctgttgattatggacttattgatggtgtgatcgatggagacagtatcatcccacttgagcctgtcccagagagggtgaagcctaagtataactatgaagagctgtacaaggacccacagaagtttcttacaccagatgtcccagatgatgagatatactag

SEQ ID NO: 1034 - protein, 289 aa, Sorghum bicolor
MAAGSASATASLSVAAAAAAALRVRRPCARARAWAPSQRPQQGALLSLKPCASLAPHAPLWRAESDAAGGGAGAGDVMGLLLRERIVFLGNEIEDFLADAVVSQLLLLDAIDPDSDIRLFVNSPGGSLSATMAIYDVMQLVRADVSTIGMGIAGSTASIILGGGTKGKRFAMPNTRIMIHQPVGGASGQALDVEVQAKEILTNKRNVIRIVSGFTGRTLEQVEKDIDRDRYMGPLEAVDYGLIDGVIDGDSIIPLEPVPERVKPKYNYEELYKDPQKFLTPDVPDDEIY

SEQ ID NO: 1035 - DNA, 516 bp, Sorghum bicolor
atggcggcggtggtgcgcggcgtcttgaggggcatcaaggagaagggactcaccaacttcatccgcgatgcccgcgacgaaggatacttgaatcgtctttgtgtcatgcctgatatgagttcctgcaaatgccttctggatgggaaccttttgcaaacgaaaattcacaatattggcgcaacacttgtaggagttgacaagtttggaaacaaatactatgagaaactacatgacactcagtatggaaggcataggtgggtagaatatgcagagaaaggtcgttacaatgcatcccaagtgcctcctgaatggcatggatggctgcaccacgtcacagatagcactggggataagctgctgaaccagaagactgctaggtaccttgtagagcacaagcagaactactccggtgagggtgaagagctgatctaccactccaaggggcatgctttgaatccggggcaaagggactggacgaggtatcagccctgggagccaaagaaagagcaagcctag

SEQ ID NO: 1036 - protein, 171 aa, Sorghum bicolor
MAAVVRGVLRGIKEKGLTNFIRDARDEGYLNRLCVMPDMSSCKCLLDGNLLQTKIHNIGATLVGVDKFGNKYYEKLHDTQYGRHRWVEYAEKGRYNASQVPPEWHGWLHHVTDSTGDKLLNQKTARYLVEHKQNYSGEGEELIYHSKGHALNPGQRDWTRYQPWEPKKEQA

SEQ ID NO: 1037 - DNA, 1788 bp, Sorghum bicolor
atggctgcgatgaacggaaaggcattggataaatgtggaaggaacataaatagtctcaagagaaagcgggagagccccgctgcatatgatgctgacgtattcctcacctctgaattacatcagcatcctgtcaatgattctgctgttaggtttcatgttgatcaagaccgcaaggcaaagatcgtgtgccacttcaacaagcaggttttgcagagctataagaacttcatgagtagtgcaccacctaagcgcattttgcttcgcaaaggtgctgtctggaaagacgttccagaaaagattgtcaaattggcccaagccgacttcagggcaaaaaagacgatcacagaaacaggatatcagaaccatctatttttgctcgattttgcccatatgacattcatagacacaaagacaggtcttcagaggcctattgcttggattgatgaaaatggaaagcgctacttcccggaatcatttatgcaagatcagaaattatttatcaagaaagattttggcaacggaaatcctgagtacattagtgttgagccaaatgggacacgagaaatgaatgaccagcttggagcatcagaaagttctgcagaaagctcaaactttgattcaagtactgaagatatttccagtcctaagagatctagggctgaaaagaattccatcataaaaaaatactgtgatatgggagaagctattggagaaaatgagccatgtgctttgttgcctacagcctgtaacctactgccacaccaagctaatctgggtgaggtatcacgtgctcagcgcactattgaagccgtggagaagctgttgctgcaggggatgggttcagttattgaatccaaggacattattggaatcttcaggactccattattggatgaccacagacaagtccgttaccatattcaccaaaagcaagtacaggttaccggatgtcatcgtggaaatgcaaatgtccgttatgcatggcttccttgctccaaaagcactgtgcatgaaatgatgctgaatggtgttttacaagttcataagccgcccattaattttgcagcctatggagagggcatcctccttacaccagcaaatcgttctgatgcctgtgtgaaatactctgatgttgatgaaaatggcattgtccatatgatgttgtgccgtgttataatggggaacgtagaaatagttcaccctggatctaatcagcaccgacctagtagtgaccatgttgatagtggagtagatgaccttaaaaacccacaacattacattgtgtgggatatgaatatgaataggcacatctattctgagtttgtagtcatcgtcaaattgccttctaaaaccaaagattccttcgtgtctcaagaagagtgtcagaattcatctgatctgtcactggtgttgaattctagttcacctgactgtatttcagaggagatgaacctggaggcacctccagcattgggaggtggatgtgcagcccccatgctaggagattcgatggaaaaggctccaagctcaccttggatgcctttctccatgttgtttgcagcgatctctactaaagtgtctcctgagaatatggacatggttattagttgctatgaagagtttaagagtaagaaaataagccgaggtgaactagtaaagaagctgagacatgtagttggtgatagagtgctaatatcgacgataatgcgtctccaagataagttacctccagtggagaggcgtgaggcaccggacgcatcagcggccaagatggtggcgaaaccgtga

SEQ ID NO: 1038 - protein, 595 aa, Sorghum bicolor
MAAMNGKALDKCGRNINSLKRKRESPAAYDADVFLTSELHQHPVNDSAVRFHVDQDRKAKIVCHFNKQVLQSYKNFMSSAPPKRILLRKGAVWKDVPEKIVKLAQADFRAKKTITETGYQNHLFLLDFAHMTFIDTKTGLQRPIAWIDENGKRYFPESFMQDQKLFIKKDFGNGNPEYISVEPNGTREMNDQLGASESSAESSNFDSSTEDISSPKRSRAEKNSIIKKYCDMGEAIGENEPCALLPTACNLLPHQANLGEVSRAQRTIEAVEKLLLQGMGSVIESKDIIGIFRTPLLDDHRQVRYHIHQKQVQVTGCHRGNANVRYAWLPCSKSTVHEMMLNGVLQVHKPPINFAAYGEGILLTPANRSDACVKYSDVDENGIVHMMLCRVIMGNVEIVHPGSNQHRPSSDHVDSGVDDLKNPQHYIVWDMNMNRHIYSEFVVIVKLPSKTKDSFVSQEECQNSSDLSLVLNSSSPDCISEEMNLEAPPALGGGCAAPMLGDSMEKAPSSPWMPFSMLFAAISTKVSPENMDMVISCYEEFKSKKISRGELVKKLRHVVGDRVLISTIMRLQDKLPPVERREAPDASAAKMVAKP

SEQ ID NO: 1039 - DNA, 315 bp, Sorghum bicolor
atggtgcgcaaggcgaaggttgagttcgacgagcagccgccggataacttcgacccgaagaacccgtatggggacccggtggcgatgctggagtaccgggagcacctggtgcgggagaagtggatccagatcgagaccgccaagatcatccgggagcgcctccgctggtgctaccgcatcgagggcatcaaccaccaccagaagtgccgccacctcgtcgaccagtacctagagtctacccgcggcgtgggttggggcaaggatgctcgcccgcccgagttccacgagcccaagaagaccgtcgaggcggagtag

SEQ ID NO: 1040 - protein, 104 aa, Sorghum bicolor
MVRKAKVEFDEQPPDNFDPKNPYGDPVAMLEYREHLVREKWIQIETAKIIRERLRWCYRIEGINHHQKCRHLVDQYLESTRGVGWGKDARPPEFHEPKKTVEAE

SEQ ID NO: 1041 - DNA, 660 bp, Sorghum bicolor
atggcgtcagcagcagccgccttcctcctgatcatcgctggagccgcatggccttcgttaatcgacgccgctccgtctccgtcgtcgtcgtcgttcgtcccgccgccgccatgcgcaccaccgcgatcggcggtggagtttctccgcgcgcgctgtgccagcacgctgtacggcgtggcctgctacgagtccctcctcccgtacgcgtgcatattccgtaccagccacgtcaagctcgcccgcgccgccggcgacgtcaacgccgcctggatcagctcgatctccaagcgcgtcaaggagctcgtcgcccgcggcgctgctggtggcaccgccgtggccgagtcggctgcgctccgcgactgcgccagcacagtgtcatcggccgccggcttggccaagcaggcggcggccgagctggccaagctcgacgccgccggaggcgccgtcgggagcagcaatgtccggtgggcgatttccaacgcccaaacgtggctcagcgcgtccatgacgaacgaggcgacatgcgccgacggggtcgcggctacaggcgctgcagcgtcgtcgccggtggccagggaggtagtgatggcagttgtgagagccagggagctcacgagcatcgctctcgcactcgtttatgggataccagttcctccgtga

SEQ ID NO: 1042 - protein, 219 aa, Sorghum bicolor
MASAAAAFLLIIAGAAWPSLIDAAPSPSSSSFVPPPPCAPPRSAVEFLRARCASTLYGVACYESLLPYACIFRTSHVKLARAAGDVNAAWISSISKRVKELVARGAAGGTAVAESAALRDCASTVSSAAGLAKQAAAELAKLDAAGGAVGSSNVRWAISNAQTWLSASMTNEATCADGVAATGAAASSPVAREVVMAVVRARELTSIALALVYGIPVPP

SEQ ID NO: 1043 - DNA, 372 bp, Sorghum bicolor
atgtggaccccgcggcagaagcagggccacgacgaggactgccagatcctcgccggaaaccccttctcctccaccaccgaggtggccccctcccccaccgccgccagcgacgaaatctcggtcgttgcagagcgaggaaagattgcgtgcagagatttcccacatccgaggtctgcttgtgcaaagcacccatttagtagaacccctcatgaacgctattgtgacaagtgtttctgctatgtttgcgacgttgctgccccatgtgtgtcctggaaggggcatggagggcactgccacgcttcggacagggacaacaagtggaattctttgaggttcttgacgcgaaaggcaatgaatgcaaagcctagttga

SEQ ID NO: 1044 - protein, 123 aa, Sorghum bicolor
MWTPRQKQGHDEDCQILAGNPFSSTTEVAPSPTAASDEISVVAERGKIACRDFPHPRSACAKHPFSRTPHERYCDKCFCYVCDVAAPCVSWKGHGGHCHASDRDNKWNSLRFLTRKAMNAKPS

SEQ ID NO: 1045 - DNA, 99 bp, Sorghum bicolor
atgacgcccctatttggccttccttggaaagaaatgacgctagatcaatcaattgtgaggggtggttacacttgcacaccccaaattgctcccagatga

SEQ ID NO: 1046 - protein, 32 aa, Sorghum bicolor
MTPLFGLPWKEMTLDQSIVRGGYTCTPQIAPR

SEQ ID NO: 1047 - DNA, 738 bp, Sorghum bicolor
atgatactgctccagtccccgtcgaggttcctgctccagatcctgcaagaccgtgttctcagcggcgagaagggcatagacatcgactgtcacactgtagagttcgatgatgtccggtatcatatccagttttctatgaggaatccaaaggtaatggtgttgtcagttgctttgcctctgccacctcctgaagcgattttgtatgatgggcttccacttggtgccattgaagctataaaagcagcttatgggccagttgtgcagattcttgatcctccaaaggatgggtttgatctcacaatgaagataaatttgacaaaacttccacttgatgaagagcaaaggaatgctatcttgacacaaattgcatctattagagaggttgtgctgggtgcaccactgaagctcctgctgaaacatttagcctcgaaggcagttgcgcctaatgttgacaagcttgttgctcttgttcatcggcctaatgaatcttttttccttgctccccaggcagataaagttactattgtgtacccaatgagattccaggactccattgatattgttttagcaacttccttcctgcaggaatttgtggaggcaagacgaacagctgcacttaataatgttccttcttgtatgtggtctccagcaccacctcttgagttaaaaggagtatctgctgatgcactgaatgcaaatgctggctttgttactttcggtaatttacacttttcctag

SEQ ID NO: 1048 - protein, 245 aa, Sorghum bicolor
MILLQSPSRFLLQILQDRVLSGEKGIDIDCHTVEFDDVRYHIQFSMRNPKVMVLSVALPLPPPEAILYDGLPLGAIEAIKAAYGPVVQILDPPKDGFDLTMKINLTKLPLDEEQRNAILTQIASIREVVLGAPLKLLLKHLASKAVAPNVDKLVALVHRPNESFFLAPQADKVTIVYPMRFQDSIDIVLATSFLQEFVEARRTAALNNVPSCMWSPAPPLELKGVSADALNANAGFVTFGNLHFS

SEQ ID NO: 1049 - DNA, 1002 bp, Sorghum bicolor
atggaggagaggtacgaggcgctgaaggagcttggggccggcaacttcggggtggcgaggctggtcagggacaagcggaccaaggagctcgtcgccgtcaagtacatcgagaggggcaagaagattgatgagaatgtgcagagggagatcatcaatcaccagtcgctccggcaccctaacattgtacggttcaaggaggtttgtttaacacccacacatcttgctattgtcatggaatatgctgctggtggagagctatttgagaaaatcaccacagcagggcgattcagtgaagatgagtccaggtatttctttcagcagttgatatcaggggtcagctactgtcactctatggaaatttgtcaccgtgatcttaaacttgagaataccctccttgatgggagtccaacacctcgcgtgaaaatttgtgactttggttactcaaagtctgctttgctgcattccaaaccaaaatcaacagttggaactccagcatacatagcgccggaggttctttccagaaaagagtatgacggaaaggtagcagacgtttggtcctgtggtgtcacactgtacgtgatgctcgtgggatcatatccatttgaagatcctgaggatccaaggaacttccggaaaacgatcagcagaattcttggcgtgcaatactccatcccggattatgtgagagtgtcttcagagtgcaggcgccttctgtctcaaatattcgttgccgatccttcaaagaggatcacgatcccggagataaagcatcacccgtggttcctgaagaacctgccgagggagatctcggagagggagaaggccaactacaaggactcggatgccgccgagccggcgcaggccgtggacgagatcatgcggattgttcaggaggccaagacccccggtgacatgtccaaggtggtcgactcggcgctgctggccgagatggcagagctggagagcgacgacgaagaggcagacgccgatgacgcctactga

SEQ ID NO: 1050 - protein, 333 aa, Sorghum bicolor
MEERYEALKELGAGNFGVARLVRDKRTKELVAVKYIERGKKIDENVQREIINHQSLRHPNIVRFKEVCLTPTHLAIVMEYAAGGELFEKITTAGRFSEDESRYFFQQLISGVSYCHSMEICHRDLKLENTLLDGSPTPRVKICDFGYSKSALLHSKPKSTVGTPAYIAPEVLSRKEYDGKVADVWSCGVTLYVMLVGSYPFEDPEDPRNFRKTISRILGVQYSIPDYVRVSSECRRLLSQIFVADPSKRITIPEIKHHPWFLKNLPREISEREKANYKDSDAAEPAQAVDEIMRIVQEAKTPGDMSKVVDSALLAEMAELESDDEEADADDAY

SEQ ID NO: 1051 - DNA, 1500 bp, Sorghum bicolor
atggcgcctctcgccaccgcgccgcctcctactccccatgccccgcgctctctcgttccacgggtaaggccgcggcgagggctgacggcagtgcgcgcggcctcacagggaagaacaacggatgggtggacgccgggaagctggcgtgcgcgccctgcgcggcagatcccggagtaccccgacacggcggcgctggaggctacagagcgaactctggcggagtttccaccgctagtgttcacgggtgaggtgcggaagctggaggagcggctcggggaggcggccatgggtcgggcattcctcctgcagggcggcgactgcgccgagagctttagggagttcaatgcacagaaaatccgggacaccttccgactcatactgcagatggccgtcgttctcaccttcggcggacagatgcccaccatcaaggtgggaaggatgggtggtcaatttgcgaagccaagatcgaacccaactgagactgttgatggggtaacccttccctcctatagaggggatatcatcaacgatcaggcttttgatgagaaatctcgtgtaccagatcctgaaaggttgattagagcctatacccagtctgcgagcaccctgaatcttctcagagcatttgcccatggaggttttgcggatcttcagagagtcacccagtggaatctcgactttttgaggcacagcacacaaggagacaggtatctggagctttctcagagggttcatgaagccattgggtttatggttgccgctgggctgacccctcaacaccccatcatgaccacagctgagttatggacatcccatgagtcccttcacttaccatacgagcaagcactgactagggaggattccattagtggccggtactatgactgttccgcacacatgctttgggtcggtgagaggactcggcagctggatggtgctcatgttgaattccttcgtggtatttcaaatcctctgggtataaaggtaagtgataagcttgacccatcagagcttgtgaagttgtgtgagactctgaatcctcacaacaagcctgggcgattgacgattatcacaagaatgggggctgagaacatgcgtgttaagcttccacaaatgatcagagcagtgcgccaagctgggatgattgttacttgggttagtgatcctatgcacggaaacactatcagtgcaccatgcggactgaagacaagatcatttgattcaatcatggctgaactcagggctttcttcgatgttcatgggctagagggaagctaccctggaggagttcacctggagatgacggggcagaatgttacagagtgtatcgggggatctaaggcggtgacatttgatgatctcagtgcccgctaccacacacactgtgaccccagactgaacgcgtcgcagtccctcgagctggctttcgccattgctgacaggttaaggaacaagagagacaagacatggcataatttgacatccagagttgttgcttaa

SEQ ID NO: 1052 - protein, 499 aa, Sorghum bicolor
MAPLATAPPPTPHAPRSLVPRVRPRRGLTAVRAASQGRTTDGWTPGSWRARPARQIPEYPDTAALEATERTLAEFPPLVFTGEVRKLEERLGEAAMGRAFLLQGGDCAESFREFNAQKIRDTFRLILQMAVVLTFGGQMPTIKVGRMGGQFAKPRSNPTETVDGVTLPSYRGDIINDQAFDEKSRVPDPERLIRAYTQSASTLNLLRAFAHGGFADLQRVTQWNLDFLRHSTQGDRYLELSQRVHEAIGFMVAAGLTPQHPIMTTAELWTSHESLHLPYEQALTREDSISGRYYDCSAHMLWVGERTRQLDGAHVEFLRGISNPLGIKVSDKLDPSELVKLCETLNPHNKPGRLTIITRMGAENMRVKLPQMIRAVRQAGMIVTWVSDPMHGNTISAPCGLKTRSFDSIMAELRAFFDVHGLEGSYPGGVHLEMTGQNVTECIGGSKAVTFDDLSARYHTHCDPRLNASQSLELAFAIADRLRNKRDKTWHNLTSRVVA

SEQ ID NO: 1053 - DNA, 951 bp, Sorghum bicolor
atgacgcggcggtgctcgcactgcagccacaacgggcacaactcgcggacgtgccccaaccgcggggtcaagatcttcggggtgcgcctcaccgatggctccgccatccgcaagagcgccagcatggggaacctctccctcctctccgcgggatccaccagcggcggcgcgtcccccgccgacgggcccgacctcgccgacggcggcgccgggggatacgcctccgacgacttcgtccagggctcctcctccgccagccgcgagcgcaagaaaggtgttccttggactgaagaagaacaccggaggtttttgctgggattacaaaagcttgggaaaggtgattggcgaggaatttctcgtaatttcgtggtctcaagaacacctactcaagtagcaagtcatgctcaaaaatattttatacgtcaatcaaatatgagcagaaggaagagaaggtctagcctttttgacatggtgcctgatgagtccatggaccttccaccccttcctggaagtcaagaaccagagacctcagtgttaaatcaagcaccactgccgcctcctgtggaggaggaggtggaatcaatggagtcagatacttctgctgttgcagagagttctacggcttctgctctcatgcccgagagtttacaacctaattatccgatgattgttccagcttatttctcaccgttcttgcaattctcagttcctttctggccaaatcaggaagatggaggcgatctgccccaagaaacacacgagattgtcaagcctgtggcagttcattccaagaatccaattaatgttgatgaacttgtgggcatgtcaaagctaagcataggggagcctggtcaggagacagtttctacttctctgtcgctaaatctgctagggggtcaaaataggcagtcggctttccatgcaaatcctcaaacgagagctcaagcctga

SEQ ID NO: 1054 - protein, 316 aa, Sorghum bicolor
MTRRCSHCSHNGHNSRTCPNRGVKIFGVRLTDGSAIRKSASMGNLSLLSAGSTSGGASPADGPDLADGGAGGYASDDFVQGSSSASRERKKGVPWTEEEHRRFLLGLQKLGKGDWRGISRNFVVSRTPTQVASHAQKYFIRQSNMSRRKRRSSLFDMVPDESMDLPPLPGSQEPETSVLNQAPLPPPVEEEVESMESDTSAVAESSTASALMPESLQPNYPMIVPAYFSPFLQFSVPFWPNQEDGGDLPQETHEIVKPVAVHSKNPINVDELVGMSKLSIGEPGQETVSTSLSLNLLGGQNRQSAFHANPQTRAQA

SEQ ID NO: 1055 - DNA, 807 bp, Sorghum bicolor
atggcatcctccttctccaaggtggtcgcagcacttattggtgcgctcatcttctccctccttgtcacgtatggctcgtgcgctacaccggccaacttcaccgcctccgacttcaccgccgatcccaactgggaggctgccagagccacctggtacggtgcgcccaccggcgccggccctgacgacaatggtggcgcctgcgggttcaagaacgtgaacctgccgccgttctccgcgatgacgtcgtgcggcaatcagcccctgttcaaagatggaaagggatgtggctcctgctaccagatacggtgccagaaacaccctgcctgctccggcaaccccgagacggtgatcatcactgacatgaactactaccccgtgtccaagtatcacttcgacctcagcggcacggcgttcggcgccatggccaagcccggccgcaacaacgagctccgccacgccggcatcatcgacatccagttcaagagagtgccctgcaactacccggggcagaaggtgacgttccacgtggaggagggctcgaacccggtctacttcgcggtgctcgtcgagttcgaagacggcgacggcgacgtggtgcaggtggacatcatggaggccaactccggctactggacgccgatgcgcgagtcctggggatccatctggaggctggacgccaaccataggctgcaggcgcccttctcgctgcgcatcacaaacgagtccggcaggaagctggtggccaaccgggtcatcccagccaactgggcgcccaacaactattaccgctccatcattcagtattag

SEQ ID NO: 1056 - protein, 268 aa, Sorghum bicolor
MASSFSKVVAALIGALIFSLLVTYGSCATPANFTASDFTADPNWEAARATWYGAPTGAGPDDNGGACGFKNVNLPPFSAMTSCGNQPLFKDGKGCGSCYQIRCQKHPACSGNPETVIITDMNYYPVSKYHFDLSGTAFGAMAKPGRNNELRHAGIIDIQFKRVPCNYPGQKVTFHVEEGSNPVYFAVLVEFEDGDGDVVQVDIMEANSGYWTPMRESWGSIWRLDANHRLQAPFSLRITNESGRKLVANRVIPANWAPNNYYRSIIQY

SEQ ID NO: 1057 - DNA, 234 bp, Sorghum bicolor
atgaagcttcttggtcttgggcagcatgaagacatagaaactgatgatcatccagatgcctggacagaggcacaggtcctggctctagtccaagctttgaaggcttttcccaaggatgcgagccaaagatgggagcgtgtggctgctgctgtcccaggtaaaactgtagtccagtgcaagaaaaaggttgcagcaatgagagagaatttccggagcaagaaaactggggagtag

SEQ ID NO: 1058 - protein, 77 aa, Sorghum bicolor
MKLLGLGQHEDIETDDHPDAWTEAQVLALVQALKAFPKDASQRWERVAAAVPGKTVVQCKKKVAAMRENFRSKKTGE

SEQ ID NO: 1059 - DNA, 570 bp, Sorghum bicolor
atgccatatatttctttattacacatcctacaccactacattgaaagtagtgatcataaggcacaaattatgctcttaagctacctctttgacttccctttccttggagatgacagcactatcactgtggatgacaaccatgtcaatccactatacaagcatgttttcccaccggaagtggcacctcaactgtccttcattggattgccattgaaggctattccttttccactagttgaactccaaagtaagtgggttgctggagttctatctggatggatcaagcttccatctaaagaagaaatgatggaagatgtgaaagctttttattcaaaactggaagcacgtggatggcctaagagatacacacataacttatcacattgtcagtttgagtatgatgattggcttgctgagcaatgtggccatccaccgatcgaagaatggaggaagcagatgttcactattaatttaaagaacaagatagctcgtcctgagagttttcgtgatgagtgggatgactatcatctagtggccgaagcaaatgaagatttcaagaaattcttgtaa

SEQ ID NO: 1060 - protein, 189 aa, Sorghum bicolor
MPYISLLHILHHYIESSDHKAQIMLLSYLFDFPFLGDDSTITVDDNHVNPLYKHVFPPEVAPQLSFIGLPLKAIPFPLVELQSKWVAGVLSGWIKLPSKEEMMEDVKAFYSKLEARGWPKRYTHNLSHCQFEYDDWLAEQCGHPPIEEWRKQMFTINLKNKIARPESFRDEWDDYHLVAEANEDFKKFL

SEQ ID NO: 1061 - DNA, 702 bp, Sorghum bicolor
atgcgctttcaatcaggccagaaatcttctggtaaattttgtttgttttcaaaagtccaatctgccagcccaccaccagggaatacgctggtttatctgaatgtgtatgatttgacaccagtaaacggctatgtttactgggctggtctaggggtatttcattctggcattgaagttcatggtgtggagtatgcatttggagcacatgactattcgattagtggagtttttgaggtggaacctcggcagtgtcctggtttcaaatttaggagatcaatatgcatgggaactacctgcctggatcctctccaaatcagagagttcatggagattcagtcagtaaattacaatggggatacctaccatttgataagtaaaaactgcaaccatttctgtgaggatatctgcaaaaggttgacaggaaatttgattccaaaatgggttaatcgacttgctagaatgggtgctgtttgcaactgcattctaccagtgcccctgaagatcagtgcagcccgtcatgacccaggttgtcaagctgaagatagtgagagaaaaatgctgacaggttccttcagttgcttctcttcaatctctctatgccaaagacatttctcaacatcttcgctctccctacgttcccccacgaaaggcacttcttgggatgccaaacagtcaaattctacccgattgaagaagagctga

SEQ ID NO: 1062 - protein, 233 aa, Sorghum bicolor
MRFQSGQKSSGKFCLFSKVQSASPPPGNTLVYLNVYDLTPVNGYVYWAGLGVFHSGIEVHGVEYAFGAHDYSISGVFEVEPRQCPGFKFRRSICMGTTCLDPLQIREFMEIQSVNYNGDTYHLISKNCNHFCEDICKRLTGNLIPKWVNRLARMGAVCNCILPVPLKISAARHDPGCQAEDSERKMLTGSFSCFSSISLCQRHFSTSSLSLRSPTKGTSWDAKQSNSTRLKKS

SEQ ID NO: 1063 - DNA, 2535 bp, Sorghum bicolor
atgcctgcttctgcttgcacaaatcttaattttggttgtcttagaagatctacaaggttcaagaatattcacacaatttatgatgaagattctgacagggatcctgctacctttaagaggatcaaaactgaagtcattgattctgaactaagtgttggttctgtcagtgacaaggatagtgaacaagattgtcatgatgtatctctcaaggatctcagaactcagtgtaaagctaagaatcggaagacttcaaaaatcacactggaaggatgtggcattaagaatcaggctaaaacagaagatgacattgatcttgataagcctcttattgcattgaaacagaagagaccaaaaacatctcctgctaaagcaaatataaagatggatgcactaagatcttctccatttgctgcgaaagaggaagatacaacatcacagagtgatgagattcttagttctgcacagagctccctgctcaaagcaacaatgcaagacccagtattagagaagcttggaaggagagttgcagaactggagcagtctaaagttgttattgattgtactgaagaaatagttggggagcaaatgtgttgtgctgaagtgaacaatacagctggagctctagcgtgctgtgcaaaacctgatgtactttgtgaaataaaaactgaagatacaaattactctgaatttggaacttctatttgttccataaagaatcctgagcattcatcctttgagctgatggagggtgatgactctgtgcctcaatcttgtttcatgacccaaccagctcaattagctgatgtttctgatcattcctgcgaagaaacctgcaatttcaaagaaaacaattttgatgacattacagctgcaaaggcaactgaggttgtttcttcattggatctcattgatgaagtgagcaatcatcagaaaacatctgaaaatataactaatccagatatggataagtcttctactgcaaatggacttaaggcttgttctttcagtcagtcctgccatgatcttatagataatgatgaggactggaatttatttgttcatgggaatgaacctgtaaagattttggaagagttgtctcctatcgatgactctagcacaaatactcaatctgatttatgtggaagcacagaaatgaactgcacttcacttgagggggttgcgcggatgcaggctgagggccaattggattcaatagtctgctgtggtgtaagaccaaagcatatgttactagatatggaaattggagatgccactggtacattcacctttgacaagactattgacttggctcatcctgccaattttgttgcacaggatggaaggctagaaagtatagtatatgatgttttgaataataatgcacaaaggatggcctctaaaaataaatcttctgttggactcccagatacaactgtgattcagagctcacttatcgacttcactgacaactgtcctgaagacaaaaaggcttcagatgataaaatttcacctcccaataatgtggactggccttataagttaaattctacagtagactatgacatttgtagatctattaataatgatgagggatcagaagaattagtgcctcaagatcagttataccagtcgtgtagtgataagttcaaccttagcagtgtcatgccagagatctctaatgctgaagaatcaaaaaagttatctgctggagatcaaaattcttctgctatctctctggaaactgatgtgcaaatccaaaagccagaattttttgtggatgaagaatcaattgaagaacatgctccaaaagtattactgtccaagagaaagattatgtcaccgatgtctcaggagaagctttgtagtgctctgactggtattgatttgtgtgatggagtccaaagatcgaagagcaaaatcattattgaagatcgtggcaaaactccaatatcattgcctcagccagcacacatgcaagacagatcaatgttccgcacagacaggagacttaagggcaggacttctgtctctcctacaagcaaaggagttctgaagtcaacaggatccccaccccatcaacagataacttgttcttgcatgagaagttcaccagtggtcttagacactgagaaagctgttgagttttcacaaaggcagatgcatgatatggaaaatatagctgcaaagcttatcaggagcttgaagcacatgaaaagtatagtggacgaaagtttgtcaacagaagcatattctttacttcctaactttaacattgccgagatcagagcagcctctgaggatgcattagaagtggagaggactacgaggaaatggctgtcgataatgaacaaagactgcagtcgcttttgtaaaatattgagcctagcaaagaagaatgatgtttcacatcctgaagcaccaaggaaacaaagaaaaataacgtttgcagatgaagctggaggaatgctctgccatgttaaggtttttaaggatggacaagcctctcttctttccgaatgccagagtgatttatag

SEQ ID NO: 1064 - protein, 844 aa, Sorghum bicolor
MPASACTNLNFGCLRRSTRFKNIHTIYDEDSDRDPATFKRIKTEVIDSELSVGSVSDKDSEQDCHDVSLKDLRTQCKAKNRKTSKITLEGCGIKNQAKTEDDIDLDKPLIALKQKRPKTSPAKANIKMDALRSSPFAAKEEDTTSQSDEILSSAQSSLLKATMQDPVLEKLGRRVAELEQSKVVIDCTEEIVGEQMCCAEVNNTAGALACCAKPDVLCEIKTEDTNYSEFGTSICSIKNPEHSSFELMEGDDSVPQSCFMTQPAQLADVSDHSCEETCNFKENNFDDITAAKATEVVSSLDLIDEVSNHQKTSENITNPDMDKSSTANGLKACSFSQSCHDLIDNDEDWNLFVHGNEPVKILEELSPIDDSSTNTQSDLCGSTEMNCTSLEGVARMQAEGQLDSIVCCGVRPKHMLLDMEIGDATGTFTFDKTIDLAHPANFVAQDGRLESIVYDVLNNNAQRMASKNKSSVGLPDTTVIQSSLIDFTDNCPEDKKASDDKISPPNNVDWPYKLNSTVDYDICRSINNDEGSEELVPQDQLYQSCSDKFNLSSVMPEISNAEESKKLSAGDQNSSAISLETDVQIQKPEFFVDEESIEEHAPKVLLSKRKIMSPMSQEKLCSALTGIDLCDGVQRSKSKIIIEDRGKTPISLPQPAHMQDRSMFRTDRRLKGRTSVSPTSKGVLKSTGSPPHQQITCSCMRSSPVVLDTEKAVEFSQRQMHDMENIAAKLIRSLKHMKSIVDESLSTEAYSLLPNFNIAEIRAASEDALEVERTTRKWLSIMNKDCSRFCKILSLAKKNDVSHPEAPRKQRKITFADEAGGMLCHVKVFKDGQASLLSECQSDL

SEQ ID NO: 1065 - DNA, 1986 bp, Sorghum bicolor
atggacgaagctgcagattcctccgaactgcttcgtcgcgtcgaggagctccagcgcgagatggatgaaaaagtagatcttgttgaagtgttaactcgtcaagttgaagacctccagcgagagcgtgatgccctcagaaaagatattgagcaattatgtatgcaacaagccgggcctggttatgtttctgttgcaactcgaatgcttactcagaggacaacagctttggaacaggatattgagaacctccagaaaaaattaggcggttgcttaagagagaatcaaaatttgcaagaggagcttgctgaagcttatcgaattaagagccaacttgctgagttacatggtgctgcactatctaagaataaggatctagaaaagcaagtaagatttttccagagcagtgttgctcaagcgtttgctgaacgggacagttcattaatggagtgtgagaaagcaaaagagcgggaggaagcagtgtcaagaaaatttgctgattttgaggaaaggatgagagagtatcaatcagcgattgatgaacagaaatacataaatgatgacttgcagagggaactgacagaactgaaggcgcatacagaattgtccttgaaagttattctaaaattctatgaccttcgttgcagagactctgaatgttcttcaagtgttacttttgaagagaagtgttcaatccttctagatgattctgctgacaattggagtttttgctctgatggcggaaccgcaactttgaagtacattgcgtctttagaagaggagaaagagtcacttaaagctaaaatatcaaagctgcaaaacaacttaaggatgggacttgagattgaacagcatttgcaaagaaatgcacgaatattagagaaaagacaggcactgtatgatggatttctgagaaacggattgtcagaacttcaaaagttctacacatatcaaaaggctgaaattatgaaaatattggaagaagaatcgttgcagttgagcaaagttgttgcggagattcaggataagctaactgaaatgtgcatcaacactgaagttaatgaacaccctgccgatgagactcaatgttgcgacagcagttgtaaagatgtgcatgttactacagatatcagtcctagcacatgcccaaagagtgattctcctgctgatcctaactccatgtcgtttgatgaatctaaagcacttgcacaagccttacaggagaagatggaagcacttatgctcttctcacaggaacaagaaagatacctattagaaaaacagagagacctgattgttattgaagaactccagaagaacttatctcaagttaaagatgaaaaggtgaaggtcctgatggaattagcaaaactgaaagaacaatatttgctattgaagggcagttctgctgtgaaggaaggtcatgatactggtgattcatctaaagtcattcctgggcatgaccaacaagggatgctgaagactatgctgaagaggacatctttaagacactggatgagaaaagaaagtagtactattggacatgggagctctgatggaaatgatcatacagtttgcaaagagcattcagtggatgttgcaaggttaagagttgaaaattctacgcttcttgaaggtgttggtactgttgagcgtctcacttcttcagtgcatagactgcatattgtgcttttgaaggcttatgatgatatcaagtcagctgattctttggagagtaccttcgaagcgctcaacagtcttataactgaagcaaacgttatgaagacagctcttaatgtggttcttccagtaagctggtctggggattcatcagatgcaattacatatgaagctctgtgcgaaccatctgattcacctaaatcaaagtctggtaaagtagacccgctctcttctgcaggcatggagatggtggagctactaatattggctgctgagattctcaaggagagctttctggtgaagaaataa

SEQ ID NO: 1066 - protein, 661 aa, Sorghum bicolor
MDEAADSSELLRRVEELQREMDEKVDLVEVLTRQVEDLQRERDALRKDIEQLCMQQAGPGYVSVATRMLTQRTTALEQDIENLQKKLGGCLRENQNLQEELAEAYRIKSQLAELHGAALSKNKDLEKQVRFFQSSVAQAFAERDSSLMECEKAKEREEAVSRKFADFEERMREYQSAIDEQKYINDDLQRELTELKAHTELSLKVILKFYDLRCRDSECSSSVTFEEKCSILLDDSADNWSFCSDGGTATLKYIASLEEEKESLKAKISKLQNNLRMGLEIEQHLQRNARILEKRQALYDGFLRNGLSELQKFYTYQKAEIMKILEEESLQLSKVVAEIQDKLTEMCINTEVNEHPADETQCCDSSCKDVHVTTDISPSTCPKSDSPADPNSMSFDESKALAQALQEKMEALMLFSQEQERYLLEKQRDLIVIEELQKNLSQVKDEKVKVLMELAKLKEQYLLLKGSSAVKEGHDTGDSSKVIPGHDQQGMLKTMLKRTSLRHWMRKESSTIGHGSSDGNDHTVCKEHSVDVARLRVENSTLLEGVGTVERLTSSVHRLHIVLLKAYDDIKSADSLESTFEALNSLITEANVMKTALNVVLPVSWSGDSSDAITYEALCEPSDSPKSKSGKVDPLSSAGMEMVELLILAAEILKESFLVKK

SEQ ID NO: 1067 - DNA, 624 bp, Sorghum bicolor
atggccatcacccacgacgactacgtctccctttgcctcatggcgctcgcggccgcgggaggcggaggccaagctgcaggtttaacgacgcagtacgctctgacgaacacggctgcctgctggacggcgacggcgcaagagtccgagctccgcttccggtgctccgtctgtggcaaggccttcgcgtcgcaccaggcgctgggcgggcacaaggccagccaccggaaaccgacgcctgtactacaggcacaagcgtcgtcgtcgtcagccggaggtgcggcggcgtcgtcgtcggggataacgacctcggccggcggcagcagcgggcaggggaggcacaggtgcacggtgtgccatcggagcttcgcgacggggcaggcgctcggcgggcacaagaggtgccattactgggacgggctctcggtgtcgctcaccgcgtcgtctgcgccatcgggttccgggtcgaccgtgaagggatttgatctgaatttggtgccggcgccggcggcgacggcggccaacgcggcgacaaggtggagagaggaggaagaggtgcagagccccttgccggtcaagaagaggcggctgtccggtccgtccctggaccttagtttaacgatctag

SEQ ID NO: 1068 - protein, 207 aa, Sorghum bicolor
MAITHDDYVSLCLMALAAAGGGGQAAGLTTQYALTNTAACWTATAQESELRFRCSVCGKAFASHQALGGHKASHRKPTPVLQAQASSSSAGGAAASSSGITTSAGGSSGQGRHRCTVCHRSFATGQALGGHKRCHYWDGLSVSLTASSAPSGSGSTVKGFDLNLVPAPAATAANAATRWREEEEVQSPLPVKKRRLSGPSLDLSLTI

SEQ ID NO: 1069 - DNA, 225 bp, Sorghum bicolor
atgggccctctaggcgtcaggaggccactcctatgtgtgcgcctttacatctgggcgtcacggttcggccaacacttttgcgcaggaccagtgtgtatgctgtgtgcgttaagggacgagctatggtgccatgggcccgtggtgctctccgcggtagtggtcgccgacgtacacgggttcaaggagatgcctgcggttgggtgccaggcgaactgcttcacatag

SEQ ID NO: 1070 - protein, 74 aa, Sorghum bicolor
MGPLGVRRPLLCVRLYIWASRFGQHFCAGPVCMLCALRDELWCHGPVVLSAVVVADVHGFKEMPAVGCQANCFT

SEQ ID NO: 1071 - DNA, 2556 bp, Sorghum bicolor
atggggaagaggagcggcagcaagaggaaggacaagaacaaggtcattctcccgccggagctgccgccggaaatcgacgacgatgaggtggatctcagcgacgaggacatcgcgttctatggtaccgacagcagcaacgtagctcacttccgccacttcgacaagaagtccatcgacaggtatgtcgggagggtcgcaggacgcgacgagggcgaggtcgagcgcctctacgaggagcgccagaagaggaaggccacagagtcctcggggagaccccgcgaggatgatgacgagttggaggtcgaccccgtcgacgcactccccaccaagacgctgcaaggggagctcgtctacaatagagcaaagaaagcaaggtctgaagacaataccggcagtgttaagactaaagctcaagagaatggtgcagatgccaagaaaattattaagaaagatgaaccaaagggaaaatctaaaaacaaaaagggagatgataataaagtgaaaaatattcaatctcaaactgaagttccaaagggacaactacactcaaatgtcctggaggaagtgaaggaggaactttcagctgaggaattattcgaaaaaaagaaggctcaacttgctgagttggggatggctatgcttgaagatcctgagtcaaacattagatctctgaatgatatgctaagtataagcaatgacaaagaccaaaaggttgttaaacttggtctgatgtccttgcttgctgtgtttaaggacattattccaagttatcggattaggcagctgacagaaaaggagctagcagtagaagtttcaaaagaagtgaagaagacaagatattatgagtacacacttattcgctgctacaaggcatacctacagaaactggtatcgttggagaagcagccccagttttatactgtggctgttcgttgcatgtgtgctttattagatactgccccacattttaacttccgtgaaaacctattggctagtgtggtaaaaaatttaagctcctcagacgatgtagcaaggaaaatgtgttgtgaagcaataagatcattatttataaatgaaggaaaacatcgtggtgaggcaacaatagaagcagttaggttgattgcagatcatgtgaagctcaatgattgccagctccatcctgatagcattgatgtcttcctgtctttgagatttgatgaagatattggaaaagatgagactgaggaggaaaaggtgaaaccaaagaagaataaacgttggcaaaaaagtcaggaggttccgaagcaattgccagttaatgataagaagaaaaccagacaggaattgatctcaaaagctagagaggaggttgatgcagatcttagagcagtttccttcagtcttgatccgaaagagagaaaaaggatacaaaaagaaacactttctgctctgtttgaaacttattttcgcattctgaaacatagtgtgaccacttcaaattcaaggaccaaggtgaataatgtctcccctagtggcttgcacccactgctcactccatgcttggcgggcttaggaaaattttcacatttaattgatgtagatttcatgggtgaacttatatcttgcctcaagaagctttctgggtatagcgaccgacaagatgaaattcccaatgataatgcactgtctgtctcagaacgtctgcagtgctgcatagttgcgtttaaagtctggaggagcaaccttgaggcattgaatgtggatctacaggatttcttcgtgcagctttataacctcatactggagtatcggcctgacagggatcacggcgaggtattggctgatgctctgaagacacttctttgggaaggcaaacagcaggatatgctaagagctgctgctttcattaaacgtttggccacgtttgccctctcatttggctctgcagaagcgatagcagcattggtcacactgaagcatctcctccaaaaaaatagcaagtgtcgcaatatgctggaaaatgattctggtggcggttctctgtcttgcttagttgcgaaatacaaccccgaagctacagatccatatctgagtggtgcactcgcttcagtcctttgggagctcagcctcttagagaagcattatgatatctctgtatcctcaatggcttcgaatatcttgagtatggcaaatttgaatcccacgcagaaccccgttccaatcttgaatgtgaaccctcttgaagcatacagagacctgtcaatggaaagggaactattaaaaccagctagcaaatcattgccactaaatctcaaaaagaaacgacgtggcaaggagtttgttgcgctaagcccagatgtacttaagaaggcagattgctcagtggataaacatgagctcgaagagaagttgcagagccatttcgctgtgctaagaagcatctcggagaatgagaggttgaggggcgagctgaaccacacattgtcatccataaacatgtacaaggagtacaagaagcagcagaaaaagaaaaacatgaaatttaagaccgggaggaaaaaggtagcaaaggtttag

SEQ ID NO: 1072 - protein, 851 aa, Sorghum bicolor
MGKRSGSKRKDKNKVILPPELPPEIDDDEVDLSDEDIAFYGTDSSNVAHFRHFDKKSIDRYVGRVAGRDEGEVERLYEERQKRKATESSGRPREDDDELEVDPVDALPTKTLQGELVYNRAKKARSEDNTGSVKTKAQENGADAKKIIKKDEPKGKSKNKKGDDNKVKNIQSQTEVPKGQLHSNVLEEVKEELSAEELFEKKKAQLAELGMAMLEDPESNIRSLNDMLSISNDKDQKVVKLGLMSLLAVFKDIIPSYRIRQLTEKELAVEVSKEVKKTRYYEYTLIRCYKAYLQKLVSLEKQPQFYTVAVRCMCALLDTAPHFNFRENLLASVVKNLSSSDDVARKMCCEAIRSLFINEGKHRGEATIEAVRLIADHVKLNDCQLHPDSIDVFLSLRFDEDIGKDETEEEKVKPKKNKRWQKSQEVPKQLPVNDKKKTRQELISKAREEVDADLRAVSFSLDPKERKRIQKETLSALFETYFRILKHSVTTSNSRTKVNNVSPSGLHPLLTPCLAGLGKFSHLIDVDFMGELISCLKKLSGYSDRQDEIPNDNALSVSERLQCCIVAFKVWRSNLEALNVDLQDFFVQLYNLILEYRPDRDHGEVLADALKTLLWEGKQQDMLRAAAFIKRLATFALSFGSAEAIAALVTLKHLLQKNSKCRNMLENDSGGGSLSCLVAKYNPEATDPYLSGALASVLWELSLLEKHYDISVSSMASNILSMANLNPTQNPVPILNVNPLEAYRDLSMERELLKPASKSLPLNLKKKRRGKEFVALSPDVLKKADCSVDKHELEEKLQSHFAVLRSISENERLRGELNHTLSSINMYKEYKKQQKKKNMKFKTGRKKVAKV

SEQ ID NO: 1073 - DNA, 678 bp, Sorghum bicolor
atggcggtagttttgtcaaatgtcaactccaaggccggcctccaaaagcttaatgaccaccttctcacccgcagttacatgactgcgtaccaagcttcaaaggatgacatggctgtcttccctgcactttcatcttctcccccatcaagctatgtcaatgttacgaggtggtatgatcatatcagtgctctcctaaggtcctgtggaatcacagcagagggtaatggtgtcagggttgaggcaacttgttctgtgtcttcagctcctggagttgctgaacaaaaggcaccggcggttgatgaagatgatgatgttgacctatttggtaaggagaccgaagaagagcatgcagcaacggatgcacgtgcagcagctgttaaggcttccggcaagaagaaagagtctgggaagtcgtcaattcttctggatgtcaagccatgggacgatgaaactgaaatgcaaaagctagaggaagctgttagaagtgtgaagatggagggactgctctggggtgcatcaaaacttgttccagttggatatggcatcaagaagatgcaaattatgatgaccattgtggatgaccttgtttctgtcgacagtctgatagaggatcatctctgcactgaacctgccaatgagtacatccaaagctgtgacattgtagccttcaacaaaatc

SEQ ID NO: 1074 - protein, 226 aa, Sorghum bicolor
MAVVLSNVNSKAGLQKLNDHLLTRSYMTAYQASKDDMAVFPALSSSPPSSYVNVTRWYDHISALLRSCGITAEGNGVRVEATCSVSSAPGVAEQKAPAVDEDDDVDLFGKETEEEHAATDARAAAVKASGKKKESGKSSILLDVKPWDDETEMQKLEEAVRSVKMEGLLWGASKLVPVGYGIKKMQIMMTIVDDLVSVDSLIEDHLCTEPANEYIQSCDIVAFNKI

SEQ ID NO: 1075 - DNA, 2073 bp, Sorghum bicolor
atgccggcgacggcggaggactccccggcgatacggaagctggggcagctcttccggctgaccgaagtatacctctgggacgattcgtatggcgctggacctcacgatggacggaagaactggcgctcggcggaggctgctctcgtggactctcatacagataaaacatgcaatgaagcatccaatggcactgacaaaggccatttgtttgttgaagatttggaattggccaacctcatgggttctttggggcttcctgtttcattcagcacaagtaaagtgaacaagaacacaggcaacaagggaaagaaaaaaggaagacaagcactgctcaaagcagcaaagactcaaatcaatgatgctgtgaggatatgtgccaatactgaagatagagaaagtgctgttgaatcattggatgttatggcgcacatgcactcatgcaatttatctgggactccgctgggtcacaatgaaccctgccatgatgacactgacaagatgcttagggaagacagtccttgtgttgaagaacaagaagagtctggctgtagcaccatctattcttctgacaaagcccctagctgtgatgctaaaaatctgctcactgaacttgggacttttgagctttctgataacttgggcaacccagcaaaagaagattattcaattcaagaaaatcaagcctctgacagcgtgttgctagattctgaagagatgccaaggcatgactgtgttgatggtgaatctacacattcatgtgtcgacatttatcaggaagaaagagtgtccacaagggaagatcaaacatctgaagaaactctgtcagtatcccatgatcataatgatgttggccaagaagctagtctaagtttggcagagccatcttctattgatgagcatgcacaaagttctgccaacaacttttactatgactatggtgaatggagggttgtctgggatccgttctatagtcggtattatttttacaacatccagacacaagagtccacatggtgtcctcctgaaggattggaggattttgcatcatattgtagcccagataccactaaagagctagttgaactgggatctcagtgtacaagcatagcaccgcaagagaacaatctggctactgatgacaatcatttagaagcacaggaacaagatcactgcattcatgatttatctgacattcctgtcgaaaaagcaatatatcaaagtatgataactacctctgacaaagcacagcacactgaaaataagtacagcgattcaacaactattgtgttagagatgaaccaggaagttactaccaccaaaaagaaaaagagagttgcacttttacataatagtttcttggtttctttgagcaaatgcaactttgcatggctgctacgtattgcctacttatgtctagatcattcatgccaagacatggcagggaacatctccaatgacatcatcaagtactggactcagcggtactcacttttctcactttttgatagaggtataaagatggatgaagaagggtggttttcagttacgccagagcctattgcaaagcatcatgcatctcgtgttggtgcgggagtaatcattgattgtttcacaggagttggtggaaatgccatccagtttgccacaaagtgcaagcatgtaattgcagttgatattgatccacaaaagattgattgtgcacatcataatgcatccatttatggagtaaatgatcacatagatttcattgtaggtgattttatacatatagctcctcatctgaagggagaaactgctttcatgtcgcctccttggggtggacctgactatgccaaagttgatgtttatgatatgaaaagcatgcttttgccttgtgatgggtactctcttttcaaacttggtactatgatagcttcaagagtagtgatgtttcttcctcgcaacattgatctaaaccaattggctgacatgtccttgtctgtggaccccccatggtcggttgaggtcgagaagaacttcctcaacggaaagctgaaagccataacagcatactttgaagaacaggattgttga

SEQ ID NO: 1076 - protein, 690 aa, Sorghum bicolor
MPATAEDSPAIRKLGQLFRLTEVYLWDDSYGAGPHDGRKNWRSAEAALVDSHTDKTCNEASNGTDKGHLFVEDLELANLMGSLGLPVSFSTSKVNKNTGNKGKKKGRQALLKAAKTQINDAVRICANTEDRESAVESLDVMAHMHSCNLSGTPLGHNEPCHDDTDKMLREDSPCVEEQEESGCSTIYSSDKAPSCDAKNLLTELGTFELSDNLGNPAKEDYSIQENQASDSVLLDSEEMPRHDCVDGESTHSCVDIYQEERVSTREDQTSEETLSVSHDHNDVGQEASLSLAEPSSIDEHAQSSANNFYYDYGEWRVVWDPFYSRYYFYNIQTQESTWCPPEGLEDFASYCSPDTTKELVELGSQCTSIAPQENNLATDDNHLEAQEQDHCIHDLSDIPVEKAIYQSMITTSDKAQHTENKYSDSTTIVLEMNQEVTTTKKKKRVALLHNSFLVSLSKCNFAWLLRIAYLCLDHSCQDMAGNISNDIIKYWTQRYSLFSLFDRGIKMDEEGWFSVTPEPIAKHHASRVGAGVIIDCFTGVGGNAIQFATKCKHVIAVDIDPQKIDCAHHNASIYGVNDHIDFIVGDFIHIAPHLKGETAFMSPPWGGPDYAKVDVYDMKSMLLPCDGYSLFKLGTMIASRVVMFLPRNIDLNQLADMSLSVDPPWSVEVEKNFLNGKLKAITAYFEEQDC

SEQ ID NO: 1077 - DNA, 285 bp, Sorghum bicolor
atggggaagggtacgggcagcttcggcaagcgccggaacaagacgcacacgctctgcatccgctgcggccgccgtagcttccacctccagaagagcacctgctcctcctgcggctaccccgccgctcgcatccgcaagtataactggagtattaaggccatcaggcgcaagacaactggtactggaaggatgaggtacatgcgacacgtgcctcgccgtttcaagagcaacttcagagaagggactgaggctgccccaaagaagagtgctgctgctgccaactaa

SEQ ID NO: 1078 - protein, 94 aa, Sorghum bicolor
MGKGTGSFGKRRNKTHTLCIRCGRRSFHLQKSTCSSCGYPAARIRKYNWSIKAIRRKTTGTGRMRYMRHVPRRFKSNFREGTEAAPKKSAAAAN

SEQ ID NO: 1079 - DNA, 216 bp, Sorghum bicolor
agtactcctagaagatacctgctagcagtgcagtcgtcagctagcactgcttcggccacaaaagcagggatgatggagggcacaatcactcccgcagaaggtggtgttcccggagcgacagaggacgttcggcctaccaacccaagccacagccccggcatcggccatgcattcacccacagcaggattgggaggaagctgcttactactcaatga

SEQ ID NO: 1080 - protein, 71 aa, Sorghum bicolor
STPRRYLLAVQSSASTASATKAGMMEGTITPAEGGVPGATEDVRPTNPSHSPGIGHAFTHSRIGRKLLTTQ

SEQ ID NO: 1081 - DNA, 1338 bp, Sorghum bicolor
atgggggacaaggttaatccctggtgccattggcataatcctccatggaaattcaacactgaaggttctggcggcaatctccgcccacctgatgttgggcttgttaacaccaattcggtggcattgcctgcatatctgaacacagttgctgcacctgtgccatttttcacagcatcaattgctgagagacctctttcaatagctccaagatatgccacaacattggcaccaagtttggagttgcctgcactgtatccctcacgtaagagacctctagttttctaccagaaggaaaaccatgctcctagtgcagctcctttgctgagcaaagggccactggatcctgtgccagagctccaaggtagcaacgagactaatgtaactgatgttggagcagaagaaactgagggtattcatgagaactcagatgagatcaatgcactcctggactctgactcagatgaagggtatgaaaaactgcaagaactcgacagagtcagaaggcaatctgctgcagagaatgacaccctgagcgttgagtcagtgggcagtgctggtgctgccgcaggttctgcaccaccagccaagaagagaagactcagctcctgtactgacaagtctgttgttgacactgccagttcagcaaggcctgatcattccatcgagcagaagcttcttgtgaacgactgtgatgcgcagtcatgctgcgtcggtgaagtggaaagtgaccacaagttttctctgggggaggtagaagcagcagaaggtgacagccccgatgatcagaagcgaagaagagagaggatccaagagactgttgctgcgctcaggaatattgtccctgggggcattgccaaagacgccactgctgttcttgatgaagcaatctgttacttgcagtatctgaagctgaaggttgggaaccaccgcctggggtctgccggccgggaacggagggattccgagtgcgggtgtgggcagcggcagcagcagcaccgggcggcacgcgtggggggacggagcgtgcagcgaccgtcgcggcggaatgagtgtcgtggcaggcgggggcgcctgcttttcttcggtttggttcggtgcgccgagggagagaggtgggggccaaagcggagggagggtaggaggagcacgggagaggcatgcatcatcgcattcgcatgcgatggaacggagggcgggcgggccgcggatcccgcccgcccgcccgcccgccttggcaatgttggcatcatcgcatgcgatggctcgtcgctcgctcgtgcgccctcatctgacatcggggatgtagctttcagcgtgcatgcgacggccgcaccatga

SEQ ID NO: 1082 - protein, 445 aa, Sorghum bicolor
MGDKVNPWCHWHNPPWKFNTEGSGGNLRPPDVGLVNTNSVALPAYLNTVAAPVPFFTASIAERPLSIAPRYATTLAPSLELPALYPSRKRPLVFYQKENHAPSAAPLLSKGPLDPVPELQGSNETNVTDVGAEETEGIHENSDEINALLDSDSDEGYEKLQELDRVRRQSAAENDTLSVESVGSAGAAAGSAPPAKKRRLSSCTDKSVVDTASSARPDHSIEQKLLVNDCDAQSCCVGEVESDHKFSLGEVEAAEGDSPDDQKRRRERIQETVAALRNIVPGGIAKDATAVLDEAICYLQYLKLKVGNHRLGSAGRERRDSECGCGQRQQQHRAARVGGRSVQRPSRRNECRGRRGRLLFFGLVRCAEGERWGPKRREGRRSTGEACIIAFACDGTEGGRAADPARPPARLGNVGIIACDGSSLARAPSSDIGDVAFSVHATAAP

SEQ ID NO: 1083 - DNA, 1053 bp, Sorghum bicolor
atgaacttcggcggaaatggcaacgcgacgacgatccggtgcaagtactgcagcgcgtgcctgaccgtgatccccggcgagcgcgccatccagtgcgcgcaatgcaactgcgtgacgcgcatccggcgcggcgaccgcatcccgccggcgcggccgccggcgcacgtgccgccggcgttccagcgcgcccgcggcaagaagcgcgccgtcctgatcggcatcacctacgccggcatgcgccgcgggtgcggcgagctcagggggcccatcaacgacgtcaagtgcatgaggaacctcctctgccagcgcttcggcttccccagcgagtgcatcatcatgctcaccgatgaccagagggatccgttcaggctgccgaccaaggagaacatccggatggcgatgcactggctggtgcagggctgcagctacggcgactccctggtgttccacttctccgggctgggcgcgcaggtggccgacgacgacggcgacgaggcggacgggtacgacgaggccatctgcccgctggacgcgttccagaggggccccatcctggacgacgagatcaacgaggccatcgtgcgcccgctggtgcacggcgtcaggctgcacgccgtggtggacgcctgctacagcgccacggtgctggacctcccctacgtgtgccacatgtccaggaacgggttctggcagtgggaggacgagagccccccgtcgggcgcctggaagggcaccagcggcggccacgccgtgctcatcagcggctacagcgagggcaaaagcaacttcgccatgatgccggatgcgtacgcgtcggtgggggcaatgacgcacagcttcatccgggcgctggagtgcgagccgcgcggggtcacctacggccgcctgctgacctccatgagagccatcatgaagaaccgcggcgggggacacgatctgcagggccccatcggagcacccatccacacggtggccaacttcagcggcgtgcaggagccgaacctgtcctcgtcggagatgtttgacatacaccgcaagccgttcgtcctgtaa

SEQ ID NO: 1084 - protein, 350 aa, Sorghum bicolor
MNFGGNGNATTIRCKYCSACLTVIPGERAIQCAQCNCVTRIRRGDRIPPARPPAHVPPAFQRARGKKRAVLIGITYAGMRRGCGELRGPINDVKCMRNLLCQRFGFPSECIIMLTDDQRDPFRLPTKENIRMAMHWLVQGCSYGDSLVFHFSGLGAQVADDDGDEADGYDEAICPLDAFQRGPILDDEINEAIVRPLVHGVRLHAVVDACYSATVLDLPYVCHMSRNGFWQWEDESPPSGAWKGTSGGHAVLISGYSEGKSNFAMMPDAYASVGAMTHSFIRALECEPRGVTYGRLLTSMRAIMKNRGGGHDLQGPIGAPIHTVANFSGVQEPNLSSSEMFDIHRKPFVL

SEQ ID NO: 1085 - DNA, 831 bp, Sorghum bicolor
atggcactcgtgcaggagagcagccaggacttgctccagtcttacgtcgagctctggcaccagtccctgtgcttcgccaaatccatggcgctcgccgtggcgctggacctccgcatccccgacgcgatccaccgccacggcgacgacggcgccaccctcgcccagatcctcgccgagactgcgctccacccaaacaagcttcgcgccctacgcagcctcatgcgcgcgctcaccgtcttcggcaccttcagcgtccagcaaccaccaaccagcgtcgtcgtcgacgcgtcgtccggcgaagccgctgtctacaggctgacggcagcctcccgcttcctcgtcggcgacgacgaggtgagctcgtcgtcgacgaccttggcgcccttcgtgagcctggcgctccacccgatcgccgtcgccccgcacacccagggcatgtgcaagtggttccggcaggagcagaacgagccgaccgcctatgcgctggcgttccggcagccaacgccgacgatctgggagcacgctgacgacgtaaacgccttgctgaacaaaggcatggtcgcggacagccgcttcctgatgccggtcgtgatcagggagtgcggcgaggtgttccgtgggatcgactcgctggtcgacgtcggcggcgggcatggtggcgccaccgccaccatcgccgctgccttcccgcacatcaaatgcagcgtgcttgaccttgcacacgttgtcgccggtgctccatccgatgtcaacgtgcagttcatcgcaggaaacatgtttcagagtattccacctgcaaccgctgtttttctcaagttttctagtgcatag

SEQ ID NO: 1086 - protein, 276 aa, Sorghum bicolor
MALVQESSQDLLQSYVELWHQSLCFAKSMALAVALDLRIPDAIHRHGDDGATLAQILAETALHPNKLRALRSLMRALTVFGTFSVQQPPTSVVVDASSGEAAVYRLTAASRFLVGDDEVSSSSTTLAPFVSLALHPIAVAPHTQGMCKWFRQEQNEPTAYALAFRQPTPTIWEHADDVNALLNKGMVADSRFLMPVVIRECGEVFRGIDSLVDVGGGHGGATATIAAAFPHIKCSVLDLAHVVAGAPSDVNVQFIAGNMFQSIPPATAVFLKFSSA

SEQ ID NO: 1087 - DNA, 1626 bp, Sorghum bicolor
atgggggccgacgacgaccagtggccgtggccgccgccgcccctgctgctggctgcagcactggtggtggtggtggtgctcgcgctgtggcggcgcctggtgtggcaaccgcggtccgtggcgcggtcgttggcgaggcagggcatccgggggccgccctacagtttcctggccgggtcattgccggaggtgaagcggctggcgcgcgccagccggagaagggtttcgcacctggacgttggttgccatgacatcatgcccatcctgctgccacccttccacagatgggtcgtcgagtatgggaggacattcctgtactggatcgggccaacccctgcgatcttctcagttgatttagagctgattaaggaagtgcttacagacaggacgggcctgtttgccaaggacttcatgatccccgtcttcaaagtcctgttgggcaacgggctcatactagcaaacggcgacgactggaaacggcacaggaaagttgtccttccagctttcaaccacgagaggatcaagagcatgtcggcagtgacggctgaagctacggagcagatggcgcggcgatggttcgagcaaattctgcacagcggtggtgctcgtcaagcagcggagatacaggtggaccgcgccatctgcgacctgaccgcagaaatcatcggccgcgccgctttcggcaccggccaccaggaagccggcgatgtcctcgtcctgatgcacgagatgcagaagatgggcgccgcggccatgttggatgcccctatactctggcatatgccgactcggcgcaacctaacggtgcgacgtctggacaagctgttgaggaccaagatcacggcgatgatggcggcgcgggtggccgccgccgccaattgcggcagcggtggctacggcgacgacctgctcgggctcctgctggaagcgtggtcgccggagccggcggagcgccaagctgggagcgacgacgaagggacgacgacgacgacgctgaccaccagggaggtgatcgacgagtgcaagaccttcttcggcgccgggcaggagaccaccgccacactcctcgtctggaccatgttcctgctcagcacgcacccgcagtggcaggacaaggtcagggaggaggtcctccgcgagttccccggcggcggcgacgttcccaactccgacaccctctccagactcaagttgcttcacatggttctgctggagacgctgaggctctacccgccgatcgtgtacatacaacggacgaccgcctcggaggtcgtgctcaggggcgtcgaggtgccccgggggaccgtgatatcgatccccatcggcctgctgcagcgggacagggaggtgtggggctccgacgccgacgagttcaaccccctgaggttcagcaatggcgtcgccagagccgccacggacccgcacgcgttgctgtctttctcgcttggcccgagagcctgcaccggcaagagcttcggcatcatagaagcacagatcgtcatggcggtcatcctcaggaagttcaccttctccctctccccgacctacgttcacaagcccaagtatgtcgtgtccttgactcccaaatgtgggatgcctctcatcttcaagaacctccatgggtga

SEQ ID NO: 1088 - protein, 541 aa, Sorghum bicolor
MGADDDQWPWPPPPLLLAAALVVVVVLALWRRLVWQPRSVARSLARQGIRGPPYSFLAGSLPEVKRLARASRRRVSHLDVGCHDIMPILLPPFHRWVVEYGRTFLYWIGPTPAIFSVDLELIKEVLTDRTGLFAKDFMIPVFKVLLGNGLILANGDDWKRHRKVVLPAFNHERIKSMSAVTAEATEQMARRWFEQILHSGGARQAAEIQVDRAICDLTAEIIGRAAFGTGHQEAGDVLVLMHEMQKMGAAAMLDAPILWHMPTRRNLTVRRLDKLLRTKITAMMAARVAAAANCGSGGYGDDLLGLLLEAWSPEPAERQAGSDDEGTTTTTLTTREVIDECKTFFGAGQETTATLLVWTMFLLSTHPQWQDKVREEVLREFPGGGDVPNSDTLSRLKLLHMVLLETLRLYPPIVYIQRTTASEVVLRGVEVPRGTVISIPIGLLQRDREVWGSDADEFNPLRFSNGVARAATDPHALLSFSLGPRACTGKSFGIIEAQIVMAVILRKFTFSLSPTYVHKPKYVVSLTPKCGMPLIFKNLHG

SEQ ID NO: 1089 - DNA, 1605 bp, Sorghum bicolor
atggtggtggccgtggccttgcagctggcggcgctcctggcgctgctgctcgcgctgtggcgtctggcgtggcggccgcacgccgtggcgcggtcgttcgcgaggcagggcgtcggtggcccgccctacacgttcctggcagggtccttgccggaggcgaagcggctgctgatggccggccggagaggcgtgccgcccctcgacgccgcctgccacgacatcatgcccgtcctcctgccgcagttccacagatgggtcgcagactatgggagaacgtttctgttctggatcgggccgattcccgctctcttgtctacggatctacagctgattaagcaagtgctgacagacaggacgggcctgtatcagaaggacttcatgatccccgtgctcaagttcctcttcggcaacggtgtcatactgataaacggagacgattggaagcggcaccgtaaagtggttcttcctgcgttcaaccatgagacgatcaagagcatgtcggcggtgacggcagaggtaacgaagcagatgatgcggcaatggcgggagcagattattattcagggaagcggcgacaaggaatcggccgagatagacatgatccacgccttcaacgacctgaccgcaaaggtcaacggccgcgtcgccttcggcacgagccaccgggatgtcgaggaggtcatcgtcttgatgcgggagatgcagaagctcgccactgccgccacgctggatgctccaatactctggtatctgccaactcggcggaacctgcaagtccgacgtctgaacaaacagctgagaagcaagatcatatccatcatgcaggcgcggctggccgccgacggagctaagaagtgtggtgggcgcggcggcgccggcgggggcgacctactcgggctgttgctagaggcgtggacgccgcagcagcagcagcagcatggcaacaacggcgagacgctgacaaccgacgaggtgatcgacgagtgcaagaccttcttcgccgcggggcaggaaaccacggccacgctcctgacctgggccatgttcctgctcgccgtgcacccggagtggcagcacaaagtcagggaggaggtcgtccgggaattctcctgcaccagcgacggcgacggcgacgaggtcccccacgccgatgttctcgccaagctcaagctgctatacatggtgttgctggagacatcgcgcctgtaccctcccatcgtgtacatacagcggagggctgcatcggacgccgtccttggaggcatcaaggtgccccagggcacggtcatctcgatccccatcgccatgctgcaccgggacaagcaggtctggggcctcgacgccgacgagttcaaccccatgaggttcgagcatggcctcacaaaggccgccaaggatcccaaggcgctgctggctttctccctggggccgagagtgtgcactggccagagcttcggcatcgtggaagtacaggttgtcatggcgatgatcctcaggaggttctccttctccctctccccagagtatgttcacaagcccaagtatctcctgtccttgacacccaagcttgggatgcctctcatcgtcaggattgtggacggctga

SEQ ID NO: 1090 - protein, 534 aa, Sorghum bicolor
MVVAVALQLAALLALLLALWRLAWRPHAVARSFARQGVGGPPYTFLAGSLPEAKRLLMAGRRGVPPLDAACHDIMPVLLPQFHRWVADYGRTFLFWIGPIPALLSTDLQLIKQVLTDRTGLYQKDFMIPVLKFLFGNGVILINGDDWKRHRKVVLPAFNHETIKSMSAVTAEVTKQMMRQWREQIIIQGSGDKESAEIDMIHAFNDLTAKVNGRVAFGTSHRDVEEVIVLMREMQKLATAATLDAPILWYLPTRRNLQVRRLNKQLRSKIISIMQARLAADGAKKCGGRGGAGGGDLLGLLLEAWTPQQQQQHGNNGETLTTDEVIDECKTFFAAGQETTATLLTWAMFLLAVHPEWQHKVREEVVREFSCTSDGDGDEVPHADVLAKLKLLYMVLLETSRLYPPIVYIQRRAASDAVLGGIKVPQGTVISIPIAMLHRDKQVWGLDADEFNPMRFEHGLTKAAKDPKALLAFSLGPRVCTGQSFGIVEVQVVMAMILRRFSFSLSPEYVHKPKYLLSLTPKLGMPLIVRIVDG

SEQ ID NO: 1091 - DNA, 1092 bp, Sorghum bicolor
atggcgtcggagccggtggcgcgggcggtggcggaggaggtggcgcgctggggcgcgatgcgccagaccggggtcagcctgcgctacatgatggagttcggggcgcgccccacggagcggaccctcctcctcgccgcgcagttcctgcacaaggagctccccatccgcatcgcgcggcgggcgctcgacctcgactcgctccccttcggcctctccaccaagcccgccatcctcaaggtgagagattggtatgtggagtcatttcgtgacatccggtccttcccagaggtgaggaaccgggaagatgagctcgccttcacccagatgatcaaaatgatcagggtgcggcacaccaatgtggtgcccgcaattgcattgggtgtgcagcagatgaagaaggacttgggaggtccaaaggcgttcccccctggaatccaggagatccatcagttccttgatcgcttctacatgtcaaggattgggatccggatgctgatagggcagcacgtcgctttgcatgaccctgatccagagcctggtgtgatagggcttataaacacaaaaatgtcacctatgacagtagctcgaattgctagtgaagatgcacgtgctatttgcatgcgggagtatggatcatctcctgatgttgacatatatggtgatccgggttttacatttccatatgttacaccacatctacatctcatgattttcgagttggtgaagaactcccttcgcgcggtacaggaacggtatatggattctgataagcttgcacctccagttcgaatcatagttgctgatggagcagaggacgtgactattaagattagtgatgaaggtggtggtataccaaggagtggcctctcaagaattttcacgtatctctatagtacagcagaaaaccctcctgatctggatggacataatgaaggagtaactatggctggatatggttatgggatccctattagtcgtctttatgctcgatatttcggtggggacttgcagatcatctctatggaaggatatggaactgatgcttacctccacttatcacggctgggagattcagaggaacccttgccttaa

SEQ ID NO: 1092 - protein, 363 aa, Sorghum bicolor
MASEPVARAVAEEVARWGAMRQTGVSLRYMMEFGARPTERTLLLAAQFLHKELPIRIARRALDLDSLPFGLSTKPAILKVRDWYVESFRDIRSFPEVRNREDELAFTQMIKMIRVRHTNVVPAIALGVQQMKKDLGGPKAFPPGIQEIHQFLDRFYMSRIGIRMLIGQHVALHDPDPEPGVIGLINTKMSPMTVARIASEDARAICMREYGSSPDVDIYGDPGFTFPYVTPHLHLMIFELVKNSLRAVQERYMDSDKLAPPVRIIVADGAEDVTIKISDEGGGIPRSGLSRIFTYLYSTAENPPDLDGHNEGVTMAGYGYGIPISRLYARYFGGDLQIISMEGYGTDAYLHLSRLGDSEEPLP

SEQ ID NO: 1093 - DNA, 1314 bp, Sorghum bicolor
atggtggcgccgccgccgcagccgccggcgtcgctggactactggcggggcttcttcagcggcgcgcgggccagcatcttcgacgccatagacgccgccatccgagtagccgccgccgaccaccccgacgccctccgcgcgcgccgcgacgccatcgccgagcgcctctacaccgcgctcatcgccctacccgcgccggaggcgccgccggggcaccccacccgtggccagccgccgctcctcctcctccccgagggcgccggcagcgtgcccagcctctgcagctccgaccgcgctgagagcgatgatgacgacgacgtcgtcgccgaggcgttccgtgtcaaggcggctctctccaatgcccaagacaagtcagaggccgagttgctcgagcttcttgggaggttggggcagctggaattcacggtggatgccattagggctactgagattggaatggccgtgaaaccgctgcgaaagcatggctccaagcagattcggcaactcgtccgatcgcttattgaaggttggaaggctactgttaatgagtgggtgaacaacaaagatcccattgtagatcatacaccacaatcagtggatgcttcttgcctggatcaggaagaagggggtctgccttcccctcccatggatgaggcagccttgtttgcagcaccatgtacttcaatccagctatccgagttcttcgatgaaatggatgatgatggaaacattaggagtgatgccaaggatggtggtcagtgtaatccggcaagccaagagtcagtcaacaagcagtcacctccgggccaatggtatgacccagagcagaactggaaagttgaccaatctgctatgaagcaatcacgaccaaatgaagcattcaactggcaaacaaggcagcaatctaattcaggggcgcaagtgaaggcgtcaagtgcagcttttggtccaggaagacctcagatgtcgcatacggggccgaaatgttcagaagtgaagccaaagcagcagcaagatatctcagtggctcaaagaagaccgaaaccgacaatgcctaagccaccaactcagcatgatgtaaattcagtccgggccaagctgcagctcgcaaaggatgccaagctggaggctacaaagcgcaagcttcaagaaggttaccaagaattcaataatgcaaagaagcagcgaacgatacagatggtggatccacaagacctgccgaagcaagggaaccgaaacctagcactcaacggcaagccaaggaacaacaacagcagcaacaacatcaggaatcggctgggcatccgcctctga

SEQ ID NO: 1094 - protein, 437 aa, Sorghum bicolor
MVAPPPQPPASLDYWRGFFSGARASIFDAIDAAIRVAAADHPDALRARRDAIAERLYTALIALPAPEAPPGHPTRGQPPLLLLPEGAGSVPSLCSSDRAESDDDDDVVAEAFRVKAALSNAQDKSEAELLELLGRLGQLEFTVDAIRATEIGMAVKPLRKHGSKQIRQLVRSLIEGWKATVNEWVNNKDPIVDHTPQSVDASCLDQEEGGLPSPPMDEAALFAAPCTSIQLSEFFDEMDDDGNIRSDAKDGGQCNPASQESVNKQSPPGQWYDPEQNWKVDQSAMKQSRPNEAFNWQTRQQSNSGAQVKASSAAFGPGRPQMSHTGPKCSEVKPKQQQDISVAQRRPKPTMPKPPTQHDVNSVRAKLQLAKDAKLEATKRKLQEGYQEFNNAKKQRTIQMVDPQDLPKQGNRNLALNGKPRNNNSSNNIRNRLGIRL

SEQ ID NO: 1095 - DNA, 1614 bp, Sorghum bicolor
atggagctagcaccgtcgtcggcgtccttcctcgccgtcgtagtggctgctgccgccgctctcttcctcgcaaccattctccggctccgcccgcgctccacgcgcaacaagtacaggctcccaccgggcccccggccgtggccggtgatcggcaacctgaacctgatcggccggctccctcaccgctccatccacgagctctccaagaggtatggcccgctcatgtccctgcggttcggctccttccccgtcgtcgtcgggtcgtcggtcgacacggcgaggctcttcctcaggacccacgacctggccttcatcgaccgtcctcagacggcggccggcaagtacaccacctacaactgcggtggcctcttctaccagccctacggtgcgtactggcgtcagggccgcaagctctgccaggcggagctcttcaacgagaggcggctcacgtcgctcgagcacgtccgcggcgaggaggtgcgcgccatggtgagagatctgcacgccgcggcgtcggcggcggcggccggttgttctggtggtggtggtggtggcggccgcgcggtggtggcgctcaaggagcacctctacatggtgaacctccacgtcatctcgcgcatgttgctagggaagaagtacatcgtcgacgggtctggctcgccggcgacgcctgaggagttcaggtggctcatcgacgagcatttctttctcaacggcgtgctcaacgtcgcggacatgatcccgtggctcagctgcctggacccgcacgggtacatcaagaggatgaagaggtcggccaagatgtgggaccggttcctggagcacgtgctggacgagcacaaccggcgacggcggcgagaaggcaaggatttcgttgccatggacatgatggacgtgcttttggagctcgctgacgaccccaacctcgaggttccgatcaagcgggataatgtgaaggcgttcattctagacctgatgggcggcgggaccgatacctcggcggtgactgtagagtgggccatgtcagagctcctaaggaatccagacgtccttgccaaggccaccgaggagctagaccgtgtcattgggcaggaccgtctggtggcagagcgggacattccaaacctcccatacatggaggccatcgtgaaggagaccctgcgcctgcacccagtcgcgccgcttctgacgccgcggctgtcccgggaggacgtgtccgccggcggctacgacatcccggcaggcacgcgcgtcttcgtcaacacctggtccatcggccgcgaccccgcggtgtgggaggctcccatggagttccgcccggagcgcttcgtcgtcgggagcagaggcggcggcgtggacctgaaagggcagcacttcgagctgctgccgttcggctccggccgccggatgtgccccggcatgggcctcgccctcaggatggtgccgatgatcttggccaacctgctgcacgccttcgcgtggaggctccccgacggcgtggcggccgaggagctgagcatggaggagacgttcgggatcaccgtgccgcgcctggtcccgctcgaggccatcgctgagcccaagctcccggctcgcctatatgcaggcccgtga

SEQ ID NO: 1096 - protein, 537 aa, Sorghum bicolor
MELAPSSASFLAVVVAAAAALFLATILRLRPRSTRNKYRLPPGPRPWPVIGNLNLIGRLPHRSIHELSKRYGPLMSLRFGSFPVVVGSSVDTARLFLRTHDLAFIDRPQTAAGKYTTYNCGGLFYQPYGAYWRQGRKLCQAELFNERRLTSLEHVRGEEVRAMVRDLHAAASAAAAGCSGGGGGGGRAVVALKEHLYMVNLHVISRMLLGKKYIVDGSGSPATPEEFRWLIDEHFFLNGVLNVADMIPWLSCLDPHGYIKRMKRSAKMWDRFLEHVLDEHNRRRRREGKDFVAMDMMDVLLELADDPNLEVPIKRDNVKAFILDLMGGGTDTSAVTVEWAMSELLRNPDVLAKATEELDRVIGQDRLVAERDIPNLPYMEAIVKETLRLHPVAPLLTPRLSREDVSAGGYDIPAGTRVFVNTWSIGRDPAVWEAPMEFRPERFVVGSRGGGVDLKGQHFELLPFGSGRRMCPGMGLALRMVPMILANLLHAFAWRLPDGVAAEELSMEETFGITVPRLVPLEAIAEPKLPARLYAGP

SEQ ID NO: 1097 - DNA, 1119 bp, Sorghum bicolor
atggcggacgcagcaagaggcatggggtctccatctctcccggtggctaacgtgcaggcgcttgccgagacctgcaacaccggagttgacgagccggtcccctggagatacctcagcaaggatcctaccgcggaggaggtcgtagccgccgacgacagcgcttgcgcgattccggtcatcgatttccgtaagctgcttgatccggagtcgtcgtcgtcggagtgcgccaggctgggatccgcatgccaccactggggattcttccagctcataaaccatggagttccggatgaggtgattgcaaatctgaagaaagacgtagtcgggttcttcaagcagccgctggaagccaagaaggaatgcgcacagcaagctgacagccttgaaggctacggccaggccttcgtcgtctctgaggatcagaagctggactgggcagacatgctctacctcattgtgcagccgagggagtcgagggacatgcgcttctggccgacacgccctgcatccttcagggactccgtggactcgtactccatggaagcttcgaagctagcgtaccagctgctggagttcatggccaagggcgtgggcgccgccgacgacgacgacgacccggcggcgtcgctgcgactgcaaggcgtgttccaagggcaggtgcggggcatgcgggtgaactactacccgccgtgccggcaggcggcggacagggtgctgggcctgtcgccgcacaccgaccccaacggcctcacgctgctgctgcagatgaacgaccacgacgtgcaggggctgcaggtcagcaaggacggcaggtggttccccgtgcaggcgctcgacggcgccttcgttgtcaacgtcggtgacgcgctcgagatcgtgagcaacggagcgttcaaaagcgttgagcatagggccgtgatacacccaaccaaggagcggatttcggcggcgctgttccacttccccgaccaggatcggatgcttggtcctctgccggagttggtgaagaaaggcgacagagtgcggtacggaacaagaagttaccaagatttcttgaagcaatacttcactgcaaagctggatggaaggaagctcatagagagtttcaagttagagtag

SEQ ID NO: 1098 - protein, 372 aa, Sorghum bicolor
MADAARGMGSPSLPVANVQALAETCNTGVDEPVPWRYLSKDPTAEEVVAADDSACAIPVIDFRKLLDPESSSSECARLGSACHHWGFFQLINHGVPDEVIANLKKDVVGFFKQPLEAKKECAQQADSLEGYGQAFVVSEDQKLDWADMLYLIVQPRESRDMRFWPTRPASFRDSVDSYSMEASKLAYQLLEFMAKGVGAADDDDDPAASLRLQGVFQGQVRGMRVNYYPPCRQAADRVLGLSPHTDPNGLTLLLQMNDHDVQGLQVSKDGRWFPVQALDGAFVVNVGDALEIVSNGAFKSVEHRAVIHPTKERISAALFHFPDQDRMLGPLPELVKKGDRVRYGTRSYQDFLKQYFTAKLDGRKLIESFKLE

SEQ ID NO: 1099 - DNA, 933 bp, Sorghum bicolor
atgaagaaggaaatttggttatcaactggatctgacgaggagaaacttcagaatctactacattgttggattagctggatgttttctgatattgtgataccattactgaaggcatatttttatgttacagaacgagaatcaagaagatatgatgttttctattatccaaagacagtttggaaagacttaactagtactgctattgcttccttaaacaaacaaaacctaaggattttgcgtggtacatccagaaaaaaagtaagacaattatgttgttcttcaagagtgaggtttgttccaaaagcaaaagatatgagaccattagtaaatctcaaagctcaatcaaaaaatgtcctcctcaataattgtcatctgattataaaaaaagtaagggatgagaatccagacaagtttggttcttctgtttttgattacaataatgtgcatcaaaatctctggcattttatttcttcagtaagaagtcacctgaaggaaaaattcaagatatatattgttgttgccgatgtatcaaaggcatacgattgcattaatcatgatatgttactgaaagttgtggatgatgcgttgaaatgtgatgactatgttttgaggaaatgcaaaaaagtagtttgcaactggtctaagaatgccctctaccgttttgattcaaatgtttctatctccaacggtgatggtatatgtgatttctcgattcagttatcatcaaggggtggcattttagagcatgctctagattttttcaataggataagaagagggttttccgactacaattgctacatgaatgacagaaaatatggtttcaacttcgaggttgcaaatacaaagtaccttgagagcaagctacgccattacatgcgtccgaagtgtcatcccattttctttgattccacgatcaactcaccaggcaca

SEQ ID NO: 1100 - protein, 311 aa, Sorghum bicolor
MKKEIWLSTGSDEEKLQNLLHCWISWMFSDIVIPLLKAYFYVTERESRRYDVFYYPKTVWKDLTSTAIASLNKQNLRILRGTSRKKVRQLCCSSRVRFVPKAKDMRPLVNLKAQSKNVLLNNCHLIIKKVRDENPDKFGSSVFDYNNVHQNLWHFISSVRSHLKEKFKIYIVVADVSKAYDCINHDMLLKVVDDALKCDDYVLRKCKKVVCNWSKNALYRFDSNVSISNGDGICDFSIQLSSRGGILEHALDFFNRIRRGFSDYNCYMNDRKYGFNFEVANTKYLESKLRHYMRPKCHPIFFDSTINSPGT

SEQ ID NO: 1101 - DNA, 1896 bp, Sorghum bicolor
atgctggagagccaatacaaaacagtgcttggtactaactattatgatcgtcatctgttctactttgagctggaccatacacagacaaaagctttaatttctttgttcaaatcacttctccctattaatttcaatcaagttccagctgcttcaagcaaaaagagtattgttgtgtctttaccaccaactaaaaggaaggcaccagttctacctgacccaaaaaaagttaaagcaaattcaaaggatatcaatccatttagtgttttatcaaatgcaagtgatggtgttctacaaaactgggttgattctgatgtggaaaatgctagcatcaatgaaaattcacacagtgatactgatgagaaggaatttgaggagccagtttctgattgggaggatttggatgacaatgctctgcaataccagtttagtcctcattcaaatccagatgagagtcaaaactcctcatacaaaacagtttgccaaggaatggagcttcctgaatgtattcatccagttgtcaatcctgtgaatgaagaaaaacacaccatgcttgtacataatgagcataaagctgctgtgagtattgacaaaatagagagtgaagttaataatatcccgggtggtgttgggctacagcctgaaaggcacactatcctgaaaaagctgaaagagttgttttccatacgacagcaggcggcactgtcttcccaggattgtgttaattcaagcccagatcaatgtgtacctgaagaaacaaaggtcaatgcaaacctgtcctgtggcccatttgatggcactgtggaagataaaccctcctttgaggaacaccgtggagaatttgctgagctccgacaaatcattgctgatttatccaggagggctgaagcattggagaaaaagcagaaagggtcagatcaagatatactatttttgagggaagttgttaaagattcaggaagaaaagtacagcagctggaatatcttgtagatgagttacaattccgatttgactcttcattgcctcttcttggaagcacgcgcaagccatcgatattcctgataggtggttacaatggcgtgacctggttaccatctcttgattccttttctcctgagaaagacacactgatgggtcttgcaccaatgagtgtcgcccgctcatatgcatctgctgctgcattggatggtcacatatttgctttcggtggtggaggtggcaactcatcatggtataacacagtggaatgctatagttcaaggaataacgagtggatagaatgcccctcattgaaccaaaagaaaggaagtcttgctggtatcagtcttaatagcaaaatatatgctattggtggaggagatggaaatgaaactttttcagaagttgagatgtttgatccatatctcgggaaatggatatgtggtccatctatgctgatttctcgatttgctcttgccgtagctgaattgaatggcaccatctacgcaactggtggatatgatggaagcacgtacttacaatcagcagaacggtacgaccaaagggagggtgtctgggcccgtcttccaagtatgagcacaaagaggggatgccatgccctaactgtcctgggagaaagcctatacgcaatgggaggatacaatggggacaagatggtttctagcgttgagatcttcgaccctcgcctcaatgcctggaggatgggagatcccatgagcaccccaagaggatacgctgctgcagttactctggatggaagcgcgtatttaatcggtggcctgaagtccaatgtgcagatcctggataccgtggaggtttataacgcgagctccggctggtcagctctcggtttcagttcactcgggaagaggacctttgcatctgccgtggccatgtag

SEQ ID NO: 1102 - protein, 631 aa, Sorghum bicolor
MLESQYKTVLGTNYYDRHLFYFELDHTQTKALISLFKSLLPINFNQVPAASSKKSIVVSLPPTKRKAPVLPDPKKVKANSKDINPFSVLSNASDGVLQNWVDSDVENASINENSHSDTDEKEFEEPVSDWEDLDDNALQYQFSPHSNPDESQNSSYKTVCQGMELPECIHPVVNPVNEEKHTMLVHNEHKAAVSIDKIESEVNNIPGGVGLQPERHTILKKLKELFSIRQQAALSSQDCVNSSPDQCVPEETKVNANLSCGPFDGTVEDKPSFEEHRGEFAELRQIIADLSRRAEALEKKQKGSDQDILFLREVVKDSGRKVQQLEYLVDELQFRFDSSLPLLGSTRKPSIFLIGGYNGVTWLPSLDSFSPEKDTLMGLAPMSVARSYASAAALDGHIFAFGGGGGNSSWYNTVECYSSRNNEWIECPSLNQKKGSLAGISLNSKIYAIGGGDGNETFSEVEMFDPYLGKWICGPSMLISRFALAVAELNGTIYATGGYDGSTYLQSAERYDQREGVWARLPSMSTKRGCHALTVLGESLYAMGGYNGDKMVSSVEIFDPRLNAWRMGDPMSTPRGYAAAVTLDGSAYLIGGLKSNVQILDTVEVYNASSGWSALGFSSLGKRTFASAVAM

SEQ ID NO: 1103 - DNA, 564 bp, Sorghum bicolor
atgggtatcgacctagtcgccggcggccggaacaagaagaccaagcgcaccgcgcccaagtccgacgatgtctacctcaagctcctcgtcaagctgtaccgcttccttgttcggaggaccaagagcaacttcaacgctgtgatcctgaagcggctcttcatgagcaagaccaaccgcccgcctctctcgctccgccgcctcgtcaacttcatggagggcaaggagaatcagattgctgtgatagtgggcaccgtgactgacgacaagagggtctatgaggtaccagcaatgaaggtggctgcgctcaggttcactgagacggccagggcccggattgtgaatgctggtggcgagtgcctcacctttgaccagcttgcgctgcgtgccccgctgggccagaacacggttctgctgaggggacctaagaatgctagggaagctgtgaagcactttggccctgcgcctggtgtgccccacagccacacgaagccatacgtgcgctccaagggcaggaagtttgagaaggcaagaggaaggaggaacagcagaggcttcaaggtctag

SEQ ID NO: 1104 - protein, 187 aa, Sorghum bicolor
MGIDLVAGGRNKKTKRTAPKSDDVYLKLLVKLYRFLVRRTKSNFNAVILKRLFMSKTNRPPLSLRRLVNFMEGKENQIAVIVGTVTDDKRVYEVPAMKVAALRFTETARARIVNAGGECLTFDQLALRAPLGQNTVLLRGPKNAREAVKHFGPAPGVPHSHTKPYVRSKGRKFEKARGRRNSRGFKV

SEQ ID NO: 1105 - DNA, 987 bp, Sorghum bicolor
atggcgtcgtcgggcagcgacgtgccggcggcgagggcggccgtggcggtgaacgatctgatccaggcgcgcgacggcgcggcgaggctcagggccttcctgctgcagctggacgaccagcgcgcggcgtgggcgcagctgcagatcgacggcgtcctgaccaagctgtcgagcgcgatgtcggcgttggatgtaagcgatgccgccgggtcggacgacggtgcgaggccacggccgcagtcggggagctcgtgcgggaacaagaggaaacaaagctccagcagaagatcacagcgtccatctgacaaaaagatcactgctaacctggaagatggccacgtatggcggaaatatgggcagaaagagattcaagactcaccctatccaaggagctactacaggtgcacgcacaagacagaccagggctgcagcgccaggaggcaggtccagcgctgcgagacggacacgtccaagtacgtcgttacctactacggcgagcacacgtgccgggacccctcgacgatcccgctcatcgaccacgccgccggcgcccttgccgagctcgaccgtgccaacaacctcatcagcttcggccccagcggcaccagcaacgacgcaaacgcagcagccgcggccagcaacgccggcgcctcttcgtcgcagtacctgcaggctatgggcgggagcgctgctgctgatcagctgtccacgtcgtggtgcaccagcgacgacgtgttcagctcgtcggccggctcgttcatgcaggtggaccagctgatcggcgccgtcgtgggcggctccgccggggtcgtgacgtcagcggcggcgccggaccgtggcgtcgtgcttggtggcgtggcgagcggcggcagaggcaccgccagcttcccgacgtctccgaacagcctcggcttcgtggtgggatcgcttgggagcatcggcggcggcggcgaggacgacgacgatatgtttagactggatccttag

SEQ ID NO: 1106 - protein, 328 aa, Sorghum bicolor
MASSGSDVPAARAAVAVNDLIQARDGAARLRAFLLQLDDQRAAWAQLQIDGVLTKLSSAMSALDVSDAAGSDDGARPRPQSGSSCGNKRKQSSSRRSQRPSDKKITANLEDGHVWRKYGQKEIQDSPYPRSYYRCTHKTDQGCSARRQVQRCETDTSKYVVTYYGEHTCRDPSTIPLIDHAAGALAELDRANNLISFGPSGTSNDANAAAAASNAGASSSQYLQAMGGSAAADQLSTSWCTSDDVFSSSAGSFMQVDQLIGAVVGGSAGVVTSAAAPDRGVVLGGVASGGRGTASFPTSPNSLGFVVGSLGSIGGGGEDDDDMFRLDP

SEQ ID NO: 1107 - DNA, 1032 bp, Sorghum bicolor
atgtgttcctgcgcctgcgcgcgcctcctccccccgctcttcagccccgctccaagcccaaagcccagacccgccttcccgcacggcccaacgccagcccggagccgcgccgtcgtcgcgctcgcgggcgcagcctcccgggacgacgcgcctgcgccgctgtccggcttcgacttcctcgcgctgaagcgggagcttgaggaggaggaggaggaggcagtggtgtctgtggatgcgaaggaaggtggtggggctgtcaatgaggacgatggagagagtggggcagagaggagtgcgggtggtacgaggaggcggcggcggcggcggcagatggcgaggcgatcggctctgctcgcgaagcaggtgatcagtgtgagctcggcgcggagcctcgggttcgtgtcgcagctctggatcgacgccgcctcgtgggctgttgcattggttgaagtgaggccaagcttactttcaggtgaagcagagaaattcctttttgaggacatctatcaggttggagacgtggtgcttgttgagaatgaatctgtgatcgataatgaacataaactggttggattgcacagcttggtgggctacaatgtcgtaacttccaggcggcgcaatgttggcaaggtgcgtggtttcacatttgacatcagctcaggcgccatggagtctcttgagcttgactcatttgggctttcgattgtcccttctagcttggtaagcacatactgtttattggtcgaagacgtgttggatatagtctctgatacaattgtggtgcacgaagacgcggtctcacgggttcaacggttaacgcagggcattttgggcacccaaaacatccacggccctggtggtgagattgacgagtacagtagaattggggggaggaggaggaggagagcaaacggccagggaaagtccggtggccgagaactccgcagggaagcgaggcaccaggatggactattgacacaccgtaccggttgctttcgtgcgggagcaggaggaggaaacttgccgtggtag

SEQ ID NO: 1108 - protein, 343 aa, Sorghum bicolor
MCSCACARLLPPLFSPAPSPKPRPAFPHGPTPARSRAVVALAGAASRDDAPAPLSGFDFLALKRELEEEEEEAVVSVDAKEGGGAVNEDDGESGAERSAGGTRRRRRRRQMARRSALLAKQVISVSSARSLGFVSQLWIDAASWAVALVEVRPSLLSGEAEKFLFEDIYQVGDVVLVENESVIDNEHKLVGLHSLVGYNVVTSRRRNVGKVRGFTFDISSGAMESLELDSFGLSIVPSSLVSTYCLLVEDVLDIVSDTIVVHEDAVSRVQRLTQGILGTQNIHGPGGEIDEYSRIGGRRRRRANGQGKSGGRELRREARHQDGLLTHRTGCFRAGAGGGNLPW

SEQ ID NO: 1109 - DNA, 1674 bp, Sorghum bicolor
atgtctggaaaagggaagaggcgaagtgctagattgttgaagctggaagagcagaagaacgacggcgactccaccgccgtctgcctccttgatccctggcagataatccggaacagcatttcaggtaacttaccaaggcaaagctcagtaggacagatcattgaatatatcctcgacgagttggagctgagagacagacatgagttgtttgcaatgccagatgacatccagacgaagactccgctgccctcattccttgaggcccagtcacttcttgctctggaagaatccgagctcccgaggtacaccttggctgttgcctttatcgtgcctagaggcgccctcgtgatacaagttactgattatgcagagctggtaagcaggcccggtgactttgcaacattgagacagaagaacaaggatggcatgtacacggcactggagcaatttgagaacgatgtttacatggtgttccagaaagcgataacgatgaacagccaggacaccgtgcctttcagagaggccatggcactgctagatcaagccaagctggtgttcatgtccctgaagagcaaccagatgttctcggagtcggagctggcggcgtggcgccagaggcacgcggaccagctgcagcagccgatcacgccggaggggagagagggcggcggcagaggcccatcacgccacccggctgccgcgccgccgttgcagccgtccgccgccacgccgaggaagaggagcgccgccgagacgaagaagcaggagaacgccaacaccggcggcgggaacactccggagaaccagagagggaggcagcgcggcgccagggagagcaaggccacgcccacgccgccgggaaagaaggcgagaaaagctgacacgctgttccgatccgtcggagacgcagcagcaacggcgggctctaacggcggcgccggcccggtggcgacaaggaggctcacttacaccggcgaagctgcagccgatcatggctggcgggcgatcgcggcgacgccggtcttccaaggccggcacgttacactcagcgaccagccgcaggagcagacgttccgaggcagcctgcagcggttcgtgcggcacgcggggctcaaggcgcgcgtggccgccgagttcagtacgctcgagtgcgtgtcgcgggccaggcacagcagccccgtgccgcagtgctggaacggcttcgcccccggcgccggtttcctcccgccgtcgcctcggcctccgggcgccgccgccaccccggagtcagatcagcaggcggcggcaccggagtgcaagctggagacggacgaggtgctcaagctcttcgtgctcatgggcacgcccgccgcgttcttgggtagagccaagaaaatgttcggccatgatgagccggaggagaaaagcgcagcgaaggagaggcaatcgaccaaggccgccgccgacgacgctcgggcgcgcgctggcgctgcaacggcggccgagactgagcacgggaagaagagcagcgcgggcgagccatcatcggccgccgcgtgcgggccgttcgcgccgcccaagttggtccccggccggctgggcttcggccagttcgcggcctcttcagcacgtccgttcaagctcaagtccaagccttcggcgtcgaatgcttccggcaagaagaaagtttcgtaa

SEQ ID NO: 1110 - protein, 557 aa, Sorghum bicolor
MSGKGKRRSARLLKLEEQKNDGDSTAVCLLDPWQIIRNSISGNLPRQSSVGQIIEYILDELELRDRHELFAMPDDIQTKTPLPSFLEAQSLLALEESELPRYTLAVAFIVPRGALVIQVTDYAELVSRPGDFATLRQKNKDGMYTALEQFENDVYMVFQKAITMNSQDTVPFREAMALLDQAKLVFMSLKSNQMFSESELAAWRQRHADQLQQPITPEGREGGGRGPSRHPAAAPPLQPSAATPRKRSAAETKKQENANTGGGNTPENQRGRQRGARESKATPTPPGKKARKADTLFRSVGDAAATAGSNGGAGPVATRRLTYTGEAAADHGWRAIAATPVFQGRHVTLSDQPQEQTFRGSLQRFVRHAGLKARVAAEFSTLECVSRARHSSPVPQCWNGFAPGAGFLPPSPRPPGAAATPESDQQAAAPECKLETDEVLKLFVLMGTPAAFLGRAKKMFGHDEPEEKSAAKERQSTKAAADDARARAGAATAAETEHGKKSSAGEPSSAAACGPFAPPKLVPGRLGFGQFAASSARPFKLKSKPSASNASGKKKVS

SEQ ID NO: 1111 - DNA, 1848 bp, Sorghum bicolor
atggcgatgcggctcctgtccccctccacgccgcccccactcttcccgagccccggcccgaaggcacccgcctccgtctccgcatcgtcttcctcgtacttgtctgtccgcttgcgccgcgcgcgcgcggcgtctgcagcgtctggcgcggccgcgtcgggcgggtccgaccgggacggcggacgcttcgagggggaggcgatgagcggggcattcgacaggggcctcgcggagatcgcgaggaaggtgccgctcttcgagcccgcagcggacggggagctcgccgccgcggccggcgagcggccgttgcctatcaatctcgagctctggctctaccgcgtcaaagtgcacaccaggaagttcgagttccctgaagcagagaagcttctcgacaagtgtatctcattctggcctgaagacggacgtccgtatgtggcactggggaagttgttcagcaagcagtcaaggtatgacaaagctagagcggtgtacgaaaggggatgccaagcaacgcaaggcgaaaacccatacatttggcagtgctgggcagtcctagaaagcaagggtggaaatattcgaagggcacgcgagctatttgatgctgctactgtggctgatgcaaagcacattgctgcttggcacgggtgggcaattttagaaataaagcaaggaaatataaaaaaagcacggaacctacttgggaaagccctgaaatattgtggaggaaatgagtatatttaccaaactcttgctttgcttgaagctaaagcagagcgctttgaacaagcaaggactttgttcgaacaagccactcaatccaatccgaaaagttgtgcaagctggctagcttgggctcaggtagaaatgcgtgcaggaaacaataccatggccagaaatctctttgagaaagctgtccaggctagtcctaaaaaccgtttttcatggcatgtatgggcactatttgaggcaaatgaaggtaatattgacagtgcaaggaagttgcttaagattggacatgctgtaaatcctaaggaccctgtaatcctccagtcacttgcactgctggaatacaacttttcatctgcgaatgttgctcgtgtgttattcagaaaagcatctcaaattgatccaaggcatcagccagtttggatagcttggggatggatggaatggaaagaaggaaatgcaagaacagcaagggccctctatcaaagagctttgtcagttaattcaacaaatgaatgtgctgctcgttgccttcaggcttggggggtcctagaacagcgtgctggtaactacacggcagccagaagattgttgaggtcttcgttgaatataaactctcaaagtgaggtgacatggatgacatgggcagcacttgaggaggaacagggagatccagttcgagctgaagaaattcggaacctttactttcagcagcgcactgaagttgtggatgatgcctcctgggtcatgggcttcctcgacatcatcgaccctgccctagacagcgtgaagaagctgctaaacctagatcagccttctgggccaacgaggcaagatgatgttaaaagcactgccaggagttctgcagctagggagtcttcagaaacctctgcggctgtaggttcagatacccctggccttacgagcaatgatgctggtaacaacgggagggaagcaactaggactccaacaaatgatttcgatttggatcgtttcatcaaaaagaggctggccctcgacccggcggagctggatgccgtgctcgagggctctgacccgaggggtgttgtttctcagaggaggaaacagcggctgcccaggaagccactccctgtcccgtaa

SEQ ID NO: 1112 - protein, 615 aa, Sorghum bicolor
MAMRLLSPSTPPPLFPSPGPKAPASVSASSSSYLSVRLRRARAASAASGAAASGGSDRDGGRFEGEAMSGAFDRGLAEIARKVPLFEPAADGELAAAAGERPLPINLELWLYRVKVHTRKFEFPEAEKLLDKCISFWPEDGRPYVALGKLFSKQSRYDKARAVYERGCQATQGENPYIWQCWAVLESKGGNIRRARELFDAATVADAKHIAAWHGWAILEIKQGNIKKARNLLGKALKYCGGNEYIYQTLALLEAKAERFEQARTLFEQATQSNPKSCASWLAWAQVEMRAGNNTMARNLFEKAVQASPKNRFSWHVWALFEANEGNIDSARKLLKIGHAVNPKDPVILQSLALLEYNFSSANVARVLFRKASQIDPRHQPVWIAWGWMEWKEGNARTARALYQRALSVNSTNECAARCLQAWGVLEQRAGNYTAARRLLRSSLNINSQSEVTWMTWAALEEEQGDPVRAEEIRNLYFQQRTEVVDDASWVMGFLDIIDPALDSVKKLLNLDQPSGPTRQDDVKSTARSSAARESSETSAAVGSDTPGLTSNDAGNNGREATRTPTNDFDLDRFIKKRLALDPAELDAVLEGSDPRGVVSQRRKQRLPRKPLPVP

SEQ ID NO: 1113 - DNA, 2946 bp, Sorghum bicolor
atgggtttcctctcggcgaagctgctgccgtcgtgcgagagcatgtgcgtgtgctgccccgcgctgcgcccgagctcgcgccgccccgtcaagcgctacaagaagctgctcgccgagatattccccaagacgcccgatggtgccccaaatgagaggaaaatagtgaagttatgtgagtatgctgcgaagaacccactgcgcataccaaagattgccaagtttctagagcagaggagtcacaaggagctgcgctctgcccatgtgaacttcgtcagaatcatcactgaagcttacagcaagctgctctccatttgtaaggagcagatggcatattttgccatcagcctagtgaatgtccttaccgagcttctggaaagcaagcaggagaatattcacatccttgggtgtcaaactttagcaaactttattaacagccaggtagacaacacatatgcacgcaatattgaaagcttggtacacaaagtatgtgcgctttcacgtcaacagggacaggagcacaggcttctgagggcagcaagcttgcagtgcctgtcagcaatgatctggttcatgaaggagcattcatacatatttgctgattttgatgagatggtgcattcagtgttggaaagttataggacggaggaatctaatggcggtggtgatgagagacatgcgttgcagcataattgggttgatgaaatagcaaggtctgagtgtagatctggcgtaggtggtggtaatgatgtgaatattaacactacaactattaggctgcgaccagcaagaaattcttcagctcttaccagggatgaatgtgactccccagaagtatggtcgcatatttgtgtccaaaagcttgcagaactggccaaagagagtacaaccatgcgtcgcattttagatccaatgctttcatactttgatatgaagaaacagtgggccccacgacatggattggctttgcttgttttgtctgatatggcttatctggaaaagagttcaggcaatgaacagctgattctaaccactgttatccggcacttggatcacaaaaacgtttcacatgatcctcagacaaaatcagatattattcagacagcaacgtccttggcacggcaacttcgatctcgaggatttgctgttgaacttgtagtggcaggtgacttgtgcaagcacttaaggaaaacactagaggctgtggagtcaggcaatgttgaagatcagaatttgaatgaatctcttcagaatttcttggaggactgtcttatggaagttgttagaggaatcaatgacgtgcgcccactctatgatatgatgacaatcacattggagaatttgccttgtatgccaactgttgccagagcaacccttggaagtttgctgatcctatcacacataatctcgttgacatcagtatcatctaacagtcctatggtatttccagaagcacttctccagcagatactgaagtccatgatacatactgatattgacactcgtgtgggagcacaccacatgttttctgctattattgtccgagggccaagccatcttcggagtgagtcggagtacctatatgaaacaaaaaagcagtctcggactacatctgtatttgcttcagctactgctctactggagaagttgaggagagaaaaggagagtttaagttcagataagcctcgaaatatcgtgcatgatgatgtgaaggaaatgcatgaagaggataaacggaaaaatccagcttatttctctaagctggtttcctctttcattgaaagatgtgcaaagcgaagtagctctgtagaggagaccaatattgccatgctaactgaagatcaaaccaaccaattgctgtcttcattctggattcaggccaatcaaacagataatactccttttaattatgaggccattggccattcatacagcctaacagttctttcttcccgccttaagaattcaagcaacggcaatatcattcagtttttccaattgccattgtcccttcgaagtgttgctctaaccccgagtgaagttgtgccggcttcttgccaacggtctatttttacattagcaatgagtatgctggcttttgctggaaaagtttgtcacatcactgaactgtcagacttgctaaggtgtttttcatcttcccaaatggacccttacctaagaataggtgacgacttgcaactctatgtaaggttgcaatcggatctaggcagctatggatctgaaagtgatcaggaggttgccaaatccatgctttctgactgcaggacaaaagtagggattaacgatcagcgagtgcttgatgttattgcctctgcactttctaatttcattgagatgggcaaggatgtactagcaaaggagctcgctgagatgttcacacctgaagagatgcctctgtttggttcgaattcagcacttgactgggccaacttcaatgcacaagcattttctgatgaatccctttcttttgatgaggaatgttcaagaacctcttcagtagattgtggcttgcacgagtcaccaatcaccaacactgctagctccatctcaaagattactctaccacagtcggttccacatgttttaggtgtcggtcaattgttggaatcagcgctacatgtggctggccaggttgcgggtgcatctgtttcaacctcacctcttccatatggtacaatgactagtcaatgtgaagcccttggattgggcaccaggaagaagctatcaagctggcttgtcaatggacacgaatcaaccccggacaatcctatgccaagtcttcccactgcccatcattccatcattcccaaggtaaaccctgccatgttccgcacatcatctgaaccatgttctgcagtaaagcttccacctgccagccccttcgataacttcctgaaggcagcctatcgcacccagccggagctgtga

SEQ ID NO: 1114 - protein, 981 aa, Sorghum bicolor
MGFLSAKLLPSCESMCVCCPALRPSSRRPVKRYKKLLAEIFPKTPDGAPNERKIVKLCEYAAKNPLRIPKIAKFLEQRSHKELRSAHVNFVRIITEAYSKLLSICKEQMAYFAISLVNVLTELLESKQENIHILGCQTLANFINSQVDNTYARNIESLVHKVCALSRQQGQEHRLLRAASLQCLSAMIWFMKEHSYIFADFDEMVHSVLESYRTEESNGGGDERHALQHNWVDEIARSECRSGVGGGNDVNINTTTIRLRPARNSSALTRDECDSPEVWSHICVQKLAELAKESTTMRRILDPMLSYFDMKKQWAPRHGLALLVLSDMAYLEKSSGNEQLILTTVIRHLDHKNVSHDPQTKSDIIQTATSLARQLRSRGFAVELVVAGDLCKHLRKTLEAVESGNVEDQNLNESLQNFLEDCLMEVVRGINDVRPLYDMMTITLENLPCMPTVARATLGSLLILSHIISLTSVSSNSPMVFPEALLQQILKSMIHTDIDTRVGAHHMFSAIIVRGPSHLRSESEYLYETKKQSRTTSVFASATALLEKLRREKESLSSDKPRNIVHDDVKEMHEEDKRKNPAYFSKLVSSFIERCAKRSSSVEETNIAMLTEDQTNQLLSSFWIQANQTDNTPFNYEAIGHSYSLTVLSSRLKNSSNGNIIQFFQLPLSLRSVALTPSEVVPASCQRSIFTLAMSMLAFAGKVCHITELSDLLRCFSSSQMDPYLRIGDDLQLYVRLQSDLGSYGSESDQEVAKSMLSDCRTKVGINDQRVLDVIASALSNFIEMGKDVLAKELAEMFTPEEMPLFGSNSALDWANFNAQAFSDESLSFDEECSRTSSVDCGLHESPITNTASSISKITLPQSVPHVLGVGQLLESALHVAGQVAGASVSTSPLPYGTMTSQCEALGLGTRKKLSSWLVNGHESTPDNPMPSLPTAHHSIIPKVNPAMFRTSSEPCSAVKLPPASPFDNFLKAAYRTQPEL

SEQ ID NO: 1115 - DNA, 393 bp, Sorghum bicolor
atggccacctcggtctccgccgtggccgccctagccgttttctcggctccaagaagcctccttcagcgcccggcccagctgccgtcccgccagaacgtcgtgtcgttcttcgtcgggccggcgcgggcgcaccgccggttggtggccgtggcggccagctcgccggccacgccgccggatcttgccaacaaggtgtccgagagcatcaagcaggccaaggagacgtgcgcggatgacccggtgagcgccgagtgcgtggcggcgtgggacgaggtggaggagctcagcgcggccgccagccacgcgcgcgaccggcagaagggcgtcgacccgctcgaggagtactgcaaggacaaccccgagaccgacgagtgccgcacgtacgaggactga

SEQ ID NO: 1116 - protein, 130 aa, Sorghum bicolor
MATSVSAVAALAVFSAPRSLLQRPAQLPSRQNVVSFFVGPARAHRRLVAVAASSPATPPDLANKVSESIKQAKETCADDPVSAECVAAWDEVEELSAAASHARDRQKGVDPLEEYCKDNPETDECRTYED

SEQ ID NO: 1117 - DNA, 168 bp, Sorghum bicolor
atggaccttggcaaaactgttagtatttctctttgggatgatcttgctactacgactggccaagagcttttggacatggttgacagttctcccgtcattgcgatgaagagcctaaaagtatctgacttccaagacctacctgaggctcagaatcttaaatcatggtag

SEQ ID NO: 1118 - protein, 55 aa, Sorghum bicolor
MDLGKTVSISLWDDLATTTGQELLDMVDSSPVIAMKSLKVSDFQDLPEAQNLKSW

SEQ ID NO: 1119 - DNA, 2793 bp, Sorghum bicolor
atggggcccgagaagggtggagcgagggttattggcggcggtggaggaggaggcggcgggatcttcaacctatttgattggaagcgaaagtcacgcaagaagctgttctccaactcgcccgaggggtccaagcttgtcaagaggagcgatgaaaccgtgctgtcagggcgtctccacttgggtgatgaagatgaggggattggtgtatcaagcttcaaggggagcagtgactacagctgtgcgtcttctgtaaccgatgaggaagggcgtgagatgaaggcgccaggtgtggtggccaggcttatgggcttggacgccatgcccacctcgggtgttccagagccatactgcacaccgttccgagacacaaggtcgttcagggacagccacagcctcaagaggagccctgagtactcaatgaatgaccagttcggtcatgttcctcgaagagttgatggctatatcaggaagccattggatctcagagcacccaagatgccaagcagcccgattgaaaggttccagatggaagcattgccaccaaggtccgcaaagcacctaccgatgtctcaccatagattgttgtcccccatcaagaatccaggtttcagttcagcgaggaatgctgcccagatcatggaggaagcagccaagattcttcagccaagagcacaaggcagctctagggagaaaatctgctcttttagcccggcacgaattccttttagagtttcggagccaagagagagcatccctccttctcagaggactgtgcctctgaagccgcaatcatccaagaccgctcctgagctaccagatgtgaggttctccagagctcagcagatgaaccgaagctggaatagcgaggaagatattgtcatcatcacaaattcgtttgattcttatgagattaataatcctagttgttcgaattcgaagaacaacaagggaaagtctatttctttggcagtgcaagcaaagaacaatgtccagaagagggaaggcgtaactggttctgggaggaattcaggattacagaaagagcatgatgagcaaagagcaaaccaaccatttaggagtcagtctaatctccagagaaacaagcagcaaaagaagccatcaacatctggcacttcttcccctgtccttcggcaaaataatcagaaacagaattctttggtaaccagaggtaaggtggcaccaaacaaaactgtctcaacacagcaaggcagaaagctgatggcaggagattcctcttctgggaagatcaagagtggaagcaagatatctaaagctggtggtagaaaagacatcgtggaaagcataaatggtgatagagaaggatcgtcgtcaaacaacaaggacttcccacagaagaaacggttgatagagaggaactccaccaacgagaagggtacatttgtgcctgaaaaaacagtgggtaaacttaagaagcaggttcaacctaatgttgttatggatgagcacattaagtggaacaaggaaagtaaagatactacagatgttgtgtcatttaccttcacctcacccttggtcaaaccattgacaggaccgtccagactggcaggtaagtgggatacaagaagcaatcttgatatggatgcaggatgtgataaagatgattcagataacaaggctgaagggctgtcatcagtgggtctgaactttgtaaatggtgacgcattgagccttctcctagaaaagaagctgaaggagctaacattaaaaattgatccatcaatcacctttacgaggggtgacacatttgtgcctgctacttttaccttggaggaaccaccaacctcttcatgcagcaattggggctcggaaagtggagtatttgactgtagcccttctgaagtgaaaccttctcaatatgattattgcccttcagcacaatcatctacaaaaggccaaattttccgaggcagtaaaataaaggtggaagaacaagaagaatgcagcagcataagcaatgcaaggaaggaacaggaaaatgaagatctaagtcccctatctgtgcttgaaccaacctctctaagtgagagttgctggtcttctgagtgttcaggcagcagcagtgggggtaagggctattcatcactttttgatattaagaatgcccaagggaatttcttgattaacccagcatcagttgatattgaggcaaagacaacagactcagcttcttccgcatcagtagatacatcagatatttctgatgtcacccaatgttctaaaagatcaagacacacagagctggagtacattgcagatgtgctaagcggtgtcaacttgacaacagatgaactgggatcactctttgtcaatcaggatacatcagctttggaccccctcctttttgagaaaatggagaatatgcatgtgtatacacaagggaaggagcctttttgccgtcgagggtacaggcggctgttgttcgactgcgtaaatgaatgcctggagacaagacgcatgacctacttccgggcaggatatgcagcatggagcaaaggagcagcaacgctgagccggggcatagaggccgaagtctgcaatgagatcaccagctggaagagcatgggagactggatggaggatgagcttgtcgacaaggacatgagcagtggactgggcacatgggtcgatttccgggtggaggagttcgaggctggtgaggaggtggagagccacatactgagctcactgcttgatgaggtcatcggcgacatggtcgtgggacgacggcaggagtgtaaatttgtaatttga

SEQ ID NO: 1120 - protein, 930 aa, Sorghum bicolor
MGPEKGGARVIGGGGGGGGGIFNLFDWKRKSRKKLFSNSPEGSKLVKRSDETVLSGRLHLGDEDEGIGVSSFKGSSDYSCASSVTDEEGREMKAPGVVARLMGLDAMPTSGVPEPYCTPFRDTRSFRDSHSLKRSPEYSMNDQFGHVPRRVDGYIRKPLDLRAPKMPSSPIERFQMEALPPRSAKHLPMSHHRLLSPIKNPGFSSARNAAQIMEEAAKILQPRAQGSSREKICSFSPARIPFRVSEPRESIPPSQRTVPLKPQSSKTAPELPDVRFSRAQQMNRSWNSEEDIVIITNSFDSYEINNPSCSNSKNNKGKSISLAVQAKNNVQKREGVTGSGRNSGLQKEHDEQRANQPFRSQSNLQRNKQQKKPSTSGTSSPVLRQNNQKQNSLVTRGKVAPNKTVSTQQGRKLMAGDSSSGKIKSGSKISKAGGRKDIVESINGDREGSSSNNKDFPQKKRLIERNSTNEKGTFVPEKTVGKLKKQVQPNVVMDEHIKWNKESKDTTDVVSFTFTSPLVKPLTGPSRLAGKWDTRSNLDMDAGCDKDDSDNKAEGLSSVGLNFVNGDALSLLLEKKLKELTLKIDPSITFTRGDTFVPATFTLEEPPTSSCSNWGSESGVFDCSPSEVKPSQYDYCPSAQSSTKGQIFRGSKIKVEEQEECSSISNARKEQENEDLSPLSVLEPTSLSESCWSSECSGSSSGGKGYSSLFDIKNAQGNFLINPASVDIEAKTTDSASSASVDTSDISDVTQCSKRSRHTELEYIADVLSGVNLTTDELGSLFVNQDTSALDPLLFEKMENMHVYTQGKEPFCRRGYRRLLFDCVNECLETRRMTYFRAGYAAWSKGAATLSRGIEAEVCNEITSWKSMGDWMEDELVDKDMSSGLGTWVDFRVEEFEAGEEVESHILSSLLDEVIGDMVVGRRQECKFVI

SEQ ID NO: 1121 - DNA, 510 bp, Sorghum bicolor
atggacggaggatccggcaatgcctccggcggcggcggcggcggcagcggcggcgcgtcgacgtgctgctactacgcgctcctcggcatccgcaagaacgcctccgccaccgacatacgcaccgcgtaccggaggctcgcgatgaagtggcacccggaccggtgggccagcgatccaggcgcggccggcgaggccaagcggcggttccagcggatccaggaggcgtactccgttttgtcggacaaggggaagaaggccatgtacgacgccgggctcttcgatcccctcgacgacgacgaccaggatttctccgacttcatgcaggagatgctggtgatgatggataacgtgaaaaacgagaagccggacacgctggaggacctgcagaagatgctagaggacatcgtgaacggcgacggcgtgggcgggcgcgtgccgccgccggcggccgacggtgcccggcggacgcgcgtcgcgccgtacccgcagccgcagcaggcgcgcaggtga

SEQ ID NO: 1122 - protein, 169 aa, Sorghum bicolor
MDGGSGNASGGGGGGSGGASTCCYYALLGIRKNASATDIRTAYRRLAMKWHPDRWASDPGAAGEAKRRFQRIQEAYSVLSDKGKKAMYDAGLFDPLDDDDQDFSDFMQEMLVMMDNVKNEKPDTLEDLQKMLEDIVNGDGVGGRVPPPAADGARRTRVAPYPQPQQARR

SEQ ID NO: 1123 - DNA, 1707 bp, Sorghum bicolor
atgaaaggcgccgtcatcggcgcgtcgaccgtcctggtggtggcggtggtcgccaccatctgcgtcgtgtccttgagaggcagcggcgatggcgacagcagggaggagggcgagatgtcgacgtcggtgaagtccatcaagtccttctgccagcccgtggactacagggagacgtgcgagaaggcgctcagggcggctgccgggaacgccaccagcccgacggacctggccaaggccatcttcaaggtgacgtccgaccggatcgagaaggcggtgcgcgagtccgccgtcctgaacgagctcaagaacgacccgcgcaccaagggcgcgctcgacaactgcagggagctgctggactacgccatcgacgacctcaagacgaccttcgacaggctgggcggcttcgagatgaccaacttcaagagcgccgtggacgacctccggacgtggctcagctccgcgctcacgtaccaggagacgtgcctggacgggttcgagaacacgacgacggcggcggcgggcaagatgcgcagggcgctcaacagctcgcaggagctgacggagaacatcctggcgctcgtggacgagttctccgagacgctcgccaacctgggcatcccgagcttccaccgccggctcctggcggaccacgccggcggcgtgccgtcgtggatgcccgacgccaagcgccggctgcggaaggtctcccccggcgacaagggtttcaagccggacgtgacggtggccaaggacggcagcggcgacttcaggaccatcaacgcggcgctggccaaggtgccggtgaagagcgccgccacgtacgtcatgtacgtgaaggccggcacgtacagggagtacgtgtccgtgccccggaacgtgacgaacctggtgatggtcggcgacggcgccaccaagacggtgatcacgggcgacaagagcttcatgatgaacatcaccaccaaggacacggcgacgatggaggcgctcgggaacgggttcctgatgcgcgggatcggcgtggagaacacggcgggcgccaagaaccaccaggcggtggcgctgcgggtgcagagcgacatgtcggcgttctacgagtgccggttcgacgggtaccaggacacgctgtacacgcacacgagccggcagtactaccgcgagtgcgtcatcacgggcaccatcgacttcatcttcggcaacgcgcaggtggtgttccagaactgcctcatccaggtgcgcaagtgcatggacaaccagcagaacatcgtgacggcgcagggccgcaaggagaggaggtcggcgggcggcaccgtcatccacaactgcaccatcgagccgcacccggagttcgagaagagcgccggcgacggcaagctcaggaccttcctggggcggccgtggaaggagcactcgcgcacgctctacatccagtcggagatcgggggcttcatcgaccccaaggggtggctgccgtggctcggcgacttcggcctcagcacctgctactacgccgaggtggagaaccgcggggccggcgccgacacgagcaagcgtgtcaagtggaggggcgtcaagaacatcacctaccagcacgcgctgcagaagtacaccgtggagagcttcatccagggccagcactggctcccacagctcggcgtgccattcatcccggggctgctgccgcagaaccagtctggcaggatacactga

SEQ ID NO: 1124 - protein, 568 aa, Sorghum bicolor
MKGAVIGASTVLVVAVVATICVVSLRGSGDGDSREEGEMSTSVKSIKSFCQPVDYRETCEKALRAAAGNATSPTDLAKAIFKVTSDRIEKAVRESAVLNELKNDPRTKGALDNCRELLDYAIDDLKTTFDRLGGFEMTNFKSAVDDLRTWLSSALTYQETCLDGFENTTTAAAGKMRRALNSSQELTENILALVDEFSETLANLGIPSFHRRLLADHAGGVPSWMPDAKRRLRKVSPGDKGFKPDVTVAKDGSGDFRTINAALAKVPVKSAATYVMYVKAGTYREYVSVPRNVTNLVMVGDGATKTVITGDKSFMMNITTKDTATMEALGNGFLMRGIGVENTAGAKNHQAVALRVQSDMSAFYECRFDGYQDTLYTHTSRQYYRECVITGTIDFIFGNAQVVFQNCLIQVRKCMDNQQNIVTAQGRKERRSAGGTVIHNCTIEPHPEFEKSAGDGKLRTFLGRPWKEHSRTLYIQSEIGGFIDPKGWLPWLGDFGLSTCYYAEVENRGAGADTSKRVKWRGVKNITYQHALQKYTVESFIQGQHWLPQLGVPFIPGLLPQNQSGRIH

SEQ ID NO: 1125 - DNA, 240 bp, Sorghum bicolor
tttatttctttggtgtgggaaatcaaccagactcacttgattgggcaacaattgctgtctacacatgtcaagggtcatgtgaccaaagtgttagctacaaagaggaatttgcttgggttcagttgtaccctacaaccacgaggcggtaataatgtttacctattcctcggagtaactgctgtccagttctgcaggaatcatctgcaagtacgtaccaccttttggtactataatttttga

SEQ ID NO: 1126 - protein, 79 aa, Sorghum bicolor
FISLVWEINQTHLIGQQLLSTHVKGHVTKVLATKRNLLGFSCTLQPRGGNNVYLFLGVTAVQFCRNHLQVRTTFWYYNF

SEQ ID NO: 1127 - DNA, 1389 bp, Sorghum bicolor
atggcagcagcccctgccggtgcccccgcaatcaccgcctcatcctcctttcttgcttcgccgccgttcgctctcaaggcatcgacgactagccaccgccgacctgcggggagagtctccgtcaacatccgctgcgtcagtagcccgccggccgtcgacacatcttacaagactaatgtcccgcgcaatgctaacatggccaagctccaagcaggatatctgtttcctgagattgccaggagaagagcagctcatttgctgaagtatccagatgccaagataataagccttgggataggtgacactaccgagcccattccaaatgtcataacaaatgccatggcagagagagcacttgccttgtcaacaattgatggctacagcggttatggagccgagcaaggtgaaaagaaactcagagcagcaattgctgcaacctactatgcggaccttggtattgaagattcagatatttttgtctctgatggtgccaagtgtgacatatctcgcttgcaggtcctttttggatctaatgtgacaattgcggtccaagatccctcataccctgcatatgttgattcaagtgttatcatgggccaaactgacttatatcagcaagatgttcagaagtacggaaacattcaatacatgagatgcagtccagaaaatggatttttccctgatctgtcaactatccctcggacagatattattttcttttgttcacccaacaatcctactggtgctgctgcatctcgggaccaactgaccaaattagtaaaatttgcaaaggacaatgggtccatcattgtctatgattctgcttatgcaatgtacatatcagatgacagcccaaagtctatctttgaaattcctggagcaaaggaggttgctcttgagacagcgtcattctcgaaatatgctgggttcactggtgtccgtctaggttggactgttgtccccaaggagctccttttctctgatggacatccagttgctaaagatttcaatcgcatagtctgcacttgcttcaatggtgcatcaaacatttcacaagctggtggtttagcttgcctctctccagagggtctgaaggctatgcatgatgttgttggcttctacaaggagaacactgaaataattgttgacacatttacatcacttggattcaacgtgtatggtgcgaagaacgctccttacgtatgggtgcacttccctggccgcaattcgtgggacgtgtttgctgagatcctggagaaggcgaatgtggttactactcctggcagtggatttggaccgggtggcgaaggctttgtgagggtcagcgcattcggacacagagataacatcattgaagctgcaaggagattaaagcagctgtacaagtga

SEQ ID NO: 1128 - protein, 462 aa, Sorghum bicolor
MAAAPAGAPAITASSSFLASPPFALKASTTSHRRPAGRVSVNIRCVSSPPAVDTSYKTNVPRNANMAKLQAGYLFPEIARRRAAHLLKYPDAKIISLGIGDTTEPIPNVITNAMAERALALSTIDGYSGYGAEQGEKKLRAAIAATYYADLGIEDSDIFVSDGAKCDISRLQVLFGSNVTIAVQDPSYPAYVDSSVIMGQTDLYQQDVQKYGNIQYMRCSPENGFFPDLSTIPRTDIIFFCSPNNPTGAAASRDQLTKLVKFAKDNGSIIVYDSAYAMYISDDSPKSIFEIPGAKEVALETASFSKYAGFTGVRLGWTVVPKELLFSDGHPVAKDFNRIVCTCFNGASNISQAGGLACLSPEGLKAMHDVVGFYKENTEIIVDTFTSLGFNVYGAKNAPYVWVHFPGRNSWDVFAEILEKANVVTTPGSGFGPGGEGFVRVSAFGHRDNIIEAARRLKQLYK

SEQ ID NO: 1129 - DNA, 3906 bp, Sorghum bicolor
atgcccctgtcgcggcacacggtccggaacgagtacgcgctgggcggccgcgacctgtaccgcgcggcggaccagcacgacccggaggccgtcctcgatggcgtcgccatggccggactcgtcggcgtcctccgccagctcggcgacctcaccgaatttgctgcacaggtgttccacggactgtatgatgaggtgatgaccacgtctgcgcgagggcacggcctcatgctccgagtgcagcagctggaggcagagctgccactgctagagaaagactcctgccagagagactacctgtatattgcttcaaacaggggtgtcgattggcattcaaatccaagggtggaccatggggttgtcacaagaggtgacacgcctcgcttcatcatggactcaatcaagcagtgtcgcggaccacccaaactcttcatgctggacaagtatgatatcggtggcgagggggcgtgcttgaagagatacactgacccgtcattcttcaagacggattccgcttgttctaccttgctgcaggaaggaattcaaaatgaaagaagacctctgaaagccatggaaatcaggcctaaccttcagaatgctgagattttccgacccccaaatgcagccgacaatgtctccaaactggagacagatttatctggtgaagctatggatgaagttcccacaaaccgaagacgactgaagtaccgccaactaaatggatctgtatttcaaagcttcagaccacttatgcagaatgtgtatgaaaagccttcatcagaggagaaactcgtcacaggtgaccactcaaaagtgaatatatctatgaatgattctcctgaatcagacaatgaagagagagacatcatggtagatacgtctgtcaacatggaaaaaggcaaggtcactgttcgcaagaacagatcaatttctgaagaagcactgtcacgttcttcagatgctcggtcagcaggaagcagcaagggctacaactctgaatttgatatctacatggatgcattaaccacgatggattctgatgtggagacagatttggaacacaggggccatggacaatgtatcttcgatcggatggattcagacaatagattctccaatgctcaaaacaccatggcatcgaggactagcaacttccagaagacagacaagtcagatgttgcctcaccaaacagagatatgagtaaccagtttgaaaaagccattgtctccacacaacacaccaaaccggttgttggtgaacatgagaggaccagctcattagaggaacagtttgacaaagaaaaaccagcttcttgggatcatgagaggactagctccttggaggaattgctcaccgaagatttcgatgctacagaatctggaataagagagcaagctactgaagaacagatctgcaatggcagtgtcaccagtgttgtatcaaatggcacacaagatattactaagaccaaggaagtcaaggagaattccaacatcgcaactatttccttcaagaaaatagcaagcaagaggtccaagtatgtcggcagcatggagctcattgcttcaaaagttggcattctgccgaggaaactctccaagaagcatgacgctttctctgattccctcaggtacatggcgaagcaactccttgaactgaagtatgatggcactcaagatagagacttatatgacttcgaagcaaacggtgtgggatgtgatgtcaagtaccaggaaacttatgaccctcctgctgaaattaaggacagtgatgtgcacaaaattccgtcagattcaccttatgatgatgtggattcaagaaaatgcctgcaggaagaagtgaaccatgagctggagcatgatgttccacctactgacagtccacacgattcagtccctgatgaagaaaatggatttcaggactccaacatggtctacttggcaggcatcattacatcttgcagttcccaagaggaagaaggatgtgcaagtactgcacttgatgagaatttatctacgggagtgatcaaacatgttttggagcatgctcaagagaagtttgaggaacatcttgacaaggaagtgaatgaggacattcatacagaagtcatttctgaaaatgcatctgataggtgtgaagacttgaaagaagtcagcatttacacggagcaggtgaatgtggaagatattgaggaaagcaataaatctgatgtatatgcattggatgatgaaactgccgagtatatagaagagcaagtttcagatgatgtagtttcagatggtatgatctcttcaccggtttcatccaagcaatcagatgatccttgccggataactccactcgctctcgcagatgaagatgatacagtggcatgtaagatcatcgatagccctgaagtggagcatattacattgtcagaagcatttacggatactgatctacctaatgtggtaactgagtcagtaatcaacagagaacttgccatgccagataatgaacagtactatttacatccaaaaactacttttggacaagatccgattcttggcagcaatgaaattgtagggaaaaatgggcaagcttcactatgcagctcaaccactgcggctataactccagaactaactgtaagcacagaggaaaagcatgagtttcatcaagttgtgtatcaggaaccatcgaattcattaaatagcagtactgaagattttggagatccactagctcctgactccagagatgttccaccgtctgtcatctcaagcttcgattggatgcttaatggtgcgatgcagcagtcattcaatgtccttccttctcatccaactaatggaaatgcacaagaaaatggttcttctgaagatgcgccaccgcttccacctcttccaccaatgcagtggcgaacaaacaagctacagacagggtcatcaccgttatctgcaaagatcggaagaccaccaaggccaaaacctccagtaaaacaacaagaaagtgaagctgcttgggttcttcaggaaatgagtctacacaaaggcttgagtttgcagaatgaagtagtgcaggcaactatttctagtgatcatgagataaatcaaacccttaacatggattgtcatgaaaatcaccaccaggagggagaggactatgatgcccaggattctaatccatttccctcgtcagaagttgaatgcttgtcagaagttgcttcagtaaaaagtgaaaatgtgcacacattgcagctacctgagcttatagttgttccggaagaggcatggtcagtgtttggtaatataaaattcatacaagaacaagaaggagaacaccaactaagcaatggactttctgtttgcaatgacatatacacttctgatttgtcagcacaaaagaccagccagaagcctgaaatttttgcagattataaggaaaaggaatttccagctgcaggtagtgacaaagttgcagattcagaagaaaacagaccaaatggtgctattaaacaggattgtatgctgaatcctgacttgccagcagaacagaaaaacgacgaacatgattgtgatgacaagacaagggagttttcttctgcattagaagaggaatcgtcaaaatcaccaactcatgcagtgccaaaaccacctagatatcctctacttcctgttacttctcatgacagaagcatgctaagagctccagctttggttcagccttcgagtcagctttcagatgaggacacacttttggaacagataaagaacaagtctttcaacttgaagcctgttattgcaaagagaccaaatgtaatgggtggtccaaaaacgaacttgcaagtggtggccattctagagagagcccaagcgattcgccaggctgttgctgatgacgatgacgaggatagctggagtgagtag

SEQ ID NO: 1130 - protein, 1301 aa, Sorghum bicolor
MPLSRHTVRNEYALGGRDLYRAADQHDPEAVLDGVAMAGLVGVLRQLGDLTEFAAQVFHGLYDEVMTTSARGHGLMLRVQQLEAELPLLEKDSCQRDYLYIASNRGVDWHSNPRVDHGVVTRGDTPRFIMDSIKQCRGPPKLFMLDKYDIGGEGACLKRYTDPSFFKTDSACSTLLQEGIQNERRPLKAMEIRPNLQNAEIFRPPNAADNVSKLETDLSGEAMDEVPTNRRRLKYRQLNGSVFQSFRPLMQNVYEKPSSEEKLVTGDHSKVNISMNDSPESDNEERDIMVDTSVNMEKGKVTVRKNRSISEEALSRSSDARSAGSSKGYNSEFDIYMDALTTMDSDVETDLEHRGHGQCIFDRMDSDNRFSNAQNTMASRTSNFQKTDKSDVASPNRDMSNQFEKAIVSTQHTKPVVGEHERTSSLEEQFDKEKPASWDHERTSSLEELLTEDFDATESGIREQATEEQICNGSVTSVVSNGTQDITKTKEVKENSNIATISFKKIASKRSKYVGSMELIASKVGILPRKLSKKHDAFSDSLRYMAKQLLELKYDGTQDRDLYDFEANGVGCDVKYQETYDPPAEIKDSDVHKIPSDSPYDDVDSRKCLQEEVNHELEHDVPPTDSPHDSVPDEENGFQDSNMVYLAGIITSCSSQEEEGCASTALDENLSTGVIKHVLEHAQEKFEEHLDKEVNEDIHTEVISENASDRCEDLKEVSIYTEQVNVEDIEESNKSDVYALDDETAEYIEEQVSDDVVSDGMISSPVSSKQSDDPCRITPLALADEDDTVACKIIDSPEVEHITLSEAFTDTDLPNVVTESVINRELAMPDNEQYYLHPKTTFGQDPILGSNEIVGKNGQASLCSSTTAAITPELTVSTEEKHEFHQVVYQEPSNSLNSSTEDFGDPLAPDSRDVPPSVISSFDWMLNGAMQQSFNVLPSHPTNGNAQENGSSEDAPPLPPLPPMQWRTNKLQTGSSPLSAKIGRPPRPKPPVKQQESEAAWVLQEMSLHKGLSLQNEVVQATISSDHEINQTLNMDCHENHHQEGEDYDAQDSNPFPSSEVECLSEVASVKSENVHTLQLPELIVVPEEAWSVFGNIKFIQEQEGEHQLSNGLSVCNDIYTSDLSAQKTSQKPEIFADYKEKEFPAAGSDKVADSEENRPNGAIKQDCMLNPDLPAEQKNDEHDCDDKTREFSSALEEESSKSPTHAVPKPPRYPLLPVTSHDRSMLRAPALVQPSSQLSDEDTLLEQIKNKSFNLKPVIAKRPNVMGGPKTNLQVVAILERAQAIRQAVADDDDEDSWSE

SEQ ID NO: 1131 - DNA, 1167 bp, Sorghum bicolor
atgctcttcgccccctcgcgcctaccgcctcgcagcctccgcctcgctccgggctccccaatggcctccacgctcgccatcctcaggccctccgcgccggccccgctcgcgggccgccgggcgcgggctgccgcgccggcgaccgcgagggtggcgctgtcgtccagatctaggtattcgtcggccagggtgtcgctcggctccgaggttgcagtgggcgccgacgcgctcttcgccgactataagcccaccaccgctttcctcttccccggccagggtgcccaaaccgttggaatgggggcagaagctcagagtgttccagcagctaccaaattgttcaaccaggcaaatgaaatccttggatatgacttgctggatctttgcaccaatgggccaaaagaaaagctggattcaacagtgatcagtcagccggctatatatgttaccagccttgcagcagtagaggtactacgtgcacgcgatggaggccaagatgtgattaactctgtagatgttacatgtggtctcagtttgggagaatataccgctcttgcatttgctggtgcttttagctttgaggacggactgaagcttgtgaagctaagaggagaagctatgcaggatgcttcagatgctgccaatagtgcaatggttagtgtgattggtctggattcagaaaaggtgcaagaactatgtgatgctgctaatgaggaagtagatgacagtgaaagagttcagatagcaaactttctgtgccctgggaattatgcagtttctggtggtgtaaaaggtattgaagtagttgaagccaaagcaaagtccttcaaggccagaatgacggttcgcctagctgttgctggtgctttccatactagcttcatgcaaccagctgtttcaagattggaatctgcgttggctgccactgagataagaacacctagaatcccagtcatctccaatgttgatgcgcagccccactcagatcctgacaccatcaagcagattttagcgcggcaggtaacctctccggtgcagtgggaaaccactgttaagactcttatgggcaaggggcttgagaaaagttatgaactcggaccaggaaaggttatagcaggtattctcaagagaatcaacaaaggcgctagcattgagaacatcggggcttga

SEQ ID NO: 1132 - protein, 388 aa, Sorghum bicolor
MLFAPSRLPPRSLRLAPGSPMASTLAILRPSAPAPLAGRRARAAAPATARVALSSRSRYSSARVSLGSEVAVGADALFADYKPTTAFLFPGQGAQTVGMGAEAQSVPAATKLFNQANEILGYDLLDLCTNGPKEKLDSTVISQPAIYVTSLAAVEVLRARDGGQDVINSVDVTCGLSLGEYTALAFAGAFSFEDGLKLVKLRGEAMQDASDAANSAMVSVIGLDSEKVQELCDAANEEVDDSERVQIANFLCPGNYAVSGGVKGIEVVEAKAKSFKARMTVRLAVAGAFHTSFMQPAVSRLESALAATEIRTPRIPVISNVDAQPHSDPDTIKQILARQVTSPVQWETTVKTLMGKGLEKSYELGPGKVIAGILKRINKGASIENIGA

SEQ ID NO: 1133 - DNA, 2985 bp, Sorghum bicolor
atggtggccggggcggatgtgggcggcggcgggagcagcaatgggagcggggtggtggagatcgacgaggacctgcacagcaggcagctcgctgtgtacggaagggagacgatgcggcagctctttgcctccaacgtcctcatctccggccttaacgggctaggggccgagatcggggctgttgcttgtgttgcaaagcttcaagaacttaacaatgctgttctcatacatactctaacagaagaattgactactgagcacctttcaaagttccaggtggttgttttcactgacattagtttggacaaggcatttgagtttgatgattattgtcgtaaccaccagcctccaatttcctttatcaagacagaagtctgtggtctttttggtagtgtgttttgcgactttggacctgaattcactgttcttgatgttgatggtgaagatccacgtactggcataattgcatccatcaccatcagcagtgacagtgacaatcatacaatagtgtcctgtgttgatgatgagcgccttgattttcaggatggtgatcttgttgttttctcagaggttcagggtatgacagaactgaatgatggcaagccaaggacagtaatgtgcacaggaccattttccttttgcatcgaggatacaagtaactttggcacttatacaaaaggtggaattgttacacaagtgaaagaacggaagatcttaaagtttaagagtttgagagattcgattagagaacctggggatttccctctgtgtgatttttcaaagtttacccgccctcctctgcttcattttgcatttatagccttggataaatttaggaaagagtttggacgcttccctggtgttgcttgtggtctggatgcccaaaggtttgtggagttcactgcttctatcaatgaagccacaattgactacaagatagaaggcgagcttgatgagaatttgttgcggctttttgcgagtggttctaaagctgtcctgaacccaatggctactatgtttggtggaattgtcggtcaagaagttgtgaaggcatgttctgggaagtttcatccactgtaccagttcttctacttcgattcggtcgaatctctgcctactcaccaactggaccctaaagacttgaagccattgaatagtcgctatgatgctcagatttctgtttttggctctaagcttcaaaaaaaactgcgggatgccaatgtctttgttgtgggatctggtgctcttggatgtgaattcttaaagaacctagctttaatgggagtgtcttgcagccgtagagggaaaattactataacagatgatgatgtcattgagaaaagtaacttgagccgccagtttctgttccgtgattggaatattggacagcctaaatctacagtagctgccacagctgctagtgctatcaattcctgcctgcacattgatgctctccagaaccgtgcctgtctagagaccgagcatgtcttccatgatgcattctgggagggccttgatgttgtcattaatgcacttgataatgttaatgctaggatgtacatggacatgagatgtttgtacttccagaaaccactcctggaatctggaacactgggtacaaaatgtaacacgcaagtggtaattcctcaccttactgaaaattatggggcttcacgagaccctcctgagaagcaggtacccatgtgcacagtccattcatttccacacaatatcgaccattgtgtaacatgggctcgctcagagtttgagggtttgctcgagaaaactccaaaggaagtcaactcttttctgtctaatccttctcaatatgctgctgccatgaaaatggcaggtgatgctcaggccagggagttgcttgatcgtgtatgtgaatgccttgagaaggagtgttgtgagacatttgacgattgcataacttgggcaagactgaaatttgaagattacttctccaatcgtgtgaagcagctaacattcacgtttcctgaagatgctgccactagcatgggaactcctttctggtctgccccaaagcgtttccctcacccactggaattttcagctgctgattcatcacacattcatttcataatgtctgcttccatattgagggcagtgtcttttggaatctctatacctgattgggcaaaggacactgataatctggctgatgcagtgagtaaagttgcagtacctgaatttaagccaaagagcggggtgaagattgagacagatgagaagaccaaaaacatctccactagtgcctcagttgacgatgctgccattatcgaagatcttttaaccaagctggaagcttgtgccaagaaactacctccgagattccaaatgaaacctattcagtttgacaaggatgatgatacaaacttccacatggacttaattgctggtcttgcaaatatgcgtgccaggaactatggcatcccagaggttgacaagctgaaggcaaaatttattgcaggaaggatcatcccagccattgcaacttcaactgccatggccacaggacttgtgtgccttgagctttacaaggttctggccagagggcacccaattgaagactaccacaatacatttgctaacctggccctaccgatgctcaccatatctgaacctcttccccccactgtgatcaagcatcaagatatgaggtggaccgtatgggatcggtggtcgatcaagggagacatcacagtcgcagagctcctgaattggttaagcgacaagggcctgagtgcatacagtgtctcctgcggcacatcgttgctctacaacacaatgttcccaaggcacaaggatcgactgagcaagaagatcgcagatgttaccaaggaagtgacaaaggtggacattccagaatacaggaagcatctggatgtcgtcgttgcttgtgaggatgacaacgggaatgatgtcgacatccctcttatctccatttacttccgctag

SEQ ID NO: 1134 - protein, 994 aa, Sorghum bicolor
MVAGADVGGGGSSNGSGVVEIDEDLHSRQLAVYGRETMRQLFASNVLISGLNGLGAEIGAVACVAKLQELNNAVLIHTLTEELTTEHLSKFQVVVFTDISLDKAFEFDDYCRNHQPPISFIKTEVCGLFGSVFCDFGPEFTVLDVDGEDPRTGIIASITISSDSDNHTIVSCVDDERLDFQDGDLVVFSEVQGMTELNDGKPRTVMCTGPFSFCIEDTSNFGTYTKGGIVTQVKERKILKFKSLRDSIREPGDFPLCDFSKFTRPPLLHFAFIALDKFRKEFGRFPGVACGLDAQRFVEFTASINEATIDYKIEGELDENLLRLFASGSKAVLNPMATMFGGIVGQEVVKACSGKFHPLYQFFYFDSVESLPTHQLDPKDLKPLNSRYDAQISVFGSKLQKKLRDANVFVVGSGALGCEFLKNLALMGVSCSRRGKITITDDDVIEKSNLSRQFLFRDWNIGQPKSTVAATAASAINSCLHIDALQNRACLETEHVFHDAFWEGLDVVINALDNVNARMYMDMRCLYFQKPLLESGTLGTKCNTQVVIPHLTENYGASRDPPEKQVPMCTVHSFPHNIDHCVTWARSEFEGLLEKTPKEVNSFLSNPSQYAAAMKMAGDAQARELLDRVCECLEKECCETFDDCITWARLKFEDYFSNRVKQLTFTFPEDAATSMGTPFWSAPKRFPHPLEFSAADSSHIHFIMSASILRAVSFGISIPDWAKDTDNLADAVSKVAVPEFKPKSGVKIETDEKTKNISTSASVDDAAIIEDLLTKLEACAKKLPPRFQMKPIQFDKDDDTNFHMDLIAGLANMRARNYGIPEVDKLKAKFIAGRIIPAIATSTAMATGLVCLELYKVLARGHPIEDYHNTFANLALPMLTISEPLPPTVIKHQDMRWTVWDRWSIKGDITVAELLNWLSDKGLSAYSVSCGTSLLYNTMFPRHKDRLSKKIADVTKEVTKVDIPEYRKHLDVVVACEDDNGNDVDIPLISIYFR

SEQ ID NO: 1135 - DNA, 1257 bp, Sorghum bicolor
atgatgagagagggtgatgcatgtgttacgcttctaagaagcaagctccatggtctggtcgaaaggaaccgtgctctggaagaggagaacaagcaattgagacaccaagtgagccgattaaaaggtcagatctcctctcttgaaggccaggatactgataagaagatgctatggaagaagctggagaattctgcaaccagcatcagctactccaaggaaaagcagtttgtccaaagcaatgatgatgcaaaggaagccatggatctcaacagctcattgtgtcacagaaggcagcaattctccagggcaacactagtgagatcaagggcgccaagggttccaaatccaccgcccaatccgacatgcacccaaccaaagacaactgtcagaaaggaaggatgcatggcccctcctcctcctccaccacctccactaccttccaagttgcagaggagcacaaaggcgatacaaagggtaccagaggtagtcgagttgtaccggtcgttggtgcggcgtgaaggaaaaaatgatgcaaagtctggatctgtaggaattccagcagcaacgaacagcagagagatgattggggagattgagaacagatcagcttatgttttagctattaaatcagacgtagaaaatcaaggcaattttgtgaacttccttgcaagtgaagttcaaaatgcagcatacaaagagatagctgatgttgaagagtttgtgaaatggcttgatggggaattgtcataccttgtggatgaaagagcagtgctgaaacacttccctaactggcctgagaagaaagcagatgccatgagagaagcagcattcaactatcgagatctgaagaacctagagtcagaagcatcatccttccatgatgacagaagagtggctacacctatggctctcaagcgcatgcaagctctgcaggataaaattgaacaaggtattcataacactgaacgagtaagggacagtgcaagcggaagatataaggatcttaagataccatgggaatggatgctcgactctggagtcataagccaactaaagaaggcttccttgaagcttgcaaaagagtacatgaaccgcattgtcaacacactgaagtcagatccatttgcgaatgacgaggagctacttctgcaaggtgtccgctttgccttccgcatacatcagcttgctggtggctttgacgaaggatgcagaaaagcatttcaagaactaaaaacttatgcaagcaagtcagagtga

SEQ ID NO: 1136 - protein, 418 aa, Sorghum bicolor
MMREGDACVTLLRSKLHGLVERNRALEEENKQLRHQVSRLKGQISSLEGQDTDKKMLWKKLENSATSISYSKEKQFVQSNDDAKEAMDLNSSLCHRRQQFSRATLVRSRAPRVPNPPPNPTCTQPKTTVRKEGCMAPPPPPPPPLPSKLQRSTKAIQRVPEVVELYRSLVRREGKNDAKSGSVGIPAATNSREMIGEIENRSAYVLAIKSDVENQGNFVNFLASEVQNAAYKEIADVEEFVKWLDGELSYLVDERAVLKHFPNWPEKKADAMREAAFNYRDLKNLESEASSFHDDRRVATPMALKRMQALQDKIEQGIHNTERVRDSASGRYKDLKIPWEWMLDSGVISQLKKASLKLAKEYMNRIVNTLKSDPFANDEELLLQGVRFAFRIHQLAGGFDEGCRKAFQELKTYASKSE

SEQ ID NO: 1137 - DNA, 1002 bp, Sorghum bicolor
atggcctccacctcctcctcctcgcctcagccgccgccaccggcggcgtcgccaggggcggcttccccgtccgaggagcgccgcgcaggcggaggcggccggccaccggtcccgccctacgtcaaggcggcggcggggtccctgggcggcgttatggaggcgtgctgcctgcagcccatcgacgtcgtcaagacgaggctgcagctcgaccgcacgggggcgtaccgcggcatcgcgcactgcggcgccaccgtggcccgcgccgagggcgtgcgcgcgctctggaaggggctcacgcccttcgccacgcacctcacgctcaagtacgcgctccggctcggctccaacgccgtgctgcagtccgcgttcaaggaccccgacacgggcaaggtctccgcgcacggccgcctcgcctccggctttggcgccggcgtcatcgaggcgctcctcatcgttacccccttcgaggtggtaaagattagattgcaacaacaaaaagggctaagcccagacttgcttagatataaaggtcccatacactgcgcaagaactatagttcgagaggaaggcatatttggtctttggtctggagcattgccaactgtcatgcgcaatggcacaaatcaagcggcaatgttctcagccaagaacacatttgatattgttctatggaagaagcatgaaggggacgggaaggtgctcctgccatggcagtcaatgatctctgggttccttgcaggaacagcaggccctgtctgcacaggaccctttgatgtcgtgaagactaggttgatggctcaagggagaactggtgacatcaaatacaatggcatggtgcatgccatacgaacaatatattccgaagaggggttgcgagcactgtggaaaggcttgcttccccggctcatgaggattccacctggacaggctataatgtgggcagtggctgatcaggtgatgggcctctatgagcgaacttatctgcagccagttcatatttga

SEQ ID NO: 1138 - protein, 333 aa, Sorghum bicolor
MASTSSSSPQPPPPAASPGAASPSEERRAGGGGRPPVPPYVKAAAGSLGGVMEACCLQPIDVVKTRLQLDRTGAYRGIAHCGATVARAEGVRALWKGLTPFATHLTLKYALRLGSNAVLQSAFKDPDTGKVSAHGRLASGFGAGVIEALLIVTPFEVVKIRLQQQKGLSPDLLRYKGPIHCARTIVREEGIFGLWSGALPTVMRNGTNQAAMFSAKNTFDIVLWKKHEGDGKVLLPWQSMISGFLAGTAGPVCTGPFDVVKTRLMAQGRTGDIKYNGMVHAIRTIYSEEGLRALWKGLLPRLMRIPPGQAIMWAVADQVMGLYERTYLQPVHI

SEQ ID NO: 1139 - DNA, 1164 bp, Sorghum bicolor
atgaggggcttccgctttgcgctggtccgtgcagcgcggtcgcggtcgcgggcggagctccagaccgtgcagcgccgcccgccgtcggatctcgcccaacgtttttcgcactcggcgtcagcgccggcgaggccatccttcggcatcgcgttcgacatcgatggggtcatcctgcgcggccgaagcccgatcgggggcgcgccgcgggccatccgccgcctctattccgaagaaggtagcctgaagattccgtttctgtttttaactaacggaggaggtgttccagagcatagaagggcccttgagctaagccaacttttaggagtcaacatttctccagcacaggttgtgcatggccattctccttacagagagctggtgaagcgtttcaaagatgaccttattgttgctgttggaaaaggagagcctgcagtagtgatgtctgagtacggatttagaaaagttctgtccatagatgaatatgcatcatattataaagatattgaccccctggctcctttcaagacttggaaagttgggcaaacagacagttacatgtttgcgaaagtgcacccatcatatgatgtttactcagagcgagttaaaggagtgtttgttgtcagcgatcctgttgactggggaagagatctacaggtactctgtgacatcttgtctactggtggacttcctgggactgaaaaaggggatcaacctcctttgtattttgcagctgatgatcttgaataccaggctgcatttccttctgagcggcttggcatgggtgccttcaggatagctttggaaagcatcttcaatcaaataaatgatcatccactgaagtatacatcttatgggaaacctaatccatttgtgttcaagaatgcagcaaacatacttggaaaacttattataagtatgtatcctaattcacagacatcaatggaagtaaaagactgtcagttttcaactatctacatggttggcgataatcctaaagtggatatcaatggagctatgaaggctggccacccatggtcatctgttcttacaaggacaggtgtttttagaggaaaagataacgacccacagtttcctgcagatgcggttgttgatactgttgaagatgccatcaactatattctggagaaggaatgtgtacagtga

SEQ ID NO: 1140 - protein, 387 aa, Sorghum bicolor
MRGFRFALVRAARSRSRAELQTVQRRPPSDLAQRFSHSASAPARPSFGIAFDIDGVILRGRSPIGGAPRAIRRLYSEEGSLKIPFLFLTNGGGVPEHRRALELSQLLGVNISPAQVVHGHSPYRELVKRFKDDLIVAVGKGEPAVVMSEYGFRKVLSIDEYASYYKDIDPLAPFKTWKVGQTDSYMFAKVHPSYDVYSERVKGVFVVSDPVDWGRDLQVLCDILSTGGLPGTEKGDQPPLYFAADDLEYQAAFPSERLGMGAFRIALESIFNQINDHPLKYTSYGKPNPFVFKNAANILGKLIISMYPNSQTSMEVKDCQFSTIYMVGDNPKVDINGAMKAGHPWSSVLTRTGVFRGKDNDPQFPADAVVDTVEDAINYILEKECVQ

SEQ ID NO: 1141 - DNA, 750 bp, Sorghum bicolor
atggaggagtacggagggggagacctcctgagcgaggctatgggatctgcggcgcgggtggtggtggtagaggactgcgtggaggcaccaggggccttcgtcctccacctcctcctcaagcgcgcgctcgccagcggcggcgcggctgccttcctcgccctcgcgcagcccttctcccattacgaccgcgtcctgcgcaagatgggttgtaacctttccctgcataggaggaacgagaggcttcatttctttgaattgctaggattcccaggtggagcaagggaaggcacaattgctgataggtttgttcaattgtacaatgaaattcaaagactggtggaggcaaacaggactggagaaaatgcaggccagttcaccgtcattatagatgacgcttccctgttggaaattgtggcccttggttctgtaaatgatgtactggatttcttgcactattgttttgcactcacgtctgagatgaattgcacactagtggttctcatccacgaggatatatatgcagacgaagagaacattggtctccttttacatctgcgctacattgctgatcttgtgattaaagcagcacctttgagcactggtttggctgctgatgttcatggacagctgtcggtggtgaacaagggtacattcggcgagcaaagggcaaaagcacagaaagtttggaacttccatttcaaagtgaaggaaaacggtgctgatttcttctatccagggactagacattag

SEQ ID NO: 1142 - protein, 249 aa, Sorghum bicolor
MEEYGGGDLLSEAMGSAARVVVVEDCVEAPGAFVLHLLLKRALASGGAAAFLALAQPFSHYDRVLRKMGCNLSLHRRNERLHFFELLGFPGGAREGTIADRFVQLYNEIQRLVEANRTGENAGQFTVIIDDASLLEIVALGSVNDVLDFLHYCFALTSEMNCTLVVLIHEDIYADEENIGLLLHLRYIADLVIKAAPLSTGLAADVHGQLSVVNKGTFGEQRAKAQKVWNFHFKVKENGADFFYPGTRH

SEQ ID NO: 1143 - DNA, 1695 bp, Sorghum bicolor
atgtcgtggctccgcagcgcggtgcaccgcgccgtggaggcgagcggcggtcgcagctccctcctcacccgcaccgtccgcacctcccttgacaccgtcgtcagtggcgtccaccacgccggccaggctgtcgcgggcggcgccaggctcatcaccgggaaccggaactacaagagcgtgaaggtggcggcgaagaggttggaagatgcggcgctctcatacaaaggggacgagagggtgcagctgctgcgccggtggctcgtcgcgctcaaggagacccagcgcgcgaccacggcggtgcgggagccgcaacttggggacaatccggaccagaccgtgcccctgctggatctgtacatcgattacgagagcagcgcggagccgatgaactttttccatgtcttcctctacagccaggccatcgagtgtgttgttctctccttgattacggaagccccaactgaggaagaagtttcactgatctcagaagtttttggaatgtgcctttcgggagggaaggatgtgcacaatgcactcttgagtagtttaaaggacctggcaagattattctcgagttatagtgatgaagtgttggcaaaacgtgatgagctgcttgagtttgctcagggtgcggtctcagggctaaagataaatgctgacattgcaagattagataatgaaattactcagttgcaacagcagataaatttaatggatgctcttcgtgctacatcaaccggcaatcaggataaaaaatctcaaacaaccactgagggtttcaaaaaggcagtttctgaggttgataaactgaaggttttgtctgaatcccttgcaaattcatctgcaaaagcagaaaagcgtattatggaaaataggctacaaaaggaagaatctcttatcttccgggtcaccaaaacaaatgaagttagtggtatagaaaaggaagatgaactttcaagatccatagcttcatgcaaagtagaagcaagcactgtcagtgcatggatcagctttttgaaagatacatggaaattgcagtccttgtttgaagagctaagggaaaagcaggccaatgaagaattggatagatgtggactctgctttgcaaaattgatgaagtatcatgtttctgcatgcgtggaagagctaagcacttctgttgactgtattaaaacctttgttgataacttgaaaatatttggtgacagatccgtgtcagcagaggatggagctaatggtccgtctaagcaatcaaaccctcgcaaataccttgaggaagaatatctccaaactgagaaaaaggtcgtagctgcattcagtttggttgatagtctcagagcagtatattcttctaaccaggattactataaaacaagaagggaagatcctgaggtaaaaaatctgtttgccaccgttgacaagctgcgcatcgagttcgaatccgtgccacgtccagtgcttcaaattgagatcaaagaacaggcagagaaaaagaaacgatcccgttccttgatagtgtccgcgtcaccccatccgaggagcgactccccgatcgcggctcagctcaggacacggctgccgtcagagtccgaatcggagctggccaagttcgagctggaatacaaggccgacgagatcggcgggtgggagttcgatgacctcgaagacgagccaacacctggtggcttcctatga

SEQ ID NO: 1144 - protein, 564 aa, Sorghum bicolor
MSWLRSAVHRAVEASGGRSSLLTRTVRTSLDTVVSGVHHAGQAVAGGARLITGNRNYKSVKVAAKRLEDAALSYKGDERVQLLRRWLVALKETQRATTAVREPQLGDNPDQTVPLLDLYIDYESSAEPMNFFHVFLYSQAIECVVLSLITEAPTEEEVSLISEVFGMCLSGGKDVHNALLSSLKDLARLFSSYSDEVLAKRDELLEFAQGAVSGLKINADIARLDNEITQLQQQINLMDALRATSTGNQDKKSQTTTEGFKKAVSEVDKLKVLSESLANSSAKAEKRIMENRLQKEESLIFRVTKTNEVSGIEKEDELSRSIASCKVEASTVSAWISFLKDTWKLQSLFEELREKQANEELDRCGLCFAKLMKYHVSACVEELSTSVDCIKTFVDNLKIFGDRSVSAEDGANGPSKQSNPRKYLEEEYLQTEKKVVAAFSLVDSLRAVYSSNQDYYKTRREDPEVKNLFATVDKLRIEFESVPRPVLQIEIKEQAEKKKRSRSLIVSASPHPRSDSPIAAQLRTRLPSESESELAKFELEYKADEIGGWEFDDLEDEPTPGGFL

SEQ ID NO: 1145 - DNA, 1395 bp, Sorghum bicolor
atgccgcccccgtccctcctgcacctccactcccgcgccccgcttcagccccgccccttcaggatgaactcccgggcagctccgagcagggtcgtcgtctgctccgttgcgtccgccgaggggttcatctccgcagcgccgatcctccttcccgacggtccttggaagcaggtagaaggcggcgttactgctgcgaaggggttcaaggcagcgggcatctatggtgggttgcgtgccaagggcgagaagcctgacttggcactggtcacctgcgacgtcgacgcaactgtagcaggaacatttacaacaaacgtcgttgccgctgcacctgttttgtattgcaagcatgcccttagtacatcgaaaacaggtcgtgctgtgttaattaatgctgggcaagcaaatgctgcaactggtgatcttggctatcaggatgcagtggatagtgcagatgctgttgccaagcttctcaatgtgagcacagataacatattgattcagtctactggtgtcattggtcaaaggataaaaaaggaggcacttttaaattcgctacctagacttgtgggctcgctgtcttcttcagttcagggagcgaattctgctgctgtggccattacaactacagaccttgttagcaagagcattgctgtccagactgagattggtggagtggctatcagaataggtggaatggctaaaggttctggaatgattcacccaaatatggcaacaatgctcggtgttttaaccacagatgctcaagtcagcaatgatgtctggagagaaatggtccggacgtcagtgagtagaagtttcaaccaaattacagtggatggtgatactagtaccaatgactgtgttattgctatggcaagtgggttgtctggtttatctagaattcaaagtcttgatagcattgaggctcaacagttccaagcttgcctagatgcagtaatgcaaggtcttgcgaaatctatagcatgggatggtgagggtgcaacatgcctaattgaggttactgtaagtggcgccaacaatgaggcagaagctgctaaaattgctcgttcagtagcatcttcttctctggttaaagccgctgtgtttggaagagacccaaattggggacgaattgcttgctcagttggctattcaggcattcaatttgatgcaaatcgacttgatatttctctgggagttattccactaatgaaaaatggccaaccactcccctttgacagatccgctgctagcaggtatctcaaagatgctggagatgcccatggtacagtgaacattgatatatcagttgggagtggaggaggaaatggaaaggcatggggctgtgatctgagctacaaatatgttgaaataaatgctgaatatacgacgtga

SEQ ID NO: 1146 - protein, 464 aa, Sorghum bicolor
MPPPSLLHLHSRAPLQPRPFRMNSRAAPSRVVVCSVASAEGFISAAPILLPDGPWKQVEGGVTAAKGFKAAGIYGGLRAKGEKPDLALVTCDVDATVAGTFTTNVVAAAPVLYCKHALSTSKTGRAVLINAGQANAATGDLGYQDAVDSADAVAKLLNVSTDNILIQSTGVIGQRIKKEALLNSLPRLVGSLSSSVQGANSAAVAITTTDLVSKSIAVQTEIGGVAIRIGGMAKGSGMIHPNMATMLGVLTTDAQVSNDVWREMVRTSVSRSFNQITVDGDTSTNDCVIAMASGLSGLSRIQSLDSIEAQQFQACLDAVMQGLAKSIAWDGEGATCLIEVTVSGANNEAEAAKIARSVASSSLVKAAVFGRDPNWGRIACSVGYSGIQFDANRLDISLGVIPLMKNGQPLPFDRSAASRYLKDAGDAHGTVNIDISVGSGGGNGKAWGCDLSYKYVEINAEYTT

SEQ ID NO: 1147 - DNA, 483 bp, Sorghum bicolor
atggactccacaggcgccggagcgggagggaaggtgaagaagggagcgggcgggcgcaaggccggcggcgggccgaggaagaagtcggtgtcgaggtccgttaaggccgggctccagttccccgtcggccgcatcgggcgctaccttaagaagggccggtacgcgcagcgcgtcggcaccggcgctcccgtctacctcgccgccgtcctcgagtacctcgccgctgaggttctggagctcgccgggaacgccgccagggacaacaagaagacgcgcatcatcccccgccacgtgctgctcgcgatccgcaacgacgaggagctcgggaagctgctgtccggtgtcaccatcgcccacggcggtgtgttgcccaacatcaacccggttctgctgcccaagaagacggcggagaaggcgtccagcggcgggagcaaggagcccaagtcgcccaagaaggccgccaagtcccccaagaaggcatag

SEQ ID NO: 1148 - protein, 160 aa, Sorghum bicolor
MDSTGAGAGGKVKKGAGGRKAGGGPRKKSVSRSVKAGLQFPVGRIGRYLKKGRYAQRVGTGAPVYLAAVLEYLAAEVLELAGNAARDNKKTRIIPRHVLLAIRNDEELGKLLSGVTIAHGGVLPNINPVLLPKKTAEKASSGGSKEPKSPKKAAKSPKKA

SEQ ID NO: 1149 - DNA, 1182 bp, Sorghum bicolor
atggtgttcccttcaccttcagtgccggtctacctagatccacatccacctaattggaataaccagcaaggtcagcagccgagggcgagcgggggagccgatgcaccgctgctgcccgtgggtccggcggctgccacagccgcggctccggagcccagtggcttgccgagaagctcatcggcggccagtgccgccgtggccgcgcacgcgaggcccaactcgatggcggagcgcgcgcggctggcgcggatgccgcagccggagccggcgctcaagtgcccgcgctgcgagtccaccaacaccaagttctgctactacaacaactactccctctcccagccccgccacttctgcaagacgtgccgccgctactggacgcgcggcggatccctccgcaacgtccccgtcggcggaggctgccgccgcaacaagcgttcgtccaagtcctcctccgccgccgccgccgggtcttcctcctcctccaagacgtcctcctcgggcaggctgctcggtggtccgtcagctacgccgtccactactccgggcgtaaccggtgcgatcatcactccgggtctcagctctttctctcaccaccacttgccgttcttgggctcgatgcacccgccggggcccaacctagggttagcgttctccgccggactgccgctgctcggcatgcagcacctggacacggtggatcagttcccggtggcaagcggcggcggcaccaccatcggtgcatctctggagcagtggagagtgcagcagcagcagcagcggcagttcccgttcatgactgggggaatactggaccttccacagccgccgacgtaccaactgggtttggaagctaaccgaggaggcggcggcggctcagctgcggcggcgttcactttagggcagcccacgacgaccagtgctactgctaccacgggaaggcaggaagggtcgccaaagaagatggaggacagtaaaggacaagacatgagcttacagaggcagtacatggcggctctacgccacggatcaggagcacacggtggctgggatgggaatgctgctggtggcagtggcagcgacggtggtggcactggcagtgccggttcaacttggccgatgaacattattcctggattccattcttcgtccaccactggtggcaatggcggtggctcgttgtag

SEQ ID NO: 1150 - protein, 393 aa, Sorghum bicolor
MVFPSPSVPVYLDPHPPNWNNQQGQQPRASGGADAPLLPVGPAAATAAAPEPSGLPRSSSAASAAVAAHARPNSMAERARLARMPQPEPALKCPRCESTNTKFCYYNNYSLSQPRHFCKTCRRYWTRGGSLRNVPVGGGCRRNKRSSKSSSAAAAGSSSSSKTSSSGRLLGGPSATPSTTPGVTGAIITPGLSSFSHHHLPFLGSMHPPGPNLGLAFSAGLPLLGMQHLDTVDQFPVASGGGTTIGASLEQWRVQQQQQRQFPFMTGGILDLPQPPTYQLGLEANRGGGGGSAAAAFTLGQPTTTSATATTGRQEGSPKKMEDSKGQDMSLQRQYMAALRHGSGAHGGWDGNAAGGSGSDGGGTGSAGSTWPMNIIPGFHSSSTTGGNGGGSL

SEQ ID NO: 1151 - DNA, 321 bp, Sorghum bicolor
atggagttctacgtggacgagaagtggaagttctccaagaagagccggaacaacgggagccggcgcgtgccgggagccggaggagccggcggcggggactctctgctcaagagatcgtcaagcatgagggacgtcccggcgatcggccggcgcgggagcggtgccgccggcgccgcggcggcggcggcggcggcgggcgggtgcgcgccgcagccgtcgttctcgagccggtgcgcggggctggtgaaggagcagcgcgcgcgcttctacatcatgcgccgctgcgtcaccatgctcgtctgctggaaagactgctcgtag

SEQ ID NO: 1152 - protein, 106 aa, Sorghum bicolor
MEFYVDEKWKFSKKSRNNGSRRVPGAGGAGGGDSLLKRSSSMRDVPAIGRRGSGAAGAAAAAAAAGGCAPQPSFSSRCAGLVKEQRARFYIMRRCVTMLVCWKDCS

SEQ ID NO: 1153 - DNA, 1815 bp, Sorghum bicolor
atggcggaagtggaggacaagctcaaggactacgagatcaagaaggagggagaggcagagatcctcttgcacaagaagaacgccgtcttctataatcccgtgcaggttcacaacagagatatgtccattgctgttttaaggacctttgttgccaagcgcaaggaagaacatgaagcgctggtggacaagaggaatacatcacatgaaaaaaacaaacagagtgaaacatcgagtcaaactggagaggatgcgtcaactggccagcaagatgaaatggatgttgtttgtgaaaaggagctaaataaagctgaagatcaaattgatgatctgccaaaagaagcaacaaaaccttcctggaaagtaaccagggagcttaagccaccacttgtcctcgaggctttggctgctactgggttgcgatctctccggtatgcccgtgaagttgagggcttaggaaaggtagttgctctggataatgataaagcatctgtcgaagattgcaagcgaaacataaagttcaatggcgcttccgctgctagtaaggtggaagcttacttggttgatgctcgaattcacatgctgatgcatccaaaagaatttgatgtggttgatcttgacccttatggatcaccatctatatttctcgactcagctgtacaggctgttgctgatggtggtttattaatgtgcactgccactgatatggcagttctttgtggtaccaatggagaagtttgttactcgaagtatggttcattcccaaccaagggcaagtattgccacgaaatggctttgaggatcctccttgccagtattgagagccacgcaaatcggtacaagcgatatattgtgcctgttctctctgtgttcatggatttttatatccgtgtttttgttcgagtattcacttctgcaagtgaaataaagaatacacctcttaaactttcttacatatatcagtgtgttggctgtgactctttccatcttcagtgtcttgcaaggactgttccgaagaagaataatggtgtgaagcatgcacctgctattggacctgttgttcctcaagaatgcagtgattgtggaaagaaatttaatataggtgggccaatatggtcagctcctattcatgaccaagactgggtagtttctactttgacaggtgttaagtcaatgaaggatagatatcctgcatatgataaaattacttcagttctaactactgtgtcagaggagttacatgacattccattgtttttcagtctccataacatagctggcactgttaagtgcacatctccatctttggttatgtttcgatctgcagttctaaatgcagggtatcagatctcaagcacccatgttaacccacttggcattaagtctgatgccccttgggatgttatttgggacatcatgcgctgctgggtgaagaatcatcctattaaggaacagccccgtgattcaccgggcacggcgatcctttcaaaatcgccaaagctagaagcaaatttttcaagagcagttgctgccctcagcaaggctcaggcgaagaagattaaacgattccttccaaacccagaacggcactggggtccaaaggtcagagcaggcaggaagatcacgagcaaacatatctctctgttgggccctgacgctatcaatggcgctctgaatggtggtgactgccacgaagaaggaaacggtgctggtctagataatacagccccagaacccgaggggatcaaagacgttgagaatgaaccctcaaacaaacgccaaaaaaccagcgacggcgaaccagcaagcgaaccttga

SEQ ID NO: 1154 - protein, 604 aa, Sorghum bicolor
MAEVEDKLKDYEIKKEGEAEILLHKKNAVFYNPVQVHNRDMSIAVLRTFVAKRKEEHEALVDKRNTSHEKNKQSETSSQTGEDASTGQQDEMDVVCEKELNKAEDQIDDLPKEATKPSWKVTRELKPPLVLEALAATGLRSLRYAREVEGLGKVVALDNDKASVEDCKRNIKFNGASAASKVEAYLVDARIHMLMHPKEFDVVDLDPYGSPSIFLDSAVQAVADGGLLMCTATDMAVLCGTNGEVCYSKYGSFPTKGKYCHEMALRILLASIESHANRYKRYIVPVLSVFMDFYIRVFVRVFTSASEIKNTPLKLSYIYQCVGCDSFHLQCLARTVPKKNNGVKHAPAIGPVVPQECSDCGKKFNIGGPIWSAPIHDQDWVVSTLTGVKSMKDRYPAYDKITSVLTTVSEELHDIPLFFSLHNIAGTVKCTSPSLVMFRSAVLNAGYQISSTHVNPLGIKSDAPWDVIWDIMRCWVKNHPIKEQPRDSPGTAILSKSPKLEANFSRAVAALSKAQAKKIKRFLPNPERHWGPKVRAGRKITSKHISLLGPDAINGALNGGDCHEEGNGAGLDNTAPEPEGIKDVENEPSNKRQKTSDGEPASEP

SEQ ID NO: 1155 - DNA, 1440 bp, Sorghum bicolor
atgccggtcaggacatggctcgccgacctgcgctcgaagctcgtcgtcggcgttggcccccgggaccacggcgggcttggcatcctcgccttcgaggcagcagccaccatgtcgcggctcgtgtccctccaccggacggtgtcggacgtcgaggtcaggaggctccgcggcgacgtcttgcgcgccgagggcgtcgcgcggctaacgtccgcggaccaggctctcctgctccgtctcgcgtgcggcgagctcctggcggacctggaccgcgccgccgacagcgtggcgcgcctcggtgcgcggtgctgcgccggcgccggcgacacgccggcgccgctcctgcgggacttcgaccggatctacgccgaggcgaagcgtagccgcctcgcgcagctggacgccacggtcgggttctccaggggcgccacgaagcggttcagggagatggagcgccacgtggtcgtggcggcgaagctgtacgcggagatggacgcgctcagcgagctggaagcgtcgcagcggcggatggagcagtggaagcagcacagcgggcccatcccggcgcagtctttggggacgggcaagaggtcgtcagcgggcgagcccggagagaagctgatgagcaagctcagggcgcagcggcacaaggtgcgacggctcaccgagggatcactctggaacgtcgccgccggcaaggcggcgaggctgatggccaagtccgtcctcgccgtgctcgcacgcatctcccttgctttcagcgcgtccgttccaggcctccccccttggacggtaggacgcgcgtgggcgctgggtcactcgtcaggcccgttgcaccggtcggcgacgcccgcggcgctccggcactcggctcccatcttcggccagaaagacgccgcctctccactgttggaatcgatcaaaccatcggtgagcatggtcggcggctcgagcatggagctgcgatacgcgaacgtgatcttgaccgccgagacgttgctcgcggcgctgaggccgccggcggcaggtgacagcgaggaagtgcaggaagggatgatcgacctgtcgacgagagacgcgctgtacaagatgctgcccgtcagcatccgcgaggccatgaacacgaagctgagagagagatggggtaaaggacaacccgtggacgaggtggctgcggcggaatcgagggatgcggtggagcgtctgctgcgatggttgagcccgatggcgcacgacactctgcggtggaacgacgagcggagtatggagcgggcgcagcggttcggcatgcagccgcgcgcgctcatggtgcagacgctgcactttgccgaccggcagaagacggatgctgctattgttgatgtgctcatcgacctcagctgcatatgctggtacgacgatgagcggcgacggctggagtctcatgactgggacgccgagtag

SEQ ID NO: 1156 - protein, 479 aa, Sorghum bicolor
MPVRTWLADLRSKLVVGVGPRDHGGLGILAFEAAATMSRLVSLHRTVSDVEVRRLRGDVLRAEGVARLTSADQALLLRLACGELLADLDRAADSVARLGARCCAGAGDTPAPLLRDFDRIYAEAKRSRLAQLDATVGFSRGATKRFREMERHVVVAAKLYAEMDALSELEASQRRMEQWKQHSGPIPAQSLGTGKRSSAGEPGEKLMSKLRAQRHKVRRLTEGSLWNVAAGKAARLMAKSVLAVLARISLAFSASVPGLPPWTVGRAWALGHSSGPLHRSATPAALRHSAPIFGQKDAASPLLESIKPSVSMVGGSSMELRYANVILTAETLLAALRPPAAGDSEEVQEGMIDLSTRDALYKMLPVSIREAMNTKLRERWGKGQPVDEVAAAESRDAVERLLRWLSPMAHDTLRWNDERSMERAQRFGMQPRALMVQTLHFADRQKTDAAIVDVLIDLSCICWYDDERRRLESHDWDAE

SEQ ID NO: 1157 - DNA, 1776 bp, Sorghum bicolor
atgggcggcgaggccgagggcggggagcggcggctggggcgggtgctgagctttgggatcccggacacggcgctggggctagtgatggggtacgtggaggacccctgggaccgcgacgccatctcgctggtgtgccgccactggtgccgcgtcgacgcgctgagccgcaagcacgtcaccgtggccatggcctactccacgacacccgagcgcctgttccgccgcttcccgtgcctcgagtcactcaagctcaaagcaaagccccgcgcggccatgttcaacctcatctccgaggactggggcgggtctgcttcgccgtggatccaacagctctcggccaccttccacttcctcaagaagctccacctgcgcaggatgatagtatgcgacgacgatatcaacatcctcgtccgcgccaaggcgcacatgctcgtcgcgctgaagctcgaccgctgctccggcttctccacggcctccatcgcactcatcgcccgctcctgcaagaaactggaaacacttttcctggaagaaagcacgattgatgagagagacaatgatgaatggatccgtgagcttgctacgagcaattctgttcttgagacactgaatttctttctgacagatctcagggcatccccagagtatcttaccctccttgtgcgcaactgtcaaaggctgaaaaccctgaagattagtgaatgtttcatgcctgatctggttagtttgttccgaactgcacaaacactacaagagtttgctggtggttcctttgaagagcagggtcaacctgtggcaagtagaaattatgagaactactattttcctccttcgctgcaccgcttgagtttgctgtacatgggaacaaatgagatgcagatactgtttccatatgctgctgcacttaagaagttagaccttcagtttacattcctttccacagaggagcactgtcagatagttcagcgctgccccaatctggaaaccttagaggtgagggatgtcataggggatcgtggactacaagttgttgcgcagacctgcaagaaactgcagaggctcagagtagagagaggagatgatgatcaaggaggtcttgaggatgaacaaggtaggatttcacaggttgggttgatggctatagcccaaggctgccctgagttgacatactgggcaatacatgtatcggacattacaaatgcagctctagaggcggttggtacatgcagcaaaaatcttaatgatttccgccttgtccttcttgatagagaagcacatataactgaattgccactggacaatggggttcgtgctttgcttagaggttgcaccaaactccggaggtttgcattttatgtgagacctggggccctatctgatgttggtcttggctatgttggagaatttagcaagagcattcgttatatgttgcttggtaatgttggtgaatctgataatggaattatacaattatcaaaaggctgcccaagcttgcaaaaactggagctgaggggttgtttctttagtgagcatgctttagctatggctgcactagagctcaagtcactgaggtatctgtgggtgcaaggattcaggacatctccaactggaactgatcttatggcaatggtacgccccttctggaacattgagtatattgttcccgaccaagatgaaccttgcccagagcatcagaaacagattctggcatactactcccttgctggaaggaggacagattgtcctccatcggtaactctgctttacccggcattttga

SEQ ID NO: 1158 - protein, 591 aa, Sorghum bicolor
MGGEAEGGERRLGRVLSFGIPDTALGLVMGYVEDPWDRDAISLVCRHWCRVDALSRKHVTVAMAYSTTPERLFRRFPCLESLKLKAKPRAAMFNLISEDWGGSASPWIQQLSATFHFLKKLHLRRMIVCDDDINILVRAKAHMLVALKLDRCSGFSTASIALIARSCKKLETLFLEESTIDERDNDEWIRELATSNSVLETLNFFLTDLRASPEYLTLLVRNCQRLKTLKISECFMPDLVSLFRTAQTLQEFAGGSFEEQGQPVASRNYENYYFPPSLHRLSLLYMGTNEMQILFPYAAALKKLDLQFTFLSTEEHCQIVQRCPNLETLEVRDVIGDRGLQVVAQTCKKLQRLRVERGDDDQGGLEDEQGRISQVGLMAIAQGCPELTYWAIHVSDITNAALEAVGTCSKNLNDFRLVLLDREAHITELPLDNGVRALLRGCTKLRRFAFYVRPGALSDVGLGYVGEFSKSIRYMLLGNVGESDNGIIQLSKGCPSLQKLELRGCFFSEHALAMAALELKSLRYLWVQGFRTSPTGTDLMAMVRPFWNIEYIVPDQDEPCPEHQKQILAYYSLAGRRTDCPPSVTLLYPAF

SEQ ID NO: 1159 - DNA, 465 bp, Sorghum bicolor
atggcatccgttctcgccttctcccggtgttcgtcgctgcttctcctcctgctggcgacggcgtcacaggccctcaacgtcggcgacctgctcgggacagcgccttcggggagcaaggattgtagccggacgtgcgaatcatcgttctgcatagtcccgccgctgctgaggtacgggaagtactgcgggatcctgtacagcggctgccccggcgagaagccctgcgacgccctcgacgcctgctgcatggtccacgaccactgcgtcgccacccacaacaatgactacctgaacacgcggtgcaacgagaacctgctgagctgcctcgacagggtgagcccagcggggccgacgttcccggggaacgagtgcggcgtcggccagacggcgtccgtcatacgtggggtcatcgagtcggcagtgctcgcgggcaagatccttcacaagcgcgacgacggcccgtag

SEQ ID NO: 1160 - protein, 154 aa, Sorghum bicolor
MASVLAFSRCSSLLLLLLATASQALNVGDLLGTAPSGSKDCSRTCESSFCIVPPLLRYGKYCGILYSGCPGEKPCDALDACCMVHDHCVATHNNDYLNTRCNENLLSCLDRVSPAGPTFPGNECGVGQTASVIRGVIESAVLAGKILHKRDDGP

SEQ ID NO: 1161 - DNA, 2352 bp, Sorghum bicolor
atggccgcgggcgccgctggtggatccattgtggacgctgcggatagggcgaggctgaccattacagggattggctggacagtatggaaaaagcgttggtttattcttacaaggacatcattagtgttcttcaggagcgatcctagtgttccccctcccaaaggaagtgaaccaattgttacacttggtggaattgacttgaataacactgcaagtatgatagtcaaagaagaaaggaaagttataacggtcgtctttcctgatggccgtgatgggcgcactttcacccttaaggcagaaactacagaagacctaaatgagtggagaagtgcattggagaatgctctggctcaggcacccagtgttgcaaatacagcgggacaacatccgatagtcagtactgacataatagaacctgttgaggctgctgttgaacaatcagatgataagtctgtaatcggcagaccagcagaatttgcacttgtcgatgctgatggcaatacagcatttctggagaaggccttaaaattcattgaagattatggtgtcaaggttgaaggaattctccgtcagtctgctgatgttgaagaagtcaaacgcagggttcaggattatgaaaagggaaagaacgagttctccccagaagaggatgcacatgttatcggtgactgtattaagtgcattcttcgagagatgccatcttttccaattccggcaccatgttgcactgccctggttagagcttaccgaactgacaagacgaaaagacttgatgctatgaataaagtgatatatgaagtattcccagaaccaaatcgtcaattgttgcagaggattctcaaaatgatgcagattgttggatcacacaaagctgtaaataggatgtctccatctgctttggcagcttgcatggcaccgcttcttcttcgtcctcttcttcttggtgaatgtgaaattgatagtgaattcagtatggctggggatggttcattccagttgcttcaagctgctgctgctgccaaccatgctcaagctattgttattattatgcttgaggaatatgatcagatatttgatgatattgaagatggttcgtactcttcagatgcttataccgagtctgacattgacaaggaatattcaacagacaatgacatccctgaagacgatggttcctatggttctggtgaagatgttgaagaagatttaaatgatgatactgaagactcttcaggcatgagggttgaatgtgatagtaacattaggattgataatgcagatgctaaggttaataacaatatcttgagcgacaatgataaagttgttcaacctcctgcaagggccatggatgatacatctaaaatgcagagcaacagttcatccgcagatcatatacaaaaacaaaatgctcattcgtcagtaagcaaaaggaactcatgggggcgtacttcagcaagaaaaggcttgtcaacagaggaggctggctgttgcagtgataccgacgaggctcatattgcgaagcttgaaaacaagaagacccatctccaatctaaacttacagaggaggtaaaagaaaatacagtcctccatgcaaatttagaaaggcgaaaagaagcactacatgagcgtcgtgtagcacttgaaaaagaagtggaaaatttacgagatcagctgcagaaggagagaaatctgagggcttcattggaatctgggctaatgaatatgcggagaggacaagtgtcccttccgtcaacgatagacaccaagactaaggctgatcttgaggaagttgctgctgctgaagctgatattatgaacttgaagcaaaaggtttctgatcttcggggacaactcaacaaccaagtcccattgagttccacctcgttatgtgaatcatgcaacagcaagcgatccataaatgcagacaagtttgtcgaaggtgaacaaaatgccggcctagtcgaagcacaaccaattgtaggctctaattctgtacctgacatgttctgggctacaaaccaaatggttcagaagatgttgtattcgaaaggtgagattgggaaggacggccaagacggatcactaacatcaagatggaactttgcacagagaccgcactcaaatagtccagttacgagcagggttcaaggttcagatgcctattcaagtactaaaaccgaggagtctggggccgcaccatcctttgcattagccaagctgactactcgactcaactttctgaaagaaagaagggccatgcttgccagtgagatgcaaaacttagatctgggtcgctcccaggcccagaagcagacagctcctctgaaaaatgagactccaactgagaagtag

SEQ ID NO: 1162 - protein, 783 aa, Sorghum bicolor
MAAGAAGGSIVDAADRARLTITGIGWTVWKKRWFILTRTSLVFFRSDPSVPPPKGSEPIVTLGGIDLNNTASMIVKEERKVITVVFPDGRDGRTFTLKAETTEDLNEWRSALENALAQAPSVANTAGQHPIVSTDIIEPVEAAVEQSDDKSVIGRPAEFALVDADGNTAFLEKALKFIEDYGVKVEGILRQSADVEEVKRRVQDYEKGKNEFSPEEDAHVIGDCIKCILREMPSFPIPAPCCTALVRAYRTDKTKRLDAMNKVIYEVFPEPNRQLLQRILKMMQIVGSHKAVNRMSPSALAACMAPLLLRPLLLGECEIDSEFSMAGDGSFQLLQAAAAANHAQAIVIIMLEEYDQIFDDIEDGSYSSDAYTESDIDKEYSTDNDIPEDDGSYGSGEDVEEDLNDDTEDSSGMRVECDSNIRIDNADAKVNNNILSDNDKVVQPPARAMDDTSKMQSNSSSADHIQKQNAHSSVSKRNSWGRTSARKGLSTEEAGCCSDTDEAHIAKLENKKTHLQSKLTEEVKENTVLHANLERRKEALHERRVALEKEVENLRDQLQKERNLRASLESGLMNMRRGQVSLPSTIDTKTKADLEEVAAAEADIMNLKQKVSDLRGQLNNQVPLSSTSLCESCNSKRSINADKFVEGEQNAGLVEAQPIVGSNSVPDMFWATNQMVQKMLYSKGEIGKDGQDGSLTSRWNFAQRPHSNSPVTSRVQGSDAYSSTKTEESGAAPSFALAKLTTRLNFLKERRAMLASEMQNLDLGRSQAQKQTAPLKNETPTEK

SEQ ID NO: 1163 - DNA, 1608 bp, Sorghum bicolor
atggggatgatcgtcggcgtcgccctgatcgcgggctgggcgcgcgccatggctcgccgcgccgccaaacgcagcaacaaggctgcggatgtcagtgcactaggatctctcaaccgtgaagacgtgaagaaaatatgtggagaaaatgttccccaatggatatcatttccagaatatgagcaggtcaaatggctcaacaaacaattgagcaagctttggccctttgtggaagaggcagcaaccatggtcatcagggattctgtcgaacctatactggatgattatcgaccaccagggatatcctcactgaagttcagcagactctcccttgggactgttccaccgaaaatagaaggcattcggattcagagttttaagaaagggcagattacaatggacatggacttccggtggggtggggatccaaatattattcttgcagtcgaaacacttgttgcttcgcttcccattcagtttaagaaccttcaagtgtacaccatcatccgtgttgtcttccaattgtcggacgagataccatgcatatctgctgttgtcgttgctcttatggcagagccaaaaccgagaatcgactacatactcaaagccgtgggaggaagcctgaccgcagtgcctggcctttcagacatgattgacgatacagtggcgtcagtgatcactgacatgctccaatggccacacagaatcgttgttccactgggtggagtcgacgttgacgtcagtgatcttgagctgaagccacacgggaagctcacggtcactgtggtccgcgcggaatccctcaagaacaaggaactcatcggcaaatccgacccctacgtggtcctgttcatacgcccaatgttcaaggagaagaccagcgtcattgacgacaacctcaaccctcattggaacgaaacgttccatctgatcgcggaggacaaggagacgcagtccctagttcttgaggtgttcgatgaggacaacatgaagcaagacaagaggcttggcatcgcaaagctgccccttagcgacctggagatggagaccgtgcaggaggtgaacctgcagctgctgtcgtcgctggacacgaccaaggtcaaggacaagaaggacaggggcatgctcagcatcaaggcaggatcgatcagcctcgtcctttttcgtgttcagttggcagcagcaacaagtccccggttgcctgacgttcctttttgcaagctactattgcaggtggtgtaccaccagttcaccaacgcagaggcgcgggaggccctggagctggagaagcagaccgtggaggagcggcggaaggtgaagagcgagacggcggccgtcagcggcgccgcggacggggcaagcagcggcacggcgtccacggtcacccacgtggccggcacgggcgtcgcggcggccggcacgggtgactcccgtgccggctccagcggtgggatgggcatcggcgctgtgggctccggcattggcgcgttcggcagtggactccataaggccggcaagtcagccggcaagttcgtcggccggactgtcacgggacccttcagcagcgctaggcgcagcgccagcaacgtccccaacgtcgttgacgagtga

SEQ ID NO: 1164 - protein, 535 aa, Sorghum bicolor
MGMIVGVALIAGWARAMARRAAKRSNKAADVSALGSLNREDVKKICGENVPQWISFPEYEQVKWLNKQLSKLWPFVEEAATMVIRDSVEPILDDYRPPGISSLKFSRLSLGTVPPKIEGIRIQSFKKGQITMDMDFRWGGDPNIILAVETLVASLPIQFKNLQVYTIIRVVFQLSDEIPCISAVVVALMAEPKPRIDYILKAVGGSLTAVPGLSDMIDDTVASVITDMLQWPHRIVVPLGGVDVDVSDLELKPHGKLTVTVVRAESLKNKELIGKSDPYVVLFIRPMFKEKTSVIDDNLNPHWNETFHLIAEDKETQSLVLEVFDEDNMKQDKRLGIAKLPLSDLEMETVQEVNLQLLSSLDTTKVKDKKDRGMLSIKAGSISLVLFRVQLAAATSPRLPDVPFCKLLLQVVYHQFTNAEAREALELEKQTVEERRKVKSETAAVSGAADGASSGTASTVTHVAGTGVAAAGTGDSRAGSSGGMGIGAVGSGIGAFGSGLHKAGKSAGKFVGRTVTGPFSSARRSASNVPNVVDE

SEQ ID NO: 1165 - DNA, 744 bp, Sorghum bicolor
atggacaaccagccgctgccctactccaccggccagccccctgcccccggaggaaccccagtagtgccgggcgtgcccggcgcagccggccctccgccggtgccgcaccaccacctgctccagcagcagcaggcccagctgcaggcgttctgggcgtaccagcgccaggaggcggagcgcgcgtcggcgtcggacttcaagaaccaccagctgccgctggcccggatcaagaagatcatgaaggccgacgaggacgtgcgcatgatctccgccgaggcgcccgtgctgttcgccaaggcctgcgagctcttcatcctcgagctcaccatccggtcctggctgcacgccgaggagaacaagcgccgcaccctgcagcggaacgacgtcgccgcggccatcgcgcgcaccgacgtcttcgacttcctcgtcgacatcgtgccccgcgaggaggccaaggaggagcccggcagcgccctcggcttcgcggcgtccgggaccggcgtcgtcgggggtggcgccccgggcggggcgccggccgccgggatgccgtactactatccgccgatggggcagccggcgccgatgatgccggcctggcatgttccggcctgggacccggcctggcagcaaggggcagccgatgtcgatcacagcggcagcttcagcgaggaaggacaagcagggtttgctgcaggccatggcggccccgctagcttccctcctgcgcctccgagctccgagtga

SEQ ID NO: 1166 - protein, 247 aa, Sorghum bicolor
MDNQPLPYSTGQPPAPGGTPVVPGVPGAAGPPPVPHHHLLQQQQAQLQAFWAYQRQEAERASASDFKNHQLPLARIKKIMKADEDVRMISAEAPVLFAKACELFILELTIRSWLHAEENKRRTLQRNDVAAAIARTDVFDFLVDIVPREEAKEEPGSALGFAASGTGVVGGGAPGGAPAAGMPYYYPPMGQPAPMMPAWHVPAWDPAWQQGAADVDHSGSFSEEGQAGFAAGHGGPASFPPAPPSSE

SEQ ID NO: 1167 - DNA, 693 bp, Sorghum bicolor
atggcgaccgcagcccaggtcgccgccaccttcctctcgttcctctcctcctcctcctcctccactcaccaccccgccccctcctcctccgtctccctcgtgacgaaccctgtcctacctgtctcccttcgggccgctggcccacggctcgcctcccgcctccggggccgccgcgtcggcgccgccgtcgcccagctccccaccgcgcatccggaagtagcttctggggagaagaagatcagatggtcatcaagggcggtgcggtcttttgcgatggcggagctggaagcccggaagatgaggtaccctaccacaggcaccgaggggctgctcatgggcattcttgttgaaggaactagtggtgcagcaaaacttttgcgtgctaatggaaccacacttctcaaagtgcgtgacgaggcagcgaatgtgcttgggaaatcagaaatgttttactttagtcccatgcatccaccattgacagaagctgcacaacgagcccttgattgggctgtcaatgaaaaactgaaatcaggtgaggatggagaagtaactgccaatcatttgctactggggatatggtcagataaagagtcagctggtcataaaatcctggaatcacttggatttgacgatgagaaagccagtttactggccaaaacggctaatgaagaggctgcaatgagtcctagatag

SEQ ID NO: 1168 - protein, 230 aa, Sorghum bicolor
MATAAQVAATFLSFLSSSSSSTHHPAPSSSVSLVTNPVLPVSLRAAGPRLASRLRGRRVGAAVAQLPTAHPEVASGEKKIRWSSRAVRSFAMAELEARKMRYPTTGTEGLLMGILVEGTSGAAKLLRANGTTLLKVRDEAANVLGKSEMFYFSPMHPPLTEAAQRALDWAVNEKLKSGEDGEVTANHLLLGIWSDKESAGHKILESLGFDDEKASLLAKTANEEAAMSPR

SEQ ID NO: 1169 - DNA, 780 bp, Sorghum bicolor
atggagatacaagcacgacagctactggtggccattttgggcattgtgatagcgatagctttcgccgatgccgtgcaaggagcgacagcaacgccggttgttgtcggcctggccaagtgctcggactgcgccaggaggaacatgaacgctgaggcagctttcaaaggtcttcaggtggctgtcaagtgcaagaacagcaagggcgagtacgagagcacggcggtgggacaggtggacaagtccggcgccttcagcgtcccgctggccgccgatgccgttggtgaggacggggagctcaagtcggaatgcttcgcgcagctccacagcgcgtcgagtgcgccgtgccccgggcaggagccctccaagatcgtcgcggcgccaccgggcggccacgacggcaacgagaagacgttcgttgcgctcggcggcaaggtccaccgctcgtcgcccgagtgcgcttcggctttcctttgccaccatttcttccacagcattatgcaccatcatcacgtaggaacccacacgcctgtggttctccctcacgcgcctgatcacggccacggcggccattccctgccgcctgtcaccaagccgccggcggtagacgtgcctgagcacaaaccggcgccggtgaccgtgccggagcacaagcctccgtcgacgccggtggacactccgtcaacgcccaccgccccgtcgacgacgccagtgtattcgccgccgacgccaactcccatctaccacccgccggcgcagcgggacgctgtcactggcccgtag

SEQ ID NO: 1170 - protein, 259 aa, Sorghum bicolor
MEIQARQLLVAILGIVIAIAFADAVQGATATPVVVGLAKCSDCARRNMNAEAAFKGLQVAVKCKNSKGEYESTAVGQVDKSGAFSVPLAADAVGEDGELKSECFAQLHSASSAPCPGQEPSKIVAAPPGGHDGNEKTFVALGGKVHRSSPECASAFLCHHFFHSIMHHHHVGTHTPVVLPHAPDHGHGGHSLPPVTKPPAVDVPEHKPAPVTVPEHKPPSTPVDTPSTPTAPSTTPVYSPPTPTPIYHPPAQRDAVTGP

SEQ ID NO: 1171 - DNA, 381 bp, Sorghum bicolor
cgtcatctccgctccgcctccttctcgccggcttcctgtgtgtcatcctgtcgctgtcaccgtctcgttgtttgctaccaccactgccgcaccggctggctggctgcgctgaaacagcagccgcgctacgctgaccggcgagggcggccggcaagactggccgttcgtccggtcctccccctccggcctccgcgcaacggcgcaagggacgcgacggggccggcctcggcctcggcctcggcctcgtgctttttgtgcgtggttggagtggttgagccgatggcgacgagcgatcccgggcggcgggcgtggcgccatgacggcaaccattttaatacgcgcgcccagcagctgaaacctgacaagctaaccagattttag

SEQ ID NO: 1172 - protein, 126 aa, Sorghum bicolor
RHLRSASFSPASCVSSCRCHRLVVCYHHCRTGWLAALKQQPRYADRRGRPARLAVRPVLPLRPPRNGARDATGPASASASASCFLCVVGVVEPMATSDPGRRAWRHDGNHFNTRAQQLKPDKLTRF

SEQ ID NO: 1173 - DNA, 1149 bp, Sorghum bicolor
atgggaaagggagatgtggctactaggtccaaatctcaaaaatcgtcagcaatacagaatgagcagagtacacctactaacccccccacagcatatcctgattggtctcagttccaggcatactataatgctcctgggacagctcccgtgaccccaccggctttttttcattcatctgtagctccaagccctcagggacacccatatatgtggggtccacagatgatgcctccttatgggacaccaccaccatatgcagcaatgtatgcacaaggcacaccatatcagcaggcaccgatgccaccgggttcacacccatacagcccttatcctatgcagtcaccaaatgggacagttcaaactccaacatctggtgctggcggtacagagacaaataaatcgaataaaaataagcggaagactcccctgaaaagatcaaaaggaagcttaggtagtctggatgttgttgcagtaaaaaacaacaagtcaccggcaaagcctcaagcttcttcctccaatgaaggttcttcacaaagtgagagtggaagcgggagttcttctgaaggaagcagtacaaattcaaaaagtagttcaagggcgaaggatggttctgagcaaggtcagggtaatgatgctaggagtaaaggtactcaaagctctgcagttgagcccacacaaccatcttctgggcctgttgtgcttaaccctatgatgccattttggcctgttccccctcctatggctggcccagcaactactctgaatatgggagtggattactggggtactcctgcttctgtacccatgcatggtaaagttattgcagcaccgacatcagctccttcatcaaattcacgtgatattgttctcagtgatccggctatacaggatgagagagaaatgaagagacaaaaacggaagcaatcaaatagggaatcagctcggcgctcaagattgcgcaagcaggctgaatgggaggaagtagccaatcgtgcagatttgctaaagcaggaaaatagttcgcttaaagaagaattgaaacaacttcaggagaagtgtgatagcttgacctcagaaaatacatctctacacgagaagcttaaagtgcttgaggatgagaaatcaaatggaaattggtgcaaggattaa

SEQ ID NO: 1174 - protein, 382 aa, Sorghum bicolor
MGKGDVATRSKSQKSSAIQNEQSTPTNPPTAYPDWSQFQAYYNAPGTAPVTPPAFFHSSVAPSPQGHPYMWGPQMMPPYGTPPPYAAMYAQGTPYQQAPMPPGSHPYSPYPMQSPNGTVQTPTSGAGGTETNKSNKNKRKTPLKRSKGSLGSLDVVAVKNNKSPAKPQASSSNEGSSQSESGSGSSSEGSSTNSKSSSRAKDGSEQGQGNDARSKGTQSSAVEPTQPSSGPVVLNPMMPFWPVPPPMAGPATTLNMGVDYWGTPASVPMHGKVIAAPTSAPSSNSRDIVLSDPAIQDEREMKRQKRKQSNRESARRSRLRKQAEWEEVANRADLLKQENSSLKEELKQLQEKCDSLTSENTSLHEKLKVLEDEKSNGNWCKD

SEQ ID NO: 1175 - DNA, 1584 bp, Sorghum bicolor
atggagaatagcagcgcgttgtcacccccggcacctgcggccagaggctcgccgccggtagcgccgtcaagggactccccgccgtcacaaccggcttcgaagcacagcggtggtgactccaacaagagtggcggccgcagcaagagcggaagtagtagcaacgaggcaacacaggtaggtgtcatcgtggtcggcgtggtgatcggtgccctagccttcggcctgctgatgtgcatcgccgcatgcgtgtgctgcctcaagaaaaaaaagaggaagaagcccccgcacatgaacatgccatactacaccgacgagcacgggaacgtcttctacgcgaacagcatgcccaagtggcagaacagcgcgatggaccacggctggcacgcgccctactcgccggcgagcggggacatgagcggctctcacgggcctgccgggcaggtgccggcgccgtcgccgggcatgccgtcgctggggttctccaagagctccttctcgtacgaggagctggcggcggcgacgggcggcttctcgtcggcgaacgtgctggggcagggcgggttcgggtacgtgtacaggggcgtgctcgcgggcagcggcaaggaagtggccgtgaagcagctcaaggccgggagcgggcagggcgagcgcgagttccaggccgaggtggagatcatcagccgagtccaccaccgccacctcgtcacccttgtcgggtactgcatcgccggctcctcccagcgcctgcttgtctacgagttcgtgcccaacaataccctcgagtaccacctccacgggaagggcgtgccggtgatggagtggccgaggaggctcgccatcgccctcggctccgccaagggcctggcttacctgcacgaagattgccaccccaggatcatccaccgtgatatcaaggcggccaacatccttttggacgaaaatttcgaggctaaggtcgcggatttcggacttgccaagctgaccacagacaccaacacgcacgtctccacgcgcgtcatgggaactttcgggtatttggccccggagtacgcgtcgagcggcaagctcaccgacaagtccgacgtgttctccttcggcgtcatgctcctggagctcatcaccggcaagagaccgattgatcccacgaactacatggaggacagcctggttgactgggcgaggcccctcttggcgcacgccttgtccggagaaggcaacttcgacgagctgctggacccgcggctggagaacaggatcaaccggcaggagctggagcggatgtgtgcctccgccgccgccgccgtccgccactcagccaagcggcggcccaagatgaaacagattgttcgtgctctggaaggggacgcgtcgctggacgacctgaacgagggggtgaagccagggcagagcatgatgttcagctctggctcggagaacgactccggcggcaactacgcgtccaacatcaacaggttcaggaaggtggccttcgagagcagcgagtacagcaacgagtacagcgggacaagcgaatacggcgctgattccgaggatggggcgtcccggcggcagcaacatcgctga

SEQ ID NO: 1176 - protein, 527 aa, Sorghum bicolor
MENSSALSPPAPAARGSPPVAPSRDSPPSQPASKHSGGDSNKSGGRSKSGSSSNEATQVGVIVVGVVIGALAFGLLMCIAACVCCLKKKKRKKPPHMNMPYYTDEHGNVFYANSMPKWQNSAMDHGWHAPYSPASGDMSGSHGPAGQVPAPSPGMPSLGFSKSSFSYEELAAATGGFSSANVLGQGGFGYVYRGVLAGSGKEVAVKQLKAGSGQGEREFQAEVEIISRVHHRHLVTLVGYCIAGSSQRLLVYEFVPNNTLEYHLHGKGVPVMEWPRRLAIALGSAKGLAYLHEDCHPRIIHRDIKAANILLDENFEAKVADFGLAKLTTDTNTHVSTRVMGTFGYLAPEYASSGKLTDKSDVFSFGVMLLELITGKRPIDPTNYMEDSLVDWARPLLAHALSGEGNFDELLDPRLENRINRQELERMCASAAAAVRHSAKRRPKMKQIVRALEGDASLDDLNEGVKPGQSMMFSSGSENDSGGNYASNINRFRKVAFESSEYSNEYSGTSEYGADSEDGASRRQQHR

SEQ ID NO: 1177 - DNA, 1209 bp, Sorghum bicolor
atggccgcgacggcggcggagaggatggtgggggcggagtgggaggaggaggaggaggggaagcaggggatgaggaggaggaagcggtacgggctggtggagtaccgggcgctgccggcctacctgcgggacaacgagtacatccaccgccattaccgctgcgagtggccgctcccgcaggtgctgctctccgccttctccatccacaacgagacccttaacgtctggacgcatcttattggatttttcatctttctcgctctgaccatatacacagcaacacaagttccaaatgtagtagatattcagagcttgcaacatttgccggatgtgctgagaaaggctgatattcataagattcaggcggagcttgtgtcatgtcttccgtcgttacctcatctttcggatctacaaaagctgaaggatgagctgaagagctcttggaattctatggaggttcttccatctctgtcccgttggcatctcttggagttactcgcaagttgtttgccacacagatttacccatccaaatgaaacaagtttgtctgttcttcaaagcatgaaggaggatctagcaaacctgattgcgccgcaactgatcagaccaattgcgcggtggccattctatgccttcttgggaggagccatgttctgccttctcgccagcagtacttgccaccttctctcgtgccattctcgccgcctagcgtacattatgcttcggcttgattacgcaggcattgcagctctaatcgccacatccttctaccctccagtatactattctttcatgtgctaccccttcttttgcaacatgtacctcagtttcataaccatcctaggagtggcaactatcgcgttctctctacttccggtcttccagagccctgagttcagaaccatcagagcatgcctcttttttggcatgggcgcatccggtgtgatacccgttcttcataagctggtcctcttctggcatcaaccggaggcattgcacacgaccggatatgaagttctgatggggctcttctacgggctgggagcactggtatatgcgacccgggtacctgagcgctggatgcctgggaagtttgacatcgccgggcacagccaccagctgttccacgtcttggttgttgccggagcctacacacactaccacgcagggctggtgtacctcaagtggagagacgtgcaaggctgctga

SEQ ID NO: 1178 - protein, 402 aa, Sorghum bicolor
MAATAAERMVGAEWEEEEEGKQGMRRRKRYGLVEYRALPAYLRDNEYIHRHYRCEWPLPQVLLSAFSIHNETLNVWTHLIGFFIFLALTIYTATQVPNVVDIQSLQHLPDVLRKADIHKIQAELVSCLPSLPHLSDLQKLKDELKSSWNSMEVLPSLSRWHLLELLASCLPHRFTHPNETSLSVLQSMKEDLANLIAPQLIRPIARWPFYAFLGGAMFCLLASSTCHLLSCHSRRLAYIMLRLDYAGIAALIATSFYPPVYYSFMCYPFFCNMYLSFITILGVATIAFSLLPVFQSPEFRTIRACLFFGMGASGVIPVLHKLVLFWHQPEALHTTGYEVLMGLFYGLGALVYATRVPERWMPGKFDIAGHSHQLFHVLVVAGAYTHYHAGLVYLKWRDVQGC

SEQ ID NO: 1179 - DNA, 1896 bp, Sorghum bicolor
atggaacctcgccatttctgctgcgctttgctgcttctcctcggcctccggcaagccggtgcccaggacaacacaaactacaccgtccccgcgcagttcgcctgtaacgtgtcgtcgtcgccgccgccgtgcgacacgtacgtggtgtaccggacgcagtccccggggtaccaggacctcggcagtatctcggacctcttcggcacgagccaggcccggatcgccagcgccaacggtctcagctccgaggacggcgtgctgcagccaggccagccgctgctcgtgcccgtcagcaagtgcggctgcacgggcggctggtccttcgccaacgtcacgtacccgatccggcaaggcgacaccttcttcaacctcgccagagtctcctacgagaacctcaccctgtaccaactcatccaaaatctgaacccgaggtcggtacccaccagtctacaggtcgggcaggaggtcacggtgccgctcttctgccggtgcccggctcccgctgagcggagcagcttcatcacctacgtgtggcaagcaggggacaccatgtcccaggtgagcaagctgatgaacaccaccgaggacgagatcgccgaggccaacaacgtcactagcagctctgcctccgcgtccctcgtggggcagccgatgctgatcccagttcaacagcggccgcggcttccgccgctgcactacgctgctagtgcaggcgacggcaagtcccggtggcgacgtcgggctgtcatcataggcgccagcgtctcggggtctgtcgtcgcgctcgccgccttgttcgtggcgatcctggcgctccgaaggtaccgaaagaagccgtcgatgcgcctgggttcacggttcgccgtgaacaccaagctcacttggtccaggaaccaattcggccatgacagcagtaattccttcgctcacatgatgaaactgaaaggaggcaagctgctaaccggcgtgtcggagttcatcgacaagcccatcatcttcttggaagaggagatcatggaggccacgatgaaccttgacgagcggtgcaagatcggcagcacgtactaccgggcgaagctcgacggggaggtgtttgcggtgaagccagcgaaaggcgacgtgtcggcggagttgaagatgatgcagatggtcaaccacgccaacttgatcaagctggccggcatatccatcggcactgacggggactacgcgttcctggtgtacgagttcgccgagaagggctcgctcgacaagtggctgtaccagaagccaccgtcggcgctgccgtcgtcgtcgtgctgcaccgtggcaactctctcgtggggccagaggctgagcatcgcgctggacgtcgccaacggcctactctacatgcacgagcacacgcagccgagcatggtgcacggcgacatccgcgcgcggaacatcctcctgacggcggaattcaggaccaagatatcaggcttctccctggccaagccagccacggccgacgccgccgcgacgagctccgacgtgttcgccttcgggctgctcctcctggagctcctgtccggcaggagggcgatggaggcgcgcgtcggctcggagatcggcatgctgtggagggagatccgtggcgtgcttgacgccggcgacaagagggaggcgaagctgggcaagtggatggaccccgctctgggaagcgagtaccacatggacgcggctcttagcctggccggcatggcgagggcctgcactgaggacgacgcggcgaggcggccgaacatgaccgaggttgtgttcagcctctccgtgctggtgcagccattgacagtggccgacggattcgagaagatgtggcaacccagttcggacgacaacattcggatggccagctcggtgtcagctcgataa

SEQ ID NO: 1180 - protein, 631 aa, Sorghum bicolor
MEPRHFCCALLLLLGLRQAGAQDNTNYTVPAQFACNVSSSPPPCDTYVVYRTQSPGYQDLGSISDLFGTSQARIASANGLSSEDGVLQPGQPLLVPVSKCGCTGGWSFANVTYPIRQGDTFFNLARVSYENLTLYQLIQNLNPRSVPTSLQVGQEVTVPLFCRCPAPAERSSFITYVWQAGDTMSQVSKLMNTTEDEIAEANNVTSSSASASLVGQPMLIPVQQRPRLPPLHYAASAGDGKSRWRRRAVIIGASVSGSVVALAALFVAILALRRYRKKPSMRLGSRFAVNTKLTWSRNQFGHDSSNSFAHMMKLKGGKLLTGVSEFIDKPIIFLEEEIMEATMNLDERCKIGSTYYRAKLDGEVFAVKPAKGDVSAELKMMQMVNHANLIKLAGISIGTDGDYAFLVYEFAEKGSLDKWLYQKPPSALPSSSCCTVATLSWGQRLSIALDVANGLLYMHEHTQPSMVHGDIRARNILLTAEFRTKISGFSLAKPATADAAATSSDVFAFGLLLLELLSGRRAMEARVGSEIGMLWREIRGVLDAGDKREAKLGKWMDPALGSEYHMDAALSLAGMARACTEDDAARRPNMTEVVFSLSVLVQPLTVADGFEKMWQPSSDDNIRMASSVSAR

SEQ ID NO: 1181 - DNA, 1074 bp, Sorghum bicolor; identical to SEQ ID NO: 413

SEQ ID NO: 1182 - protein, 357 aa, Sorghum bicolor; identical to SEQ ID NO: 414

SEQ ID NO: 1183 - DNA, 825 bp, Sorghum bicolor
atgagtctgtgtgtgcaactcgtttcgagcctgcccgcccggagcccccgtctcgccgccgttctccacctccgaagatcctgcgagttcatcccgcgagtcagcatgtcgtcgtactccccgccgccgccgccggaccagtccctggacacggaggcacccaacgcgccggtcaccagggagaggaggctcaaccccgatctgcaggagcagcttcccaagccatatctcgcgagagctctggaggcggtggacccgagccacccgcaggggaccaaggggcgcgacccccgcggcatgagcgtgcttcagcagcacgccgccttcttcgaccgcaacggcgacggcgtcatctacccatgggagacgtttcaaggcctgcgagcaataggatgtggattccccctatcattcgtgggctcgatactgatcaacctcttcctgagttatcccactcagccgggatggttaccttctcctttgctgtccatccatataaacaacatccacaagggtaagcacgggagtgattctgaaacatatgacactgaagggaggtttgatccatcaaagttcgatgctatatttagtaagtatggtcgaactcatcctaatgctttgacaagagacgagttgggctcaatgcttcaaggaaaccgcaatacgtatgatttccctggctggctggccgctgccggtgaatggctcttactctacagcttggcaaaagacaaggatggcctgttgcagcgtgaaactgtccgtggtctatttgatgggagcctatttgagcgactgcaagacaacaaaaagaaatcgtcctga

SEQ ID NO: 1184 - protein, 274 aa, Sorghum bicolor
MSLCVQLVSSLPARSPRLAAVLHLRRSCEFIPRVSMSSYSPPPPPDQSLDTEAPNAPVTRERRLNPDLQEQLPKPYLARALEAVDPSHPQGTKGRDPRGMSVLQQHAAFFDRNGDGVIYPWETFQGLRAIGCGFPLSFVGSILINLFLSYPTQPGWLPSPLLSIHINNIHKGKHGSDSETYDTEGRFDPSKFDAIFSKYGRTHPNALTRDELGSMLQGNRNTYDFPGWLAAAGEWLLLYSLAKDKDGLLQRETVRGLFDGSLFERLQDNKKKSS

SEQ ID NO: 1185 - DNA, 1194 bp, Sorghum bicolor
ccggaggctgacggcccggcagcagagaattcagacgagctgtggctcaggtccggaccgccgccgagggtcgtcgacgtcgatgactacggagccggagatgccggcggcgaccacgtcaccgaggcgtttctcgaggcgtggagcgaggcctgcaactcctccgatgaccggtccgtgttcctcgtgcccgagggcaaggcctacctcctgatgcccgtcatcttccgtggcccctgcagagctgtctcgatcactgcgatgataaagggaacgctggaggcgccgtccaaccgatcggtctggctggatcaggatctgcaggagtggatcacgttcgagggcatcgatcgcctccgtgtcctcggcggcggcaccctcgatggcaacgggcttcagtggtggatcaactcgtgcaagctcaacaaatcaatgcgatgcgtcatcggtccgacggcactgtacttcaggaggtgcacccacctggtggtggaggagctggaggtgagagacagcatgcagatgcacgtcgcgatcgcctactcgtggaacgtggtcgtgtcgaagctgctcatcactgcaccggggtggagccccaacaccgacggcatccatgtgtccaacagcagggaagtgtccataagcaagtgcaccatcagcacaggggatgactgtatatccattgtgactggatcaatgtttgtacgggtaaccagcatattttgcggaccgggccatggaataagcattggtagtctaggagcaaacaactcttgggcccatgtctctgatgtcctcgttgagaaagccacgctgctgggcactaccaacggtgtgaggatcaaaacttggcagggaggacatggctatgctgaaagaattagcttccaagatatatcaatgcacaacgttactaacccaataattatcgatcagaactactgtgactccaagagaccttgtcatgaacagggatcagcggttgccgtacgcaatatacgctacagaaacatacatggaactagtgcttcaaaagtcgccgtcaattttatttgcagtggcgctctgcactgtgatggtatactaatgcaagatatttatttggttggagaaggaagatatgctacatgttcttatacgaacgctacagttgtacaatttgggtataacttccctttttgcagtgcagagatg

SEQ ID NO: 1186 - protein, 398 aa, Sorghum bicolor
PEADGPAAENSDELWLRSGPPPRVVDVDDYGAGDAGGDHVTEAFLEAWSEACNSSDDRSVFLVPEGKAYLLMPVIFRGPCRAVSITAMIKGTLEAPSNRSVWLDQDLQEWITFEGIDRLRVLGGGTLDGNGLQWWINSCKLNKSMRCVIGPTALYFRRCTHLVVEELEVRDSMQMHVAIAYSWNVVVSKLLITAPGWSPNTDGIHVSNSREVSISKCTISTGDDCISIVTGSMFVRVTSIFCGPGHGISIGSLGANNSWAHVSDVLVEKATLLGTTNGVRIKTWQGGHGYAERISFQDISMHNVTNPIIIDQNYCDSKRPCHEQGSAVAVRNIRYRNIHGTSASKVAVNFICSGALHCDGILMQDIYLVGEGRYATCSYTNATVVQFGYNFPFCSAEM

SEQ ID NO: 1187 - DNA, 732 bp, Sorghum bicolor; identical to SEQ ID NO: 199

SEQ ID NO: 1188 - protein, 243 aa, Sorghum bicolor; identical to SEQ ID NO: 200

SEQ ID NO: 1189 - DNA, 1872 bp, Sorghum bicolor
atggacgctgccaactcggtaacgccgggcgccgtgtcgcacatcctggcgcacccgtcgacgggctccgacggcgccgtgccggatctcgtcgtccaggtcctcgacctcaagtccatcggcacgggcagccggttcagtttcatggcaaccgacgggaaggataagatcaaggcgatgttccccaccagcttcgcgtcggaggtccgctccggcaatctgaagaacctcggcctcatccgcatcctcgactacacttgcaacgccgtcaacggcaacaatggcaaagtcttgattgtcatcaaatgcgagcttgtgtgccaagcgctcgacgccgagatcaacggcgaggccaagaaagaggagcctccaattgtgctgaagcctaaggacgaaggcgtggtcgtggctgagcaggcaaatgctcccccagtcgcgattaagcccaagcaggagttgaagtccgcgtcccagatcgtgaacgagcagcgtggaaatgctgctcctgctgcgcgcctttccatgacaaggagggtccatcctttgatcactctgaacccctaccagggtaactgggtcattaaggtgcgggtcacgagcaaaggcaacctgagaacctacaggaatgctcgtggagaaggctgtgtcttcaatgtagagctcactgatgaggatggcacccagatccaggccaccatgttcaatgaggctgcaaagaagttctatccaatttttgagctgggaaaggtctattatgtctcaaaaggatctcttagaattgccaacaagcagttcaagactgttcaaaatgactatgagatgtcactaaacgagaatgctattgttgaagaagcagagggggaaactttcattccgcaagtgcaatacaactttgtcaagattgatcatctaggaacatatgttggtggcagggaacttgttgatattatcggtgtggttcagagtgtatctcccacactcagcgttaggagaaagattgacaatgagacaataccaaagcgtgacattgttgtagcagatgactctggcaaaactgttagtatttctctctggaatgatcttgctactactactggccaagagcttttggacatggttgacagttctcctgttgttgcgataaagagcctaaaagtatctgatttccaaggcgtgtcactttcaactataggcagaagcactcttgctattaatccagacctgcctgaggctcagaatgttaaatcatggtatgactctgaaggcaaagatacttcactagcaccaattggtgcagaaatgggtgctgcacgggctggtggcctgaagtccatgtattctgatagagtttttctgtctcacatcaccagtgatcctgctatgggccaggaaaagcctgttttcttcagtttaaatgccatcataagccacatcaagcctgaccagaatatgtggtaccgtgcttgcaagacctgcaacaagaaggtgactgaagcttttggatctggatactggtgtgagggatgccaaaagaacgactctgaatgctcactgagatacataatggtcctcaagatctctgatcccactggtgaggcatgggtgtccgtgttcaacgagcatgctgagaagatcattggctgcagcgctgacgagcttgatcggatcaggaaagaggagggcgatgacagttacattctcaagctcaaggaagccacctgggttcctcaccttttccgcgtcagcgtcacgcagcatgaatacatgaacgagaaaaggcagaggatcaccgtgaggagtgaagcaccggtcgactatgcagctgaatccaagtacctgcttgaagagatcgcgaagcttactgcttgctag

SEQ ID NO: 1190 - protein, 623 aa, Sorghum bicolor
MDAANSVTPGAVSHILAHPSTGSDGAVPDLVVQVLDLKSIGTGSRFSFMATDGKDKIKAMFPTSFASEVRSGNLKNLGLIRILDYTCNAVNGNNGKVLIVIKCELVCQALDAEINGEAKKEEPPIVLKPKDEGVVVAEQANAPPVAIKPKQELKSASQIVNEQRGNAAPAARLSMTRRVHPLITLNPYQGNWVIKVRVTSKGNLRTYRNARGEGCVFNVELTDEDGTQIQATMFNEAAKKFYPIFELGKVYYVSKGSLRIANKQFKTVQNDYEMSLNENAIVEEAEGETFIPQVQYNFVKIDHLGTYVGGRELVDIIGVVQSVSPTLSVRRKIDNETIPKRDIVVADDSGKTVSISLWNDLATTTGQELLDMVDSSPVVAIKSLKVSDFQGVSLSTIGRSTLAINPDLPEAQNVKSWYDSEGKDTSLAPIGAEMGAARAGGLKSMYSDRVFLSHITSDPAMGQEKPVFFSLNAIISHIKPDQNMWYRACKTCNKKVTEAFGSGYWCEGCQKNDSECSLRYIMVLKISDPTGEAWVSVFNEHAEKIIGCSADELDRIRKEEGDDSYILKLKEATWVPHLFRVSVTQHEYMNEKRQRITVRSEAPVDYAAESKYLLEEIAKLTAC

SEQ ID NO: 1191 - DNA, 1746 bp, Sorghum bicolor
atggctacagtttggagcggctgcagcacgagcagcggctccttcgtccaagagcttcccccgcgcggcaaacggggcggtggtgatggcacaaggttccgtccgcgaagcggaggccggaccagaggcgacgcccgccaggcacaagctctaagcgccgccatggttacggtcggagcttgcgtttgtagggcggctccatgcttacttgattcggaggtcgacgggaaggaggacgtcgaagttgggtttcggggcgtcgatagtgaaccgcacgctgatggccatgatggtggcaagaggcgcgggccgcgtcggcgtccgatgaggccgactgtttttcagaaggagatgggcgcaagaagtgctccaccggcgatggcgtcggagccggacaggaaatctgagcatggggcgtcgaggctgcacttcttggaggagagggacgaggagacgctgtcaagaaggttgataaagctgagccaaaacaacaaggtcaggagtgccactgagctgtttgattcaatgcgcgcatctgggctgcagccaagcgcacatgcctgcaactccctgttggcttgctatgtgcgtagaagtccactgacagatgcactgaggatgtttgagttcatgaaggcgaaaggaatggcaacggggcacacgtataccttgatactcaaggctgttgcgagcaatcagggttatgtttctgcattggaaatgttcaataagattgaggaggaggaagattcaaagaaaatcattgatgtgattgtttataatacaatgatatctgtttgtggaagagcgaaagaatggatgcttgtggagagactatggagaaggctcaaggataattctttgagtgggactttgctgacatatgatttgttagtcagcatattcgtgcaatgtggacagtctgagttagcaattgccgcatatcaggaaatgctccagaagggacttgatccgagcgaggatataatgaaggctatcattgcatcctgcactaaagaagggaagtgggagtttgcactgtccacatttagtagaatgctgagtgctggcatgaaacccagtttaattttgttcaattcaattatcaactcgctggggaaggctggtcaagatgaactcgcctttaggatgtatcatctactgaaaaaatcaggccttaagcctgatcaatatacatggagcgcactgttgtcgggattatacaggtctgggcgatgctgggattgcctagagcttttccaaggaatcaaagccaagcatccggccctcttaaatggtcatctctacaacattgctttgatgtcttgcgaaaagcttggtcaatgggaacatggtttgcagctgctgtggatgatggaaaaaggtggactggaaatatcagtggtatcttacaatcatgtgataggtgcttgtgagtttgctagtgagccaaaagttgctcttaaagtgtaccagcgcatgattaatcgaaggtgttcgccagacacattcacacatttatctgttatacgagcttgcatctggggatctctttggactgaagtagaggatatattagaggaggtggctccgaactcttcgatctacaacgcggtcatccacgggctgtgtttgcgaggcaagattggactggccaacagggtgtacgccaagatgcggagcattgggctcgtaccggacggcaagacgagggcgttcatgcttcagcacattgctacggactag

SEQ ID NO: 1192 - protein, 581 aa, Sorghum bicolor
MATVWSGCSTSSGSFVQELPPRGKRGGGDGTRFRPRSGGRTRGDARQAQALSAAMVTVGACVCRAAPCLLDSEVDGKEDVEVGFRGVDSEPHADGHDGGKRRGPRRRPMRPTVFQKEMGARSAPPAMASEPDRKSEHGASRLHFLEERDEETLSRRLIKLSQNNKVRSATELFDSMRASGLQPSAHACNSLLACYVRRSPLTDALRMFEFMKAKGMATGHTYTLILKAVASNQGYVSALEMFNKIEEEEDSKKIIDVIVYNTMISVCGRAKEWMLVERLWRRLKDNSLSGTLLTYDLLVSIFVQCGQSELAIAAYQEMLQKGLDPSEDIMKAIIASCTKEGKWEFALSTFSRMLSAGMKPSLILFNSIINSLGKAGQDELAFRMYHLLKKSGLKPDQYTWSALLSGLYRSGRCWDCLELFQGIKAKHPALLNGHLYNIALMSCEKLGQWEHGLQLLWMMEKGGLEISVVSYNHVIGACEFASEPKVALKVYQRMINRRCSPDTFTHLSVIRACIWGSLWTEVEDILEEVAPNSSIYNAVIHGLCLRGKIGLANRVYAKMRSIGLVPDGKTRAFMLQHIATD

SEQ ID NO: 1193 - DNA, 519 bp, Sorghum bicolor
atggagaaggcgctcaccaagctcggcagcttcaccatctcccgcaaggccaagcaggagctctccgccatcggcggcgacatctcccgtttatcgagcacggtggaggagaaggcaaaatgggttttcgagaagctcaaaggacacaagaagtcgctctctgatctactccgtgagcacaacctccctccaggtctcttccctcgtaacatcatctgctatgagtacgacgaatcaacctcgaagctggtggtgcacctgtccaaaccctgcgaggtgagcttcaaggattcctccacaatacggtatgctcctcgtgtcaaagcgactctgtcccgaggcaagctctccggggttgaaggcatgaagaccaaggtggtggtatgggtgaaggtggcaagcgtgagcctcgagagctacaagtctgacaagatatgcttcatcgccggtgtgaagaagctgaggcagaaggatgcttatgaggtccctcgcgaagccgtctctgttgaggagttctga

SEQ ID NO: 1194 - protein, 172 aa, Sorghum bicolor
MEKALTKLGSFTISRKAKQELSAIGGDISRLSSTVEEKAKWVFEKLKGHKKSLSDLLREHNLPPGLFPRNIICYEYDESTSKLVVHLSKPCEVSFKDSSTIRYAPRVKATLSRGKLSGVEGMKTKVVVWVKVASVSLESYKSDKICFIAGVKKLRQKDAYEVPREAVSVEEF

SEQ ID NO: 1195 - DNA, 1704 bp, Sorghum bicolor
atgaggaagcacgggtggcagctgccgtaccaccctctccaggtggttgcgatagccgtgttctcggcactgggcttcgccttctatgtcttcttcgtgccgttcgtggggacgaagccgttccagattgtggccatggctatctacactccgttgattacatgtgtcgttgtgttatacatatggtgtgcggcaacaaatcctggagacccgggcattttcgattcaactaagaatttgaagttagataagcatgaaaagcactcctatgtaaattcggaccagggaattaatcatggaggaaggccattaagtgagacttttggtactgctgataacagtgagaagctgagcagcatgcttgagaggaaggattcgccttcttggcccagattttctggaattctttccctggttctgaagaacagtaagcattgtagagtatgtgacaagtgtgttgatggattcgaccatcactgcagatggcttaacaattgcatagggaaaaggaactacaaaggtttcttcgctctaatggcttctgcagttattctgcttgtgatgcagtggttgtcgggggcacttgtgttgattctctgtattgtgaagcgaggagaattctctaggcaggttgtcacaaagttgggaagcagcttctcaactgtggcttttgtaattgttgtggcgacctgcaccattttagcaatggttgcaaccgtgccacttgtccagcttttatgttttcatatccttcttgtcaaaaagggaattagcacgtatgattacatcatagctttgagggagcaggaggatcaacaagaggttcctggacaccaaagtccacagatgtctattattagttctgttactggttttagcacagccagttcttttggacctcttcatcgtggttcatggtgcactccaccaagattgttcctggaagaccagttcgatgccattcctccagaggtcggcatttcacagaattcaggcagtaagaaaatcaaggaagaggaaggagcaaggagaaaaaatggagcagtgaaaatcagtccatggacattggcacggctaaatgcagaggaagtttcaaaggcagctgcggaggcaaggaagaaatccaaaatcctgaaaccaattgcaaaacatggcatctcagacaatggcagtaaaccagaccataagctcagctaccagagacgactagatagaagaggtttccctgctgagctttctcttgacccacttgcaactctatctgcaagcggcactgaaagcaactacagcgacacagcaacagaaatttgtggcagtttagccccattacagctcgaagcaagaagtgctttccagcctagtactgcagcatccacaagaaatgttgcttcatcgcctgaaagtagctttgactcgcctgatctccaccccttccgcacttcctcagccacaggcgatgagatgcagggagccatgacacattcagctcacaggggcatcgagtttaaaagatcatcgagcgatggttatgaagcatctggaggtgaagatagtgaccgcatcccttcaagaatcgtgcacagatcgtcgaactgggccaatgtctttctgaattctagtcagggaggccctcaagctgatctgctcacgacatcatctgaaggttttttagttaacgcaaatgtctcgaattctggttcctag

SEQ ID NO: 1196 - protein, 567 aa, Sorghum bicolor
MRKHGWQLPYHPLQVVAIAVFSALGFAFYVFFVPFVGTKPFQIVAMAIYTPLITCVVVLYIWCAATNPGDPGIFDSTKNLKLDKHEKHSYVNSDQGINHGGRPLSETFGTADNSEKLSSMLERKDSPSWPRFSGILSLVLKNSKHCRVCDKCVDGFDHHCRWLNNCIGKRNYKGFFALMASAVILLVMQWLSGALVLILCIVKRGEFSRQVVTKLGSSFSTVAFVIVVATCTILAMVATVPLVQLLCFHILLVKKGISTYDYIIALREQEDQQEVPGHQSPQMSIISSVTGFSTASSFGPLHRGSWCTPPRLFLEDQFDAIPPEVGISQNSGSKKIKEEEGARRKNGAVKISPWTLARLNAEEVSKAAAEARKKSKILKPIAKHGISDNGSKPDHKLSYQRRLDRRGFPAELSLDPLATLSASGTESNYSDTATEICGSLAPLQLEARSAFQPSTAASTRNVASSPESSFDSPDLHPFRTSSATGDEMQGAMTHSAHRGIEFKRSSSDGYEASGGEDSDRIPSRIVHRSSNWANVFLNSSQGGPQADLLTTSSEGFLVNANVSNSGS

SEQ ID NO: 1197 - DNA, 1248 bp, Sorghum bicolor
atggccggctccgagcagcgcgtcgtcgccgtcatcatggtcggcggccccaccaaagggacgcggttccggccgctgtcgctgaacgtgcccaagccgctcttccctatcgccggccagcccatggtgcaccaccccatctccgcctgccgccggatccccaacctggcacagatatacctcatcgggttctacgaggagcgggaattcgcgctctatgtctcgtctatctccaacgagctcaggatccctgtcaggtacctacgagaggacaaacctcacgggtcagctggagggctctacagctttagagattatatcatggaagacagtccgtcacacatagttctgctgaactgcgacgtctgttctagcttcccccttccagacatgctggaggcccataaaaagtatggaggaatgggtaccttactagtcaacaaggtatctgcagagtcagcgaaccagttcggcgagttggtagctgatcctgaaacaaacgaactgctgcactatacggaaaagccagagacttttgtgagtgatctcataaattgtggagtatatatatttactcccaatatctttagcgccattgaggatgtcttaaaacagaaaaaggacagagcaaatttgcggcgtgtatctagctttgaagctcttcattcagcaaccaaggcgcttccaccagactttgttaggttagatcaagacattttatcccctcgagcgggaaagaaggagctgtacacataccagacgcttgatttttgggaacagatcaaaaccccagggatgtctttgagatgctctgggttatatctttctcagttccgccgtacctctcctcatcttttagcctcaggagacggcaaaagaactgccactattgttggcgatgtgtatatccatccatctgccaaggtgcatcctacttcaaagattggccccaatgtctctatatcagcaaatgcgcgagttggagctggtgccaggcttatcaattgcataattctggatgatgttgaaattatggaaaatgctgttgttatacattcaattgtggggtggaagtcatccattggaaaatggtcacgtgtacagggcgaaggcgatcacaatgccaaacttggcattactattcttggtgaagcagttgatgttgaagatgaagtagttgtagttaacagcatcgtgctcccaaataaaactctcaatgtcagtgtccaagaggagatcatcctataa

SEQ ID NO: 1198 - protein, 415 aa, Sorghum bicolor
MAGSEQRVVAVIMVGGPTKGTRFRPLSLNVPKPLFPIAGQPMVHHPISACRRIPNLAQIYLIGFYEEREFALYVSSISNELRIPVRYLREDKPHGSAGGLYSFRDYIMEDSPSHIVLLNCDVCSSFPLPDMLEAHKKYGGMGTLLVNKVSAESANQFGELVADPETNELLHYTEKPETFVSDLINCGVYIFTPNIFSAIEDVLKQKKDRANLRRVSSFEALHSATKALPPDFVRLDQDILSPRAGKKELYTYQTLDFWEQIKTPGMSLRCSGLYLSQFRRTSPHLLASGDGKRTATIVGDVYIHPSAKVHPTSKIGPNVSISANARVGAGARLINCIILDDVEIMENAVVIHSIVGWKSSIGKWSRVQGEGDHNAKLGITILGEAVDVEDEVVVVNSIVLPNKTLNVSVQEEIIL

SEQ ID NO: 1199 - DNA, 2001 bp, Sorghum bicolor
atggagctgaacactagaaccagcaagggcaagggcaaagccatggccaagatcctggaagaagaggaggaggaggaagaggaagatgacgacttcttcagcccaagcggctgcgggtgcttcctctgcgccatcaaagagccggacgcccggctccgccgggccagcctttctgccttcttcagggagctaccatactgcgacgatgacggcgggaccgccggcgccggcagcaatggcggccagtcatgtgccgcggcggttggcgccgtgtggcgggcggccatgtccgcgcccgatgaccccgagctcccttcgctcggcgcgatccggtgcatgtcccttctcctcgcccgcgcgctcgccgacgcggcgtggcttcatcgcggcgacaacgtgtacgtgccgtactatgccgcccatgtcatcggctcctacaccatccgctcctccgcgcacgccgagctggccgtcgcggccggagccgtgcgcccgctgttggccctactcggcggcgccatgacgtgggtcgagcagcgcgcggcggcgcgagccctgggccacctcgccagctacgagtccacgttcccggccgtcgcacgccacgccgccgaggcggtgcagctcgccgtgcgttccgcgtccacttgcatcggcgacgtctacgccaacttcgtcgcgctggcaccgagcaggcggccgaagtaccagcgcgacctcatgacgtgcgggatcggcggcggcgccgacgccgaggacaggaaggcggaggagtgggcgagccagctccagtgctggtcgctctacttgctgagctgcctcgcctccagggacctgtcatctcatgccatgatatgccaggacgtcttgttcttgagcgagctgtcccggatgtggggcggactggccaacggcgactcgcccgccggcgtcggcttgctgcgcctcctctgtaggagcccagtcggccgcgccgccatcgcggcgtgccgcgatgcgctgtccagtctttgtgacctcgcgcgttcgtccgatgactggcagtacatggccgtagattgcttgctcctcctcctcgacgaccgcgccacatggcacgccgttgctgatgcaacggcgccgtgcctctctgacttggtcgatctccggcacctcggtccaaggcgacgactcggagatgccattgcaactgcactgctccttgatgacggccatgtcgtcggtgaccgtgaactaggtgcggaagcgaaaagggcgatcgccggcgtgagagagcagaagggagagaggaaggagagagaggaagcaatgcctagggatgagttgctgaagagagagatcttagccaaggagaagaagaggcaaggcaacgacagcttcatgcatggcgacgtggacaaggccattgatcattacaccgaagctttggagctgtgccctctgagcaggaggagggagagtctggtgctgcacagcaaccgcgcgcagtgccggctcgcgcggcgcgacgccgacgcggcggtgagcgacgcgacacgcgcgctcgcgctggcgcggccggcgaacgcgcatgccaggagcctgtggcgccgcgcgcaggcgtacgacatgaagggcatggccagggagagcctcctggactgtctggccttcgccggagcgtggctcgacggccggaagcaccctcggagggcggcgcgcggtgcgaatccgaagctgccgtactgcgtcgctcggatgatcagcaagcagatgagcgtgacgggtctgttcgccggcgtgacgatgaaggacaacaaggtggggagtgatgatttcatgccacggtgcagcgaaaacaacgacggggacgatgaggacgacgaagatgatcgggatgatgacgatgaaagcgatgaggcagaattggctgataatgctggtttgaagatgtgcacgtcaggaagagagttgccaatcatcacgggagatgcttggacgaggttgtcccggaggacataa

SEQ ID NO: 1200 - protein, 666 aa, Sorghum bicolor
MELNTRTSKGKGKAMAKILEEEEEEEEEDDDFFSPSGCGCFLCAIKEPDARLRRASLSAFFRELPYCDDDGGTAGAGSNGGQSCAAAVGAVWRAAMSAPDDPELPSLGAIRCMSLLLARALADAAWLHRGDNVYVPYYAAHVIGSYTIRSSAHAELAVAAGAVRPLLALLGGAMTWVEQRAAARALGHLASYESTFPAVARHAAEAVQLAVRSASTCIGDVYANFVALAPSRRPKYQRDLMTCGIGGGADAEDRKAEEWASQLQCWSLYLLSCLASRDLSSHAMICQDVLFLSELSRMWGGLANGDSPAGVGLLRLLCRSPVGRAAIAACRDALSSLCDLARSSDDWQYMAVDCLLLLLDDRATWHAVADATAPCLSDLVDLRHLGPRRRLGDAIATALLLDDGHVVGDRELGAEAKRAIAGVREQKGERKEREEAMPRDELLKREILAKEKKRQGNDSFMHGDVDKAIDHYTEALELCPLSRRRESLVLHSNRAQCRLARRDADAAVSDATRALALARPANAHARSLWRRAQAYDMKGMARESLLDCLAFAGAWLDGRKHPRRAARGANPKLPYCVARMISKQMSVTGLFAGVTMKDNKVGSDDFMPRCSENNDGDDEDDEDDRDDDDESDEAELADNAGLKMCTSGRELPIITGDAWTRLSRRT

SEQ ID NO: 1201 - DNA, 903 bp, Sorghum bicolor
atggagtcctccgaggcgagctggcactcgttcgatccgtcagtcgccgtggaggactccgagacaatggcccagctgctcggcgtccagtactccggcaacgagcagaagcagccgacgccgacggccatgtactggcctggccaagaaactgaccagtactacagctcggcggcgtacccgtactacatgcagatgcagcaacacaactcgggcgcaagctgctacgaccatggttactatggcagcaacacgttcacgatgaccggcggcgacttcttcgtgccggaggagcagatcatggcggcggacccgagcttcatgcttgatctgaacctcgacttcgagtaccaggacggtgagggggccggccgcggctgcggcggcggcaacacgccggcgataggcaagaggaagcgggaggaccagaagggcgagagcaccacgtgcaccgttccaaagaagaaatcgcgatccaccgcaataccggtgcagaagaagggcaagaaggcgcagaaaggccggtgcagccgaggcaaccaggaggagagcaacggcggcggcgacgttgcacgacagcaacagtgctccagcaacggctacctgtctgacgacgagtcgctggagatgaccgcgtgcagcaacgtgagctcggcgtccaagaagtcgtcgtcgtcggcaggtgggaaggccagggccggacgtggggccgccatcgatccgcagagcctctacgccagggtagatatcagcacgatgctcgaagaagcagctcaatacgtcaagttcttgcagctccagatcaagctgttgagctcagatgatatgtggatgttcgctccgatcgcctacaacggggtcaacgttggcctcgacctcaagatatctccaccgcaacaatga

SEQ ID NO: 1202 - protein, 300 aa, Sorghum bicolor
MESSEASWHSFDPSVAVEDSETMAQLLGVQYSGNEQKQPTPTAMYWPGQETDQYYSSAAYPYYMQMQQHNSGASCYDHGYYGSNTFTMTGGDFFVPEEQIMAADPSFMLDLNLDFEYQDGEGAGRGCGGGNTPAIGKRKREDQKGESTTCTVPKKKSRSTAIPVQKKGKKAQKGRCSRGNQEESNGGGDVARQQQCSSNGYLSDDESLEMTACSNVSSASKKSSSSAGGKARAGRGAAIDPQSLYARVDISTMLEEAAQYVKFLQLQIKLLSSDDMWMFAPIAYNGVNVGLDLKISPPQQ

SEQ ID NO: 1203 - DNA, 2181 bp, Sorghum bicolor
atgtccgcgatcatgctatgtacctgcagccgggaccagtccaagtttgaagatcttcctcgatcaccagaatctcttgcaacacgtgacttttcagcgaattgttcttcttcaaagatggcaagtcgagaaacaactcctgatgatagccaagtaaatgaagtagaatcagacctaaaagaaaccctttcactaaattatgaggaggcccgagcattgctaggtagactggaacatcagagagggaactttgatgcagcattgcaagttcttcaggggattgatataagaagcctgagaccgcgaatgaccagtgctattgctgaaagtatcaagcctagaacgcccccacgctcttcaagaaggaaatcttcacaagtgaatggaatgctcatgcatatgtcaatgcattctgtaagcttgcttctagaggccatactgcttaaagcaaaatctctggacacccttggtagagtagcagatgctgcagaagaatgcagaaccatcatagacattatcgagtctgcatggccatacggtgttccggatggtactgctgaagagtgtaagctaatagacatattccattcggctctagaatatcttcctaagctgtggatgaggagtggttgttttgatgaagccatcatcgcatatcgcagagctcttgcaaagccgtggaatctagattctcaaaggtccgccaaaatgcaaaaagatttggcagtgactctgctgtattgtggcgttgaagtgaagttccctcaagaatttgctcaggaaaggaatctggtaacccctgggaacaacttagaggaagcaattttgttgttactcatgctaacaagaaagctatctctccgagaaatacaatgggatcctgaccttgtgaatcatttgatgtatgcactctcattatctgggcactatgaagttttggccagccatcttgaaatgctgttgcctggaacctataccagatcagagaggtggtatatccttgcactttgctacggtgcagctggcatggatgatagtgcgttaaacatcataaggaatggtttttctgtgctggagagaaagggaaagcctcatgttccatctcttcttttaggagcaaaactatgttgtaagaacccaaagcatgcttctgaagggataaagtttgcaaataaagctatgaagtctttcggaagacgtgatctgcatttcatcagcactgcaaaacactttctcggtgtttgttatggacctttttctaggtcctccgcctcacacttggagaaatcgagattggaagataatgcactgaggctgctgcaggatgctgctacaacagcaaagtataatcctgaaataatgtatagccttgcttgggaaaatgcaatgcagcgcaaactcaatgcagctgttgaaagtgcaacagaatgtcttgagatggtgatgggaggttctgttagtgcctggaagttactaattcttgtactatctgcacaacagaatttgcaagaagctgaagcagtagcagattttgcaatggatgaagctgagaaaaatgatcagttggatattttgaggctgaaagcacaaattcaggcttcccgtggacagttcaagtctgcagtggaatcttttcgggttttgcttgccagtatccaagtaaagaaggacatctggaaatcgaccacttgtaatgaggttaaatgcctacagaagttggagatggactcatggttagatttggcatcaatctactcaaagcttgaggcatggcatgactcaaacatctgccttgacaaagctatatccattaatttcttttatcccaagtgttggcatgtcagaggtcttctgttggaggctcaattcttgcacaaggaagccctgatggcgttctctttcgccctctcaattgacccagattacgtccccagcatggtttgcatggcaggaattctccgagatattggagggaattcgctatcaattgcaagaacttacttgcgcaatgccctccgtttagagcctacaaaccaccgagcttggttgagtcttgggcttgtcctgaaagctgaaggatcgctgcaggaggctgcggactgcttccaggcagcatatgagctcagagaattgtcaccaattcaggacttctctgagcaactcccgatcatgctgcattag

SEQ ID NO: 1204 - protein, 726 aa, Sorghum bicolor
MSAIMLCTCSRDQSKFEDLPRSPESLATRDFSANCSSSKMASRETTPDDSQVNEVESDLKETLSLNYEEARALLGRLEHQRGNFDAALQVLQGIDIRSLRPRMTSAIAESIKPRTPPRSSRRKSSQVNGMLMHMSMHSVSLLLEAILLKAKSLDTLGRVADAAEECRTIIDIIESAWPYGVPDGTAEECKLIDIFHSALEYLPKLWMRSGCFDEAIIAYRRALAKPWNLDSQRSAKMQKDLAVTLLYCGVEVKFPQEFAQERNLVTPGNNLEEAILLLLMLTRKLSLREIQWDPDLVNHLMYALSLSGHYEVLASHLEMLLPGTYTRSERWYILALCYGAAGMDDSALNIIRNGFSVLERKGKPHVPSLLLGAKLCCKNPKHASEGIKFANKAMKSFGRRDLHFISTAKHFLGVCYGPFSRSSASHLEKSRLEDNALRLLQDAATTAKYNPEIMYSLAWENAMQRKLNAAVESATECLEMVMGGSVSAWKLLILVLSAQQNLQEAEAVADFAMDEAEKNDQLDILRLKAQIQASRGQFKSAVESFRVLLASIQVKKDIWKSTTCNEVKCLQKLEMDSWLDLASIYSKLEAWHDSNICLDKAISINFFYPKCWHVRGLLLEAQFLHKEALMAFSFALSIDPDYVPSMVCMAGILRDIGGNSLSIARTYLRNALRLEPTNHRAWLSLGLVLKAEGSLQEAADCFQAAYELRELSPIQDFSEQLPIMLH

SEQ ID NO: 1205 - DNA, 1056 bp, Sorghum bicolor
atgctcgacatcaacttgttccgcgccgacaagggcggcaacccggacctcatccgcgagtcccagcgcagccggttcgcctccgttgagctcgtcgatgaggtcatcgccctcgacatggcatggcgcggaaagcagttcgacctggacaagatccggcaggagctcaacgctaccagcaagaagatcggcaagctcaaagccagcaagcaagaagaggaagcgaagaagctcatggagagcacagacgaaattaagaagaggttggctgccaaagaagttgaggtgcaggaggccaagagcacccttgacgccaaggtcacgacgattggcaacatcgtgcacgattccgtgccagtcagcgacgatgaggcaaacaataaaattgtacggacatttggagagaagagagtagaggaaaatttgaagaatcatgtagacctttgcaggatgcttgacattgtcgcattggagaagggtgctgatgtggccggtggtaggggtttctatttaaagggtgatggtgtcttccttaaccaggcattgataaacttcgggctagcttttctgagaaaacggggatttgagccaatgcagactccctttttcatgagaaaggagactatggcaaaatgtgctcagttggcgcagtttgatgaggagctttacaagattggactaccataccaagttgtttccattgtctctggtgctcttaatgatgctgctgctaagaaatatgatttggaagcttggttccccgcatcaaagaccttccgagactatcacgagaccgccccccgcagccacgctcgctcgccgaagccaaccaacgccaccaccaccccaccaccatcagttactactgctgcctgcctgcgcctcgcctccaggctccctccaggaatcccctcctcctcggattctttccccttctccagctcccccatcctcccgtccagcactccagcagcgccgcctgcactgtgctgccgcgccttcggcagcagcgcaccgctcgcctccggcctccagcctcctcggttcccgtggtaa

SEQ ID NO: 1206 - protein, 351 aa, Sorghum bicolor
MLDINLFRADKGGNPDLIRESQRSRFASVELVDEVIALDMAWRGKQFDLDKIRQELNATSKKIGKLKASKQEEEAKKLMESTDEIKKRLAAKEVEVQEAKSTLDAKVTTIGNIVHDSVPVSDDEANNKIVRTFGEKRVEENLKNHVDLCRMLDIVALEKGADVAGGRGFYLKGDGVFLNQALINFGLAFLRKRGFEPMQTPFFMRKETMAKCAQLAQFDEELYKIGLPYQVVSIVSGALNDAAAKKYDLEAWFPASKTFRDYHETAPRSHARSPKPTNATTTPPPSVTTAACLRLASRLPPGIPSSSDSFPFSSSPILPSSTPAAPPALCCRAFGSSAPLASGLQPPRFPW

SEQ ID NO: 1207 - DNA, 1983 bp, Sorghum bicolor
atggaggcatcatcggcatcagcggtcgagtcgaccgccaccgtgtccgtcttcgatgtatcatccaacaagcagcgcccagacacggcgaagctcgtgctgaacagccccagcccgccgagcctgcgcgaggagctcgtcggcgtggtcggcaaggcgttccggccacggccccccggcggcggtggccgggcgccgcgctgcccgtggatcctcacggcgctgcagtgcgtgttcccggtcctgcagtgggggaggacctacaccctcaagtccttcaggagtgacgtcatggccggcctcactcttgccagccttggcatccctcagagcattggatatgccaacctagccaaactggaccctcagtacggtctttacacaagtgtcgtgccaccgctgatctacgctgtcatggggacatcgagggagatcgccatcggcccagtcgccgtcgtctcgctgctgctgtcgtcgatgatccagaaggtcgtcgacccggccgccgacccggcaacctacaggtcgctcgtcttcacggtgactttcctcgccggcgtcttccaggtctccttcggcctcttcaggctggggtttctcgtggatttcctgtcgcacgctgccatcgtggggttcatgggcggggcggccatcgtgatcggactgcagcagctcaagggcctgcttgggctcagccatttcaccaacagcaccgatgttgtttctgtcgtcaaggccgtctgctctgcgctacatgacccgtggcacccgggcaacttcctcatcggatgctccttccttatattcatcctcaccacacgcttcatcgggaggaggtacaagaagctgttctggctgtcagcgatttcacctctgctatcggtcatcctgtccaccgctgcagtctacgcaacaagggccgacaagcacggcgtcaagatcatccagaaggtgcacgcaggcttaaacccaagttcagccaagcagatacacctgaacgggccgcacgccacggaatgtgccaagatcgccgtcatctgcgcagtcatcgccctcacggaagctatcgccgttgggcgatctttcgcctcggtaagagggtacaaacttgacggcaacaaggagatgctggcgatggggttctccaacgttgctggatctctgtcctcgtgttatgtggcaacaggttcattctccagaacggcagtgaacttcagcgcgggcgccaggtcgactgtttcgaacatcgtcatgtccatcaccgtgttcgttgccttggagttgttcatgaagctcctctactacacacccatggcggtgctcgcctccatcattctatcagctcttccggggctgatcgacatcaaagaagcttgcaacatatggaaaatagacaagatggatttcctcatctgccttggtgcatttgttggtgtcctgtttgggtcggtggagattgggcttgcagttgcacttgccatttccttcgcaaagatcatcatacagtcaattcgacctcaggtagaggttcttggcaggctacaagggacaaacatcttctgcagcgtcagacaataccctgtagcttgccaaactccgactgtgctaccgatacgcatggacacatccttcctctgtttcatcaatgccactttcatcaaagaaaggatcatagagtgggttcgggaagaagtggagaacccaaatggaaaagcgagagagaggatacaagcagttgtccttgatatgtcaagtgtggtaaacatcgacacttcaggactcactgctctggaagaaatacacaaggagttggtgtctcttggcatacagatggctatagccagtccaggatggaaggcagttcagaagatgaaagtgtcgcgggtggtcgacagagtaggagaagattggatcttcatgacagtaggtgaagcagtggaggcctgtctagctgctcataagggcacagctctcgaatgttga

SEQ ID NO: 1208 - protein, 660 aa, Sorghum bicolor
MEASSASAVESTATVSVFDVSSNKQRPDTAKLVLNSPSPPSLREELVGVVGKAFRPRPPGGGGRAPRCPWILTALQCVFPVLQWGRTYTLKSFRSDVMAGLTLASLGIPQSIGYANLAKLDPQYGLYTSVVPPLIYAVMGTSREIAIGPVAVVSLLLSSMIQKVVDPAADPATYRSLVFTVTFLAGVFQVSFGLFRLGFLVDFLSHAAIVGFMGGAAIVIGLQQLKGLLGLSHFTNSTDVVSVVKAVCSALHDPWHPGNFLIGCSFLIFILTTRFIGRRYKKLFWLSAISPLLSVILSTAAVYATRADKHGVKIIQKVHAGLNPSSAKQIHLNGPHATECAKIAVICAVIALTEAIAVGRSFASVRGYKLDGNKEMLAMGFSNVAGSLSSCYVATGSFSRTAVNFSAGARSTVSNIVMSITVFVALELFMKLLYYTPMAVLASIILSALPGLIDIKEACNIWKIDKMDFLICLGAFVGVLFGSVEIGLAVALAISFAKIIIQSIRPQVEVLGRLQGTNIFCSVRQYPVACQTPTVLPIRMDTSFLCFINATFIKERIIEWVREEVENPNGKARERIQAVVLDMSSVVNIDTSGLTALEEIHKELVSLGIQMAIASPGWKAVQKMKVSRVVDRVGEDWIFMTVGEAVEACLAAHKGTALEC

SEQ ID NO: 1209 - DNA, 597 bp, Sorghum bicolor
atggcggcgaggcgcgacaccgagttggacggcgaagagctcggcggcgagggctccaaccccgtcggtggtggcgcgactccaccgcccctaggcgcagcccctgtcgtatgcgtcctccgctccgctggggacttcgctggcggcgccttcattggatccgtcttcggatatggacaaggcttgctcactaagaagggttttaagggctcattcagcaatgcagggtcctctgccaagacttttgcagttctctctggagttcagagtttggtcgtgtgcttgttgcgaaggctacgtgggaaagatgacattgtcaatgctggtatagctggttgttgtactggtgttgctttgagctttccaggagcgccacaagcgttgcttcaaagctgtgccacctttgcagcattctcatgcatcatggaggggctcaataagcagcaggctgcaatggctcgcacacttggtgggactgccgtgacggtcgtgcatgagaaaggcggtgttctgcccccgttcacgctgccaccaattcttgatgcatctgatgctttagcttcatgctgcttagcgttagtaaagcctaagcactag

SEQ ID NO: 1210 - protein, 198 aa, Sorghum bicolor
MAARRDTELDGEELGGEGSNPVGGGATPPPLGAAPVVCVLRSAGDFAGGAFIGSVFGYGQGLLTKKGFKGSFSNAGSSAKTFAVLSGVQSLVVCLLRRLRGKDDIVNAGIAGCCTGVALSFPGAPQALLQSCATFAAFSCIMEGLNKQQAAMARTLGGTAVTVVHEKGGVLPPFTLPPILDASDALASCCLALVKPKH

SEQ ID NO: 1211 - DNA, 468 bp, Sorghum bicolor
atgcttatgagctcattgctattgcaggtccttcatgcatcaaatattggagattccggattccttgtgataaggaacggagaggtccataaaaaatcaaaaccgatgacctatggtttcaatttcccgttgcaaattgaaaagggcgatgacccttttaaaatcgtacagaactacgccatcgatctacaagaaggtgatgtcattgtaacagcatcagatggtctttttgacaacgtctatgaagaagaagtagcaggcattgtctccaaatcattagaagctgatctcaggcccacggaaattgctgatttattggttgcaagagcaaaggaagtggggcggtgtgggtttggaagaagcccgttttcagactctgctctggcggctgggtacctgggttactccgggggcaagctggatgatgtaactgttgttgtatctattgttcggaaatctgaggtttaa

SEQ ID NO: 1212 - protein, 155 aa, Sorghum bicolor
MLMSSLLLQVLHASNIGDSGFLVIRNGEVHKKSKPMTYGFNFPLQIEKGDDPFKIVQNYAIDLQEGDVIVTASDGLFDNVYEEEVAGIVSKSLEADLRPTEIADLLVARAKEVGRCGFGRSPFSDSALAAGYLGYSGGKLDDVTVVVSIVRKSEV

SEQ ID NO: 1213 - DNA, 735 bp, Sorghum bicolor
atggtgtcgctgcagtcctcggcggtcctgccggaggccaccaaacgccccccgtggctctccctcgtcggcagcgtcgtcgcctcctccaccggtaccgcggcggccaccagcaagaagcggaagcgggacggcagcgacgacgaccgcggcgaggtcgtggacgggatcgagctcaatttcgacgccgcgccgctgccccccgagtggcaacgctgcctcgacatcaagtccgggcagatccactactacaacacgaggacgcagaagcggacgtggaaggacccaaggggggattcggactaccgcgccgccgcgccgacctccggcgaagacgacggcgaggaggaagaggaggactccgcgaattgcgcgccgccagggctggacctagagctgaacctcacgttcgagccgcgccgggcgttcgccgccgcccacgagaagaagaagcccaagcccgcggtggcggcagacgaccgtcgtcgtcttcagctggccgcggaggaggaggccgaggacagcagcggcagcagggagatggtggccggcgtgtgcgtgcggtgccacatgctggtgatgatgtgccgcgccagcccggcgtgccccaactgcaagttcctgcacccacccagccgcgccgccccgccgccgccgccgccgccgccgccgccggagcctgagccgccggtgccactcaagctcggtctccagctgctctgctgcagggactag

SEQ ID NO: 1214 - protein, 244 aa, Sorghum bicolor
MVSLQSSAVLPEATKRPPWLSLVGSVVASSTGTAAATSKKRKRDGSDDDRGEVVDGIELNFDAAPLPPEWQRCLDIKSGQIHYYNTRTQKRTWKDPRGDSDYRAAAPTSGEDDGEEEEEDSANCAPPGLDLELNLTFEPRRAFAAAHEKKKPKPAVAADDRRRLQLAAEEEAEDSSGSREMVAGVCVRCHMLVMMCRASPACPNCKFLHPPSRAAPPPPPPPPPPEPEPPVPLKLGLQLLCCRD

SEQ ID NO: 1215 - DNA, 1179 bp, Sorghum bicolor
atggaactcctcgacgcgaggcaccgccacacgccggattcgagctcctccccggacgccgcctccgacatggggctcccgctcgccggtgccgcctaccagccctacgtctccgagctcctctccttctccatcgagcgcctccacaaggagccggagcttctgagggtcgacgcggagcgggtgcggcggcagatgcaggaggtggcggtggagaactacggcgccttcatcgccgcctccgaggcgctctccttcgttcgcgcgcagctcgagagcttcgacggccacctcgaggccatgatagaggagataccaaacttgacatctggctgcactgagtttgttgagtccgcacagcaaattttggaggagaggaagcttaatcaaacattactagcaaaccatactacattgcttgacttgcttgaaatcccacaactgatggacacgtgtatacggaatgggaactatgatgaagcacttgatctagaagcttttgttagcaaaatctcgaagttgcaccccgatttacctgttgtccaaggattagctgctgaagtcaagaagacagtacaatcattaatttcacagcttctccagaaacttcgatcaaatattcagttacctgaatgcctccgtattgtagcacatctgcgtcgaattggagttttcagtgagtcagaattgcgcttacagttcctgaggtgcagggaagcttggctttctgggattcttgaagatctggaccaaaggaatgtttatgattacctgaaaggcatggtgacttgccacagagtacatctatttgatgttgttaatcaatatcgagcaatattcaacaatgataaatctggaaatgacgagaactatgacggtgggctgcttttcagctgggcaatgcaacaagttagtaatcacctcactactcttcaagttatgttaccaaacataacagaaggtgggtctctgtccaacattcttgaacaatgcatgtattgtgcaatgggtcttggcttagttggattggatttccgtggcctccttccaccaatctttgagaatgcggttctaaacttattctcaaagaatatgagtacagcggttgaaaattttcaggtaaagcagtgttttgcaaccattatgcatgttgaaatgctgagatcaactataaactga

SEQ ID NO: 1216 - protein, 392 aa, Sorghum bicolor
MELLDARHRHTPDSSSSPDAASDMGLPLAGAAYQPYVSELLSFSIERLHKEPELLRVDAERVRRQMQEVAVENYGAFIAASEALSFVRAQLESFDGHLEAMIEEIPNLTSGCTEFVESAQQILEERKLNQTLLANHTTLLDLLEIPQLMDTCIRNGNYDEALDLEAFVSKISKLHPDLPVVQGLAAEVKKTVQSLISQLLQKLRSNIQLPECLRIVAHLRRIGVFSESELRLQFLRCREAWLSGILEDLDQRNVYDYLKGMVTCHRVHLFDVVNQYRAIFNNDKSGNDENYDGGLLFSWAMQQVSNHLTTLQVMLPNITEGGSLSNILEQCMYCAMGLGLVGLDFRGLLPPIFENAVLNLFSKNMSTAVENFQVKQCFATIMHVEMLRSTIN

SEQ ID NO: 1217 - DNA, 213 bp, Sorghum bicolor
aaaaaaactcgacctgcggggggtaagacagcccccgggcattgcattaagaagaaaaccttctcacgcaggtcgagaaaacccccgaacccctgccccacccatacacagcggcaccgtagcccatgtgagaacgaccaacgacctggaccggaccttagacctgtgctttggcatgggacagacgaggggatttttttaaccttagcctga

SEQ ID NO: 1218 - protein, 70 aa, Sorghum bicolor
KKTRPAGGKTAPGHCIKKKTFSRRSRKPPNPCPTHTQRHRSPCENDQRPGPDLRPVLWHGTDEGIFLTLA

SEQ ID NO: 1219 - DNA, 720 bp, Sorghum bicolor
atggtgacggcggccgcggagacgatggggatgtcgccgtacgaggcggcgagggagcggaatgtgcaggagaacaagcgcaagatggaggcgctcaacctgcgccacctctccgccgtcatcaaggaggcacccaagaccccttcccctctgaagcccaagaggcgcaggatcatcgagaacgcggtcgtggttccctcgcctcctaggaggtcccgccggcttgcgcaactccctgaggtcaagtacgcagagatagcaccacacactgcagaaagaatgacaagatctcctagaaaaccagctgacctcatctacttggcaagaagcggaacagtttccatgaaagctaggttggaggcaacaagaaaggccgaggagctagaatcacaacttgaccctgacatcccatcctttgtgaaggcaatgttgcattcacatgtggttcgaggtttttggctgcaacttccgtgccatttctgtcacacttacatgccaaagcaagactccattatcaccttggtggatgagaagggtgaagaattcgccaccaactaccttgcctacaagaaagggctaagtggcggatgggctggttttgctctatgccatgggatgcatgacggagatgcagctgtttttcagttgattaagcccacgaccttcaaggtgtatatcgtccgagcagcttctgatgatggcagtgaggttgatgagtga

SEQ ID NO: 1220 - protein, 239 aa, Sorghum bicolor
MVTAAAETMGMSPYEAARERNVQENKRKMEALNLRHLSAVIKEAPKTPSPLKPKRRRIIENAVVVPSPPRRSRRLAQLPEVKYAEIAPHTAERMTRSPRKPADLIYLARSGTVSMKARLEATRKAEELESQLDPDIPSFVKAMLHSHVVRGFWLQLPCHFCHTYMPKQDSIITLVDEKGEEFATNYLAYKKGLSGGWAGFALCHGMHDGDAAVFQLIKPTTFKVYIVRAASDDGSEVDE

SEQ ID NO: 1221 - DNA, 2346 bp, Sorghum bicolor
atggaggctatgacgggtggcaaattccttgaaaagtttcggctctacgaaaccagatcgaaattttatcttattggaagagacaagagcagaatacactggagggtgctaaaaattgatcggttggagtccactgagctgggtgtcgaggaggatccaactatttacacggaggatgaatgccaagaactgctttgccggattcatgtggggaacatgttgactggtggactgaaatttgtcacaaaatgttacggaatagttggttttgtaaagtttcttggtccttattacatggttataataaccaggagaaggaaaattggcacaatatgtggccatgaaatttactccgttggcaagagcgaaatgatcgcaattccaagtgttatagtctggcccaacgtggcttattctagggatgagaacaggtataagcgcctgctttgttcagttgatctttcgaaggatttcttcttcagctactcttacaacatcatgcgcagccttcagaagaacatatccgagaagaatactgggcaggttgtttatgaaacaatgtgtgtatggaatgaatttctgacgagagcaattcggaatcatctcaagaatacctgttggactgttgccttagtccatggattttttaaacagtcgaagctctctgtatctggcaaggatttttggttgacccttatagctaggcgctcgcgacattttgctggaaccagattcttgaaacgtggagttaatgaaaagggcagggtagccaatgatgttgagactgaacagattgtttttgaagacacatctgatggaatcccaactcagatagcttctgttgtacaacatagaggatcgatacctcttgtctggtttcaggagacttcaaggcttaatattagaccagatattatattaaaacctgatgtggactacaaggcgactcgccttcattttgagaaccttgcacttagatatgggaatccaataatcatcttgaacttaataaagacccgcgagaagaagccccgtgaatctctgctccgtgcagaatttgcaaaggctatccattacattaacaagagcctacctgatgacaagcgtctaaaatttttacacatggatctgagtaagctttctcgaaggaaaggaaccaatgtgcttgcactgttgaacaaggtggcatcagatgtgttggatctaactgaattcctccactgcgaaataagtacatcaacaaaacctgatgacacctcaagtggagaagaaactgttggcagaccacttgatgacagaagtagcagagatcaaactgaatgtgcagctaagttggcacctcttttattacagaagggtgtcctcaggacaaattgcatagactgcttggatcgcacaaatgttgcacaatttgcatatggtttagttgctttagggcgtcaacttcatgtattggggcttattgaagcacagaaaattgaattgcatgatcctctggctgatgatctgatggatttctatgaacggatgggtgatacattagctattcagtatggtggttctgctgctcacaacaagatcttctgtgagcaaaggggccaatggaaggcagcaacccaatctcaggagttccttcgaacccttcaacgctactacaataatgcctacactgatcacgagaagcaggatgctataaacatgttcttaggtcatttccaacctcagcaagggaaacctgcattgtggaagctggactcagatcagcattacaacattgggaggcaaggaactttaaaagaagagattggaagatcattcataaagaggtcgctatcagatggtaacatattgttggagaacagcttgcctataactaactgtaacaatgaaacaaacagcacagaattgctcccaatgcaacagctggatgatattagagaaccttctgattctgcgccagagatctccatatgcgaacctaacccgtgctccagtatgaactatggcacagtgcctggaagacactccatgtcagaagagcggcagagttatttgaaaagattaggttaccctgaattgcattcttcaaatttccttgaccttgatttgttgtcatcttcagggaattcgtgtgatgaggaagtttttgagaggtcatcactgatcaattcacctatggatgtgatcagtgttgaatcatctacgtcatacagtgaacaaggacacatagatgagggcagggatgacacagatctttcccgttctagcagccagctctcagacgttcgggactattctgatcgctttgcgcactgggtcgcaaatggaggcatgctttgctactag

SEQ ID NO: 1222 - protein, 781 aa, Sorghum bicolor
MEAMTGGKFLEKFRLYETRSKFYLIGRDKSRIHWRVLKIDRLESTELGVEEDPTIYTEDECQELLCRIHVGNMLTGGLKFVTKCYGIVGFVKFLGPYYMVIITRRRKIGTICGHEIYSVGKSEMIAIPSVIVWPNVAYSRDENRYKRLLCSVDLSKDFFFSYSYNIMRSLQKNISEKNTGQVVYETMCVWNEFLTRAIRNHLKNTCWTVALVHGFFKQSKLSVSGKDFWLTLIARRSRHFAGTRFLKRGVNEKGRVANDVETEQIVFEDTSDGIPTQIASVVQHRGSIPLVWFQETSRLNIRPDIILKPDVDYKATRLHFENLALRYGNPIIILNLIKTREKKPRESLLRAEFAKAIHYINKSLPDDKRLKFLHMDLSKLSRRKGTNVLALLNKVASDVLDLTEFLHCEISTSTKPDDTSSGEETVGRPLDDRSSRDQTECAAKLAPLLLQKGVLRTNCIDCLDRTNVAQFAYGLVALGRQLHVLGLIEAQKIELHDPLADDLMDFYERMGDTLAIQYGGSAAHNKIFCEQRGQWKAATQSQEFLRTLQRYYNNAYTDHEKQDAINMFLGHFQPQQGKPALWKLDSDQHYNIGRQGTLKEEIGRSFIKRSLSDGNILLENSLPITNCNNETNSTELLPMQQLDDIREPSDSAPEISICEPNPCSSMNYGTVPGRHSMSEERQSYLKRLGYPELHSSNFLDLDLLSSSGNSCDEEVFERSSLINSPMDVISVESSTSYSEQGHIDEGRDDTDLSRSSSQLSDVRDYSDRFAHWVANGGMLCY

SEQ ID NO: 1223 - DNA, 921 bp, Sorghum bicolor
atggccacaggcgccatcacgccgccgccggtggccggcgcgcggcgcgtcccccgtggacggggattcctccaccggcgcctcgccgcatcgcctatgaaagatgaatccatgatgatttccacagatggtagaaatgaggagacagacactgacagcctcaatgttgccagaggattgtctcaccctgggctttcctcaagtttatccaataaggcatcagtggccccaacccctttgcttccttctggaccatctgatctccggttcaatcgtcttcgaccctcaattgatgaaagtgattgcaaatacaaaagattatttggctgctatgttgctcgtgaggctgtaattgatgaggaatattggattgctgcatggttgagagcggaagatcactatgaaaatgagtcaggcaatcgctatgttgaaagctttaaaagaaagtttgcatcaaaggaattccatgcattaaagaagagatgcagcaaacagcacggagaaaagtatatctgttttgtcgcagtaaagaatgatgacctcaggcgaaccgtcctgaatagtgttgttggtaccttagatgtatgtgtaagacatcctctacatggtgagaaatttcctgaggagcctggaaagtcgtcacttcactgtcgaatttatcagcctgatcagccaaaatttgggtacgtaacaaatgtatgtgttgctaaatatgcgaggcgtcaagggattgccagcaacatgctgttattggccatagatgctgcaagactcaacggtgctgaaaatatttacattcatgtgcataaagacaacttaccagcatggaggctctatgatcagataggattcaagatggttgaccaggatggcggctcttgtcgttcatcagatctgtgcttactctccttcagttcatag

SEQ ID NO: 1224 - protein, 306 aa, Sorghum bicolor
MATGAITPPPVAGARRVPRGRGFLHRRLAASPMKDESMMISTDGRNEETDTDSLNVARGLSHPGLSSSLSNKASVAPTPLLPSGPSDLRFNRLRPSIDESDCKYKRLFGCYVAREAVIDEEYWIAAWLRAEDHYENESGNRYVESFKRKFASKEFHALKKRCSKQHGEKYICFVAVKNDDLRRTVLNSVVGTLDVCVRHPLHGEKFPEEPGKSSLHCRIYQPDQPKFGYVTNVCVAKYARRQGIASNMLLLAIDAARLNGAENIYIHVHKDNLPAWRLYDQIGFKMVDQDGGSCRSSDLCLLSFSS

SEQ ID NO: 1225 - DNA, 339 bp, Sorghum bicolor
atggggaggtcctcttccacggagaagctggtgtgcttcgtgctggcggtcctggccgtgctgtccccgctgtacatcgaccggcggcccgcggcggagcgcgaggaggatgaggacgaggacggcggcccgtcggcgctgtggctgccggcggtactcgtcgcgctcatcgcggccatcaacgtcacgtgcttcatggaccggcgcgtcgtcaggttcgacccctactggatccaccgcgtgtgggggtcctccggcggcctcctggccatgctgctgctcctcggcttcgtgctcaggtgcaaggcgtcgtccctgctgcagtataccagcacctag

SEQ ID NO: 1226 - protein, 112 aa, Sorghum bicolor
MGRSSSTEKLVCFVLAVLAVLSPLYIDRRPAAEREEDEDEDGGPSALWLPAVLVALIAAINVTCFMDRRVVRFDPYWIHRVWGSSGGLLAMLLLLGFVLRCKASSLLQYTST

SEQ ID NO: 1227 - DNA, 232 bp, Sorghum bicolor
atgttcgaatccagatcattccactcaggagaagacgtgcccaaattattgtgtgttttcccccacgagatcgtaaaatcactgtcaacagttaattcaggtcaaccatatccaggcacgaagcttcatcgttcctctgcaacgccagctcaccaagatgccaacacatgccatgccactatgtcgtccttcaaaaacctgctagagtttttaactgggggtgcatatccgt

SEQ ID NO: 1228 - protein, 78 aa, Sorghum bicolor
  misc_feature (78)..(78): Xaa can be any naturally occurring amino acid
MFESRSFHSGEDVPKLLCVFPHEIVKSLSTVNSGQPYPGTKLHRSSATPAHQDANTCHATMSSFKNLLEFLTGGAYPX

SEQ ID NO: 1229 - DNA, 1644 bp, Sorghum bicolor
atggagttggaggggctgtgggcacgggtgctgctcgacgcggcctccgccgcagcgccgggggaccgggcggcgtgggcagcggtgcgggcgcgcgcggtggcgccggtgctggaggccgcggtgtgggcgtgcctcgccatgtcggtcatgctcgtgctcgaggtgtgctacatgagcgtcgccagcttcgtcgccgtcaacctgctgcgccggaccccggagcggcggtaccgctgggagcccatgccctccgggaccgccggcggccagcaggacgatgaggaggccgcggtgggcagcggcggcggcgaggcgtacccgatggtgctcgtgcagatccccatgtacaacgagagggaggtctacaagctctctattggagcagcatgtgccctcacatggccgctcgaccgtattataatccaagtcttggatgattccaccgatccattcattaaggaacttgtggagcttgaatgcgaggattgggccagaaagaaaataaatataaaatatgaaactcgagaaagtaggaagggatacaaagcaggagccctcaagaagggcatggaacagggttatgcccaagaatgtgattttgtcgccatctttgatgcagattttcagcctgatcctgacttccttttaagaactataccatttcttgtgcataacccgaagattgctttggtacagacacgttgggagtttgtgaactacaatatttgcctactgacaaggatacagaagatgtcactagattatcatttcaaggtagagcaggaatcaggctcatctatgcatgccttctttggtttcaacggtactgctggtgtgtggcgggtatcagctattagggaagcaggaggatggaaggatcgcaccactgtagaagacatggacttggctgtgcgagcaagtctcaagggatggcaattcctgtatgttggtgatataagggttaagagtgaactcccaagtaccttcaaggcctaccgccatcaacagcacaggtggacttgtggtgctgccaacctcttcagaaaaatggccggggacattgttagaagcaagggggtaactgtatggaagaagcttcatcttctgtacagcttcttctttgtccgaagggtcatcgctcccatcctgacattcctgttctactgcgtcgtgatcccactgtctgttatggtccctgaagtcagtatcccagtctggggaatgttctacattcccactgctatcacggtcatgaacgccatcaggaatccatggtctatccatctggtgccaatatggatcctgttcgagaacgtcatgtcaatgcaccgaatgcgcgcggcactgacggggttgctggagaccatgtacgtggatgagtgggtggtcaccgagaaggtgggcgaccatgtgaagggcaagctcgagatccctctccttacaccggtgaagccaaccgagtgcgtcgagaggatctacgtgcctgagctcctggtggcgttctacctgttgctatgcgcgtcatacgatgtcgtgctcggaaccgggcactgctacctgtacatcttcctccaggccttcgctttcctcgtgctgggatttggcttcgtcggcaccgcgacgccctgttcttgtccatag

SEQ ID NO: 1230 - protein, 547 aa, Sorghum bicolor
MELEGLWARVLLDAASAAAPGDRAAWAAVRARAVAPVLEAAVWACLAMSVMLVLEVCYMSVASFVAVNLLRRTPERRYRWEPMPSGTAGGQQDDEEAAVGSGGGEAYPMVLVQIPMYNEREVYKLSIGAACALTWPLDRIIIQVLDDSTDPFIKELVELECEDWARKKINIKYETRESRKGYKAGALKKGMEQGYAQECDFVAIFDADFQPDPDFLLRTIPFLVHNPKIALVQTRWEFVNYNICLLTRIQKMSLDYHFKVEQESGSSMHAFFGFNGTAGVWRVSAIREAGGWKDRTTVEDMDLAVRASLKGWQFLYVGDIRVKSELPSTFKAYRHQQHRWTCGAANLFRKMAGDIVRSKGVTVWKKLHLLYSFFFVRRVIAPILTFLFYCVVIPLSVMVPEVSIPVWGMFYIPTAITVMNAIRNPWSIHLVPIWILFENVMSMHRMRAALTGLLETMYVDEWVVTEKVGDHVKGKLEIPLLTPVKPTECVERIYVPELLVAFYLLLCASYDVVLGTGHCYLYIFLQAFAFLVLGFGFVGTATPCSCP

SEQ ID NO: 1231 - DNA, 468 bp, Sorghum bicolor
atggatcaggagcgcagccccaggggcaatgctcggcggagcgggagcggcggcgcgtcgtcttcgaagcacaagagcgccggcggcggcaggaagccgatcaaggtgctttacatcgacaaccccatgcgcgtcaagaccagcgccgcgggtttccgcgccctcgtgcaggagctcaccggccgccacgccgacccctccaagtacagccccgacgaccttgactccggcggcgtcgcccaggggctgagccccaggggcgcggacgcgtcgtcggaaaccatcgtcgcaagcccaagccccaggcctggcaataataaggcggcggcggcggacggcggggactactacgatggcgaggacgacgacgaggacggcttcaggtcgcagctgctgctggagaacaactatacggtgttctcgccgccgacgctgctctacgaccatcacctgcacaccaaggtctga

SEQ ID NO: 1232 - protein, 155 aa, Sorghum bicolor
MDQERSPRGNARRSGSGGASSSKHKSAGGGRKPIKVLYIDNPMRVKTSAAGFRALVQELTGRHADPSKYSPDDLDSGGVAQGLSPRGADASSETIVASPSPRPGNNKAAAADGGDYYDGEDDDEDGFRSQLLLENNYTVFSPPTLLYDHHLHTKV

SEQ ID NO: 1233 - DNA, 2529 bp, Sorghum bicolor
atggggaggtggtggcaggctgccctgctgggctgcgcagtggcggtggctgttctggcggccgccgtggaatgcgcggtgacgtacgacaagaaggcggtgctgattgatgggcagaggcggattctcttctccggatccatacactaccccaggagcacccctgatatgtgggaagggctgattcagaaggctaaagatggaggcttggatgtgattcagacctatgtcttttggaatggacatgagcctacgcctggaaattactacttcgaagagaggtacgatttggtcaggttcataaagacggtccagaaggccgggctgtttgtacatctccgcatcggtccctacatttgcggcgagtggaacttcggtggcttcccagtttggttgaagtatgtaccaggcatcagcttcaggacagacaacgaacctttcaagacggcaatgcagggtttcactgagaaaattgtgggaatgatgaagagcgaaaaactctttgcatcccaaggtggccctattatcctctctcagattgagaatgagtatgggccagaaggcaaggagcttggtgccgcaggtcaggcatatatcaactgggcagcaaagatggccatcggattgggcactggtgtgccgtgggtgatgtgcaaagaggaggatgcacctgatccagtgatcaatgcatgtaatggtttctactgtgatgcattttctccaaacaaaccatacaagcccacaatgtggactgaagcttggagtggctggttcacagaatttggtgggaccatccgccaacgaccagttgaagatctcgcatttgctgttgctcgatttgtacaaaagggtggttcttttatcaattactacatgtatcatggaggaacaaatttcgggcgcactgctgggggtcccttcatcacaacaagctatgattatgatgctccaattgatgaatatggacttgttagagaaccaaagcacagtcatcttaaagaactccacagagctgttaagttatgtgagcaggctttggtttctgttgacccagcaattactacccttggaaccatgcaagaggcccatgtcttccgatctccatctggttgtgcagctttccttgcaaactacaattctaactcctatgcgaaagttgtgttcaacaatgagcaatacagcctcccaccttggtcaattagcatccttcctgattgcaagaatgtagtttttaacagtgccacagttggtgttcagacatctcaaatgcaaatgtggggagatggagcctcatcaatgatgtgggagaggtatgatgaggaggttgattctctggctgctgctccattgctcaccacaactggtttgcttgagcagcttaacgtcacgagagacagcagtgattatctgtggtacataaccagtgttgacatcagcccatctgaaaactttctacaaggtggtggcaagcctctgtctctcagtgtgctgtctgctggtcacgccttgcatgtctttgtcaacggagagcttcaaggttctgcttatggtaccagggaagatcgaagaattaaatataatggtaacgctaaccttcgagctggtactaacaaaatcgcactgctgagtgttgcttgtggattgccgaatgttggagtgcattatgagacatggaacactggtgttggtggtcctgttgggcttcatgggttgaatgaaggatcacgagatcttacttggcagacttggtcctatcaggttggcctgaaaggtgaacagatgaatctgaactccctagaaggctcaacctcagttgaatggatgcaagggtcgttgatagctcaaaaccaacagccattgtcctggtatagggcttacttcgaaactcccagcggagatgagccattggctctggatatgggtagcatgggcaagggccaaatctggataaatggacaaagcattggacgctactggacagcatatgcagatggggactgcaaagagtgcagttacactgggaccttccgggcacccaagtgtcaagcaggctgtggtcagcccacgcaacgttggtatcatgtgccaaggtcctggctacaacccaccagaaacctattggtagtttttgaggaacttggtggggattcatcaaagattgccctagtgaagaggtcagtctcaagtgtctgtgccgatgtatctgaggatcatccaaacatcaagaactggcagattgaaagctatggcgagcgtgagtaccacagggccaaggtgcatttaagatgctcacctgggcagtctatttctgcaatcaaatttgcaagctttgggacacctatgggaacatgtggaaatttccagcaaggagattgccactcagctaactcacacactgttctagagaagaaatgcattgggctccaaagatgtgccgtcgccatctcccccgagagctttggaggagatccctgcccgagggtgacgaagagggtggcggtcgaggcagtatgttctcccactgcttag

SEQ ID NO: 1234 - protein, 842 aa, Sorghum bicolor
MGRWWQAALLGCAVAVAVLAAAVECAVTYDKKAVLIDGQRRILFSGSIHYPRSTPDMWEGLIQKAKDGGLDVIQTYVFWNGHEPTPGNYYFEERYDLVRFIKTVQKAGLFVHLRIGPYICGEWNFGGFPVWLKYVPGISFRTDNEPFKTAMQGFTEKIVGMMKSEKLFASQGGPIILSQIENEYGPEGKELGAAGQAYINWAAKMAIGLGTGVPWVMCKEEDAPDPVINACNGFYCDAFSPNKPYKPTMWTEAWSGWFTEFGGTIRQRPVEDLAFAVARFVQKGGSFINYYMYHGGTNFGRTAGGPFITTSYDYDAPIDEYGLVREPKHSHLKELHRAVKLCEQALVSVDPAITTLGTMQEAHVFRSPSGCAAFLANYNSNSYAKVVFNNEQYSLPPWSISILPDCKNVVFNSATVGVQTSQMQMWGDGASSMMWERYDEEVDSLAAAPLLTTTGLLEQLNVTRDSSDYLWYITSVDISPSENFLQGGGKPLSLSVLSAGHALHVFVNGELQGSAYGTREDRRIKYNGNANLRAGTNKIALLSVACGLPNVGVHYETWNTGVGGPVGLHGLNEGSRDLTWQTWSYQVGLKGEQMNLNSLEGSTSVEWMQGSLIAQNQQPLSWYRAYFETPSGDEPLALDMGSMGKGQIWINGQSIGRYWTAYADGDCKECSYTGTFRAPKCQAGCGQPTQRWYHVPRSWLQPTRNLLVVFEELGGDSSKIALVKRSVSSVCADVSEDHPNIKNWQIESYGEREYHRAKVHLRCSPGQSISAIKFASFGTPMGTCGNFQQGDCHSANSHTVLEKKCIGLQRCAVAISPESFGGDPCPRVTKRVAVEAVCSPTA

SEQ ID NO: 1235 - DNA, 2583 bp, Sorghum bicolor
atgcagcccggcggcggcggtgcgatccgcgtgctgaacgtggcggagaagccgtcggtggcgaaggccgtggcagagatcctgtcgcgccgctcaatgcagtcgcgggcgggccggtcccagtacaaccgcatcttcgagttcaactacgccatcaacggccgcgcctgccacatgctcgtcacctccgtcacgggccacctcatggagctcgaattcgatgagcgcttccgccgctggcactcctgcgaccccgccgagctcttccacgcccccgtccgcaagtccgtgccccaggacaagcaggccataaaacagactttggaagaagaagctaggagatgccagtggctggtgctatggcttgattgtgatagagagggtgagaacatagcatatgaagtgatcgatgtttgtacaggtgccaacagtcatcttaacatttggagggctcgcttctcagctttgattgacagggaaatacatgaatctgtgcaacatcttggcaggcccaacaagctctttgcagatgctgtggatgcaagacaggaaattgaccttcgcattggtgcctccttcacaaggtttcaaacaatgctgttaaaagatgcatttgtaattaatgtgactggggatgacaggaatttagttctgagctatggtccttgtcagtttccaaccctaggattcattgttgagcgtttctgggagattcaagctcatgaacctgaagagttctggactataaattgtactcatacttcagatgaaggcactgcatcttttggttggatacgtggtcatttgtttgattattcatgtgctattagtatctacgaaatgtgtgtttcagaaccaatggcaacagtacaaaatgttaggaatcaagagaaactaaaataccccccatatccactaagtacagtggagcttcagaaacgtgcttctaggtactttagaatgagttcagagcacacaatgaaggtggctgaagaactttatcaagctggattcattagttatccgaggacagaaactgataacttctccccaaacactgacctgcatgcaattgtacgtgaacaagtgaatcatccagtttggggagcatatgctcagcgacttctaaatcctgaagcaagactttggagaaatcccagtaacggtggtcatgatgacaaggcacatcctcctattcatccaaccaaattttcagaaggcgaaagaaactggagcccagaccacattagattgtatgagcttgttgtccgacatttccttgcatgctgttctcaaccggctgttggagctgaaacaactgtggaaattgacatagctggtgaacagtttaacgcatcagggcgtgttatacttgctaaaaattatctggatgtttatcgctttgactcatggggtggaacattacttccaacatacaacattgggcagcagtttgttccgacaactttaacacttgattctggagtgactcggccaccccctcttcttgctgaagctgaccttcttagctgtatggataaagcaggaattggcactgatgcaaccatgcatgatcacataaagaagttgcttgaccgttgttatgcaaccaaagatgaaaacacacgtttctccccgacaaatcttggtgaggcattggtgatgggatatgatgaaatggggtatgagctgtggaagccttatttaagatcaatgatggaagctgatatgaaatcagttagcatgggtactaagagtaaatcagaagtactcgagagttgtttgcagcagatgaaggcctgttttcttgatgcaagggtgaacaaagcaaaactccttgatgcaatggggacattcttcgcaaggtctaatagacctataaatgaaactcaaaatccggtagaggttgtgaggccttgtggggcgtgcaatggatctgaaatggtgcttaagcgaagggtgactggtgaatttatggttgggtgccgaagttacccacaatgtagaaacgtggtatggctcccaggatctctttcagaagcagctgtaactaatcaagtttgtcctatctgtgcaccaggccctgtctataagattcaattcaagttccgtcgtagggacattccaccaaatttcgatgttgatcacctaggttgtgttggtggatgtgatgatatcctcaaagagcttatggagctaagtaggtttggaagtcgtagccaggctgcaacaccaggtcaagtgctgtgcacctcatgtggagcggcttgcatatcactaactgctaatacagaggctaacagggggaggaagttctacaaatgtcaagatcctggctgtggcttcttcaaatgggaagacgaattggacaatggtacggggagaggccgccgcgggcgtggtagcagcaggcaggcgactgcatctgcatctgcaggacggagaggcggaggccggagggggagaggccgtaacgctgacggcgggatgttcgtttcagcgacgggcgacaccgtgcccggctgctgctttacctgcggcgatccttcccacttcgccaacgcctgcccgaaccggagatag

SEQ ID NO: 1236 - protein, 860 aa, Sorghum bicolor
MQPGGGGAIRVLNVAEKPSVAKAVAEILSRRSMQSRAGRSQYNRIFEFNYAINGRACHMLVTSVTGHLMELEFDERFRRWHSCDPAELFHAPVRKSVPQDKQAIKQTLEEEARRCQWLVLWLDCDREGENIAYEVIDVCTGANSHLNIWRARFSALIDREIHESVQHLGRPNKLFADAVDARQEIDLRIGASFTRFQTMLLKDAFVINVTGDDRNLVLSYGPCQFPTLGFIVERFWEIQAHEPEEFWTINCTHTSDEGTASFGWIRGHLFDYSCAISIYEMCVSEPMATVQNVRNQEKLKYPPYPLSTVELQKRASRYFRMSSEHTMKVAEELYQAGFISYPRTETDNFSPNTDLHAIVREQVNHPVWGAYAQRLLNPEARLWRNPSNGGHDDKAHPPIHPTKFSEGERNWSPDHIRLYELVVRHFLACCSQPAVGAETTVEIDIAGEQFNASGRVILAKNYLDVYRFDSWGGTLLPTYNIGQQFVPTTLTLDSGVTRPPPLLAEADLLSCMDKAGIGTDATMHDHIKKLLDRCYATKDENTRFSPTNLGEALVMGYDEMGYELWKPYLRSMMEADMKSVSMGTKSKSEVLESCLQQMKACFLDARVNKAKLLDAMGTFFARSNRPINETQNPVEVVRPCGACNGSEMVLKRRVTGEFMVGCRSYPQCRNVVWLPGSLSEAAVTNQVCPICAPGPVYKIQFKFRRRDIPPNFDVDHLGCVGGCDDILKELMELSRFGSRSQAATPGQVLCTSCGAACISLTANTEANRGRKFYKCQDPGCGFFKWEDELDNGTGRGRRGRGSSRQATASASAGRRGGGRRGRGRNADGGMFVSATGDTVPGCCFTCGDPSHFANACPNRR

SEQ ID NO: 1237 - DNA, 1134 bp, Sorghum bicolor
atgggtaattgctggtttaaggggaatccatactttaacagggtttcttccaatgcaaccaaatcagaatctcccaaaattcagagcccatcggagagaactgaaaaggaggactgccagctaccatccaacccaaaagaagtggaggcgctgagaaaggatacagcctgcaatcctttgatagcattcacatttgaggagctcaagagaattaccaaaaatttcaggcaagattcattactagggggtggtggatttggcagagtctacaaaggtttcatcaccaaggatctccgtgaaggattagagatagaagagcccctgagagttgccgtaaaggtccatgatggtgacaatagcttccaaggccatagggagtggctggcagaggttatatttcttggacagctctctcacccaaatttagtgaagttgattggctactgttgtgaagatgaccacagggttcttgtttatgagttcatgcctctaggaagtgtggagtctcatttattttcaagggttatggtgccacttccgtggtcgatcagaatgaaaattgcgctcggtgctgcaaaaggacttgcttttctgcatgaagctgagaagccagtcatctatagggactttaagacatcaaacatattgctagatgaggaatacaatgcaaaactatctgactttgggcttgcaaaagatggaccagttggcgataaatcccatgtttcaactcgtattatgggtacctacggttatgctgcaccagagtacattatgacagggcatctaacagcgatgagcgatgtctacagctatggtgttgtactactggagctcctcacgggccggaagtcactcgacaagtcccgacctgtcagggagcagatgttggcagactgggcattcccgctgttgacacagaagaagaaggtacttggcatagtagacccaaggcttgccgaggactacccagtaaaggcggtgcagaagacatcgatgttggcataccattgccttagccacaacccaaaggctaggccgctgatgcgtgacatcgtggcgactttggagcctcttcagcagctggaggagacccctagtgacagtgtggcgatgacacttcaagggacttga

SEQ ID NO: 1238 - protein, 377 aa, Sorghum bicolor
MGNCWFKGNPYFNRVSSNATKSESPKIQSPSERTEKEDCQLPSNPKEVEALRKDTACNPLIAFTFEELKRITKNFRQDSLLGGGGFGRVYKGFITKDLREGLEIEEPLRVAVKVHDGDNSFQGHREWLAEVIFLGQLSHPNLVKLIGYCCEDDHRVLVYEFMPLGSVESHLFSRVMVPLPWSIRMKIALGAAKGLAFLHEAEKPVIYRDFKTSNILLDEEYNAKLSDFGLAKDGPVGDKSHVSTRIMGTYGYAAPEYIMTGHLTAMSDVYSYGVVLLELLTGRKSLDKSRPVREQMLADWAFPLLTQKKKVLGIVDPRLAEDYPVKAVQKTSMLAYHCLSHNPKARPLMRDIVATLEPLQQLEETPSDSVAMTLQGT

SEQ ID NO: 1239 - DNA, 2133 bp, Sorghum bicolor
atggccgccgtcgcgccgcccccggctcccgcgcccgccgcgcctgcaccggctgctgctgctgctgctgctccggctccggctcctgccaccgtccctgtcgcggatcaaaccacggatctgctgcagaagctgtcgctggatccgcagcccaaggcggcggatgcaacagagcctactgctgctgccaagaagggcgctgtgacgagccagccgctaagtgtggccataccgccggagcggtccatcacaccggtgcttcaagactttatggatcccaacctattctatctaccagcgtattactatggaggctacgacagttccatgagcgagtgggatgattatccaagatatctaaattcagatggagtggagattgccccagcagtatatggagatatttatggatatgggtatgctccttatggggcatactctcctgccacttccccagctccaacggttgatggccagatgtttggtgcacagcattaccagtatccaactgcgtattttcagcctcctacaccagttccttctaccactcaaagtgacctccagtcttctaacaatactgaaaagccagcagctaaagcagatcctgccaagacaactgctaacggtgttccaaatggtactgctcatagtaacagtggaactgtaccccttgcgtcaagccaacaaaattcatcactgacgcctgatggaacttatagggcgccattgctaggtggagttccttctgctggttacctggacatgacatatgggtatgacagcacaggggcacactttgcatggtatgatggctctgcttatgcaaatggtcagcaaagaacaactacaactaatcattatccatcctcaacattcagtggtaatggttcctcagcaagaaatcagaacaagagctccaccacgccgcagatgggtatgcagaacagaagacctacaactacatcagcaactcctacttataccaataggatgtaccctagctcccgaccatacacccagtatgggaattcaataaaaactggtcttccctacgggagtaacggttacgattccaggatatatggtcgatggggcgttggtatggataacaggtacaggcctaggggccgtaatggatactatggttatggcaacgagagtcaggatggaacaattgagttaaacagaggtcctagatctggccgtttcaagaaccagaaattgtatggtcatactgtcactattgctgtgaaagggcagagccttccttctggtgaaagcaagaatgatagtgccgtgcccgatagagcacagttcaatagagacgacttccctgttcagtatgatgctgcaaagttcttcgtcatcaagtcgtacagcgaggatgacatccacaagagtgtaaaatacaatgtgtgggcaagcacaaccaatggaaacaagaagcttgatgctgcttatcaagaagctcagtcaaagggctctgcatgccctatattcttgtttttctcagtgaatacaagtggtcagtttgttggtgttgctgaaatgactggtgctgttgattttgagaaaactctggagtattggcagcaggacaagtggaatggttccttctctgttaagtggcatattgtcaaggacgtgcctaacaatattctcaagcacatcatcctagagaacaatgagaacaagcctgtcacgaatagccgtgacacccaggagatacaccttgaacaaggccttcagatgctcaagatcttcaaggatcatgtcagcaagacatccatcctggatgactttaccttctatgagagccgccagaaattgatgcaggataagaggtcgaaacagcagcaggtccaaaagcaggtctgggacagtaggacccccatttctgtcaccagcgagcaacagcaggaagctgctaatgggaagcccaatccgtctgatgtaccaaatggtgtcactgcagaggtgaaggcggtgaaggctcctgcagagaaacccgtcctcgccaatggagtcaccaacggagtaaccaccactcccgctgtttcctatgcagctaaggtggcccaaacagcaacagggaaacccatcctcgccaatggagtcgccaagaccggttag

SEQ ID NO: 1240 - protein, 710 aa, Sorghum bicolor
MAAVAPPPAPAPAAPAPAAAAAAAPAPAPATVPVADQTTDLLQKLSLDPQPKAADATEPTAAAKKGAVTSQPLSVAIPPERSITPVLQDFMDPNLFYLPAYYYGGYDSSMSEWDDYPRYLNSDGVEIAPAVYGDIYGYGYAPYGAYSPATSPAPTVDGQMFGAQHYQYPTAYFQPPTPVPSTTQSDLQSSNNTEKPAAKADPAKTTANGVPNGTAHSNSGTVPLASSQQNSSLTPDGTYRAPLLGGVPSAGYLDMTYGYDSTGAHFAWYDGSAYANGQQRTTTTNHYPSSTFSGNGSSARNQNKSSTTPQMGMQNRRPTTTSATPTYTNRMYPSSRPYTQYGNSIKTGLPYGSNGYDSRIYGRWGVGMDNRYRPRGRNGYYGYGNESQDGTIELNRGPRSGRFKNQKLYGHTVTIAVKGQSLPSGESKNDSAVPDRAQFNRDDFPVQYDAAKFFVIKSYSEDDIHKSVKYNVWASTTNGNKKLDAAYQEAQSKGSACPIFLFFSVNTSGQFVGVAEMTGAVDFEKTLEYWQQDKWNGSFSVKWHIVKDVPNNILKHIILENNENKPVTNSRDTQEIHLEQGLQMLKIFKDHVSKTSILDDFTFYESRQKLMQDKRSKQQQVQKQVWDSRTPISVTSEQQQEAANGKPNPSDVPNGVTAEVKAVKAPAEKPVLANGVTNGVTTTPAVSYAAKVAQTATGKPILANGVAKTG

SEQ ID NO: 1241 - DNA, 474 bp, Sorghum bicolor
atggggttcgtctccttcgtcgggagggtgctcttcgtcgccgcgttcctcctctccgcctaccaggagtttaatgaattcggtactgatggtgggccagcagctaaggcgctccagcccaagttcaatgtgtttgtcaaaaacatctctgctcaactaggagtagctgtgccgcacattgagctgaagcatgtgattgctgctacaattggtcttaagggtcttggaagtctcctttttattttgagcagctctctcggtgcttatctcctgttgttttaccttgctttgatcactcctatcattcatgacttctacaactacgatatggagaaggcagaatttgcgcagctctttgggaagttcacccaggatgtggctctgattggagctctcctcttctttctgggcatgaagaactccatcccgaagcggcagggcaagaagaaggctgccaaggcgaagacgaactaa

SEQ ID NO: 1242 - protein, 157 aa, Sorghum bicolor
MGFVSFVGRVLFVAAFLLSAYQEFNEFGTDGGPAAKALQPKFNVFVKNISAQLGVAVPHIELKHVIAATIGLKGLGSLLFILSSSLGAYLLLFYLALITPIIHDFYNYDMEKAEFAQLFGKFTQDVALIGALLFFLGMKNSIPKRQGKKKAAKAKTN

SEQ ID NO: 1243 - DNA, 486 bp, Sorghum bicolor
atggctgagaaggtgtccacgttggtcgtgacactcaaccatggctgctgccgctgcttcaccaagatccggaaaactgtctgcaagctgcaagaaaccgaggacatccgggtgatttcctacgacgaggtgtccgggacggtgacgatctctggcgccttcgacccgctggtgctcccctgcaagctccggcgcaaggcgggctgtgtgatcagggacatccagctcgtggcggcagaactgcggctcacaccgcagccaccaccgcgtccggcgcagcgaccagccatgctactaccaaatccgtcgtgctcgtgctgctgcggcatctgctggtgcaggaactacggctgctgctactgcggttgccagccctgcgcctgcttcgtgaaccacccgccgtgctatgggctgccgttggggcagtacccaaagatggtagtcgcctgcgaggaggtgtcgtctccggcgtgcatgatcatgtga

SEQ ID NO: 1244 - protein, 161 aa, Sorghum bicolor
MAEKVSTLVVTLNHGCCRCFTKIRKTVCKLQETEDIRVISYDEVSGTVTISGAFDPLVLPCKLRRKAGCVIRDIQLVAAELRLTPQPPPRPAQRPAMLLPNPSCSCCCGICWCRNYGCCYCGCQPCACFVNHPPCYGLPLGQYPKMVVACEEVSSPACMIM

SEQ ID NO: 1245 - DNA, 969 bp, Sorghum bicolor
atgacagaacagcagttgccaccaccgccagcatggttcttcttcctgttgctcgctgtcgtgggcggcgtctactcggcgtcgctgtcgttccgcctcctctcctacctggctctttccttgcgccgcccgaaggacctacgccgccggtacggcgcgtgggccgtggtcaccggcccgacgtcaggcataggccggtccgtggctctggagctcgcgcgccgcggcctgaacctcgtcctcctcgacctcgacgccgccaaccttgaggagacctccgacatggtcatgtctcgccatggcgtggagaccaagaccgtggtgttcgacctctccctcgtcggcacctctcgaggcgacgagtccatgaggcggctccgagcagcgatcgaagggctggacgtcggtgtgctggtgaacaatgccggggtgttgaggccgtccatggtgtacctgcacgaggccgacgtggaggcgttggtgcggatggtgcgtgtgaacctgtgggcgctgacggaggtgacggcggctgtcctgccggggatgctggagcgccggcggcggggagccatcgtcaacatgggctccgcgtcgtccgaggccatcccctccttcccactcaacaccatctacgccgccacgaaaaggtacgttgccatgttctcccggagccttcacgtcgagtatagaagccaagggattgatgtacagtgccaggccccgttcttcgtggcgaccaagatggtgaccagctgggccgtgcgagacaattggctctcggcgctcgtccccacaccagacgcctacgctcgagctgcgacgcgctggatcggccacggcccgctctgcacccctaatctcggccaccagctcctgtggtgcctcgcgggcatcctgccggacggcgtgcacgactggctccgcctgcgcgagcaccggcggctgagagcgctgttacaggaaaaatga

SEQ ID NO: 1246 - protein, 322 aa, Sorghum bicolor
MTEQQLPPPPAWFFFLLLAVVGGVYSASLSFRLLSYLALSLRRPKDLRRRYGAWAVVTGPTSGIGRSVALELARRGLNLVLLDLDAANLEETSDMVMSRHGVETKTVVFDLSLVGTSRGDESMRRLRAAIEGLDVGVLVNNAGVLRPSMVYLHEADVEALVRMVRVNLWALTEVTAAVLPGMLERRRRGAIVNMGSASSEAIPSFPLNTIYAATKRYVAMFSRSLHVEYRSQGIDVQCQAPFFVATKMVTSWAVRDNWLSALVPTPDAYARAATRWIGHGPLCTPNLGHQLLWCLAGILPDGVHDWLRLREHRRLRALLQEK

SEQ ID NO: 1247 - DNA, 681 bp, Sorghum bicolor
atggcagcaggtttgcaagtgtttggccagccggcatctactgatgttgccagggttctgacatgcctgtttgagaagaaattggaatttgagcttgtccgcatcgatacatttaagacacatcacaagcttcctgagttcattaggctgcgggatccgaatggccaagtgaccttcaagcatggcgacaaaactcttgttgattcaagggatatatgccggtatgtttgtaaccaatttccaaatgacggaaacaagaccctttatggatctggtgctctagaacgggcatcaatagaacagtggcttcaggcagaagctcaaaactttggccctcccagttctgcacttgtctttcagctggcatttattcctcatctcagtcatctgggcattcgtcaggaccctgctgttattgctgaaaatgaggataaactgaagcaggtccttgatgtttatgacgaaatactctccaagaatgagtacctggctggtgatgaattcaccttggctgacctttctcaccttccaaactcgcactacatcgtgaatactgaaaggggaagaaagctcttcactaacaagaagaatgtggcaaaatggtatgacaaactctccaagctcgagacatggaagcaggttgtcaagatgcagaaggaacatcctggcgcatttgagtaa

SEQ ID NO: 1248 - protein, 226 aa, Sorghum bicolor
MAAGLQVFGQPASTDVARVLTCLFEKKLEFELVRIDTFKTHHKLPEFIRLRDPNGQVTFKHGDKTLVDSRDICRYVCNQFPNDGNKTLYGSGALERASIEQWLQAEAQNFGPPSSALVFQLAFIPHLSHLGIRQDPAVIAENEDKLKQVLDVYDEILSKNEYLAGDEFTLADLSHLPNSHYIVNTERGRKLFTNKKNVAKWYDKLSKLETWKQVVKMQKEHPGAFE

SEQ ID NO: 1249 - DNA, 1023 bp, Sorghum bicolor
atgacgtcctgcgggtgcctggtgctcgagaaggtggagggcgacgcggcggcgaaggcgagggtgaaggccgcgccgggcgccggcgccggcgctgggtgcggctcgtgcgccggggactggcggggccggtccgaggccatcttccccatctacgtgatggggagctcgcgggggagcaccgtggcggcggcgcgcggcatcgtcgactcccccgaggaccccatatgggtggccgtcaaggcggaggccaagtctgaagcagaaaaggaacctattttaagtagcttcttgtacgccagtgtgttgtctcatgactgtctggagcgagcgttgagcttcgtccttgcaaacaggcttgaagatccaacattgcttgctactcagctaatcgatatttttaacgatgttgtgcttaataacaaagatatgtgccgttccattcgccttgatgctcaggctttcaaagacagagatccagcttgttcccaatatagttgggcactgttatacctaaagggttaccaatcgttgcagtcgtacaggatagctaatgtattatggaaccagggacgtaaagttttggcattggcactgcaaagccgtattagtgaggtctttgctgtggatatacatccagctgccaaaattggcgagggaatattgttggatcatggaacaggcctagtcattggtgaaactgctgtagttggaaattgggtttcattaatgcagggtgttacacttggaggtacaggcaaggaacatggagacaggcaccccaagatcggtcagggagctcttattggagctggtgctactatccttggcaatatcaatgtaggcgaaggtgccatgattgctgctggctcccttgttttaaaggatgtacctccccacagtatggctgtaggtaatcctgcaaagatagttggttatacagagaaagaagatccttctttaactatgaaacatgatgcaaggagagattattttgagcatgctgccgtcagattcagatga

SEQ ID NO: 1250 - protein, 340 aa, Sorghum bicolor
MTSCGCLVLEKVEGDAAAKARVKAAPGAGAGAGCGSCAGDWRGRSEAIFPIYVMGSSRGSTVAAARGIVDSPEDPIWVAVKAEAKSEAEKEPILSSFLYASVLSHDCLERALSFVLANRLEDPTLLATQLIDIFNDVVLNNKDMCRSIRLDAQAFKDRDPACSQYSWALLYLKGYQSLQSYRIANVLWNQGRKVLALALQSRISEVFAVDIHPAAKIGEGILLDHGTGLVIGETAVVGNWVSLMQGVTLGGTGKEHGDRHPKIGQGALIGAGATILGNINVGEGAMIAAGSLVLKDVPPHSMAVGNPAKIVGYTEKEDPSLTMKHDARRDYFEHAAVRFR

SEQ ID NO: 1251 - DNA, 1479 bp, Sorghum bicolor
atggatccgtacaagcaccggccgtcgagcaccttcaacgccccgtactggaccaccaactccggcgcgcccgtatggaacaacgacaactccctcaccgtcggcgcacgaggtcccatcctgcttgaggactaccacctggtggagaagcttgccaacttcgaccgtgagcggatcccggagcgcgtggtgcacgcccgtggcgccagcgccaagggcttcttcgaggtgacccacgacatcacccacctgtcgtgcgccgacttcctgcgcgcccccggcgtgcagacccccgtgatcgtgcgcttctccacggtgatccacgagcgcgggagccccgagacgctgcgcgacccgcgcgggttcgccgtcaagttctacacccgggagggcaactgggacctggtgggcaacaacttccccgtcttcttcatccgcgacggcatgaagttcccggacatggtgcactcgctcaaaccaaaccccaagacgcacatccaggagaactggcgcatcctcgacttcttctcccaccacccggagagcctccacatgttcaccttcctcttcgacgacgtcggcatccccgccgactaccgccacatggacggctccggggtgcacacctacacgctcatcaaccgcgccggcaaggccacctacgtcaagttccactggcgccccacctgcggcgtcaggtcgctgctggacgacgaggccgtcgccgtcggcggcgccaaccacagccacgccaccaaggacctcaccgacgccatcgcggcggggaacttcccggagtggacgctctacatccagaccatggaccctgagcacgaggaccgcttcgacttcgacccgctggacgtgaccaagacgtggcccgaggacgtgttcccgctgcagcccgtggggcggatggtgctcaaccgcaacatcgacaacttcttcgccgagaacgagcagctggcattctgcccgggactcatcgtccctgggatctactactccgacgacaagctgctgcagaccaggatcttctcctactccgacacgcagcgccaccgcctgggaccaaactacctgctactcccggccaacgcgcccaagtgcgcacaccacaacaaccattacgacggcttcatgaacttcatgcaccgcgacgaggaggtggactacttcccctccaggtacgaccctgccaagaacgcgccgaggtacccaatcccggccgtccacatcaccggccgccgagacaagactgtgattgccaaggagaacaacttcaagcagcctggggagaggtaccgcgcaatggacccagccaggcaagagcgattcatcaagagatgggtcgatgcactctctgacccccgactcacccatgagatcaggagcatctggctctccaactggtctcaggccgacagatctctgggccagaagcttgcgagccgcctcagcgccaagccgagcatgtaa

SEQ ID NO: 1252 - protein, 492 aa, Sorghum bicolor
MDPYKHRPSSTFNAPYWTTNSGAPVWNNDNSLTVGARGPILLEDYHLVEKLANFDRERIPERVVHARGASAKGFFEVTHDITHLSCADFLRAPGVQTPVIVRFSTVIHERGSPETLRDPRGFAVKFYTREGNWDLVGNNFPVFFIRDGMKFPDMVHSLKPNPKTHIQENWRILDFFSHHPESLHMFTFLFDDVGIPADYRHMDGSGVHTYTLINRAGKATYVKFHWRPTCGVRSLLDDEAVAVGGANHSHATKDLTDAIAAGNFPEWTLYIQTMDPEHEDRFDFDPLDVTKTWPEDVFPLQPVGRMVLNRNIDNFFAENEQLAFCPGLIVPGIYYSDDKLLQTRIFSYSDTQRHRLGPNYLLLPANAPKCAHHNNHYDGFMNFMHRDEEVDYFPSRYDPAKNAPRYPIPAVHITGRRDKTVIAKENNFKQPGERYRAMDPARQERFIKRWVDALSDPRLTHEIRSIWLSNWSQADRSLGQKLASRLSAKPSM

SEQ ID NO: 1253 - DNA, 1308 bp, Sorghum bicolor
atgccggtgccgaagccgatggagaggaagcaagccgcctacagcaacctcgatgagaggtacgcgatccagggggagaagtaccaggggcagcagtacagccacatctacttcacgcgccttcaccacatgcggaatctgctccacgccctcgtcccctcctggaagccgcaactccctgtcactacagtgttaggactcgaagaaggaaaggattgcataattgttggaactttatataagcacatgaagttgaagccttccattcttgatgaatatgccaaagagaggtctgcaattcctcttgtcaaaccgcataatttcatgcatcctgatgatcatctcattctcgaagatgaaagtggaagggttacacttgcaggagccattcctccagcagcatttgtgactggggttgtagtggctctccatgggaaggaaacaagtgctggcaactttcttgttgaagatgttcttgaggctggtcttcctccccaaactgcattgtctagcgcagcagaagacaagtatgtggtattcgtatctgggctaagtgtaggaagtgacacattcaatcctctacaattccaactccttattgaccatgtcacagggcatctgggtgatgagaatgagcaatccatagcatcaaatatagtacgtgttgtggttgctgggaattcagtgcatatttcaccaaggtttgtcaacggtcagacggtagcatcaaaagatcaatccaggatagcagagcctatcaaggaattggatataatgcttacccagctcgtggcatcgttgcctgtagatatgatgccggggtgtcatgatccggcaaatttttctttgcctcagcagcctctgcacagatgccttttctctggggcatccacgtacaacactttctcgtcatgttcaaatccccatcaatttgagcttgacagtgtccagtttcttggaacatctggccagaacatagatgacctgtacaagtactctgatgctaaagacaagctggaattcatggaaagaacactgagatggcgccatcttgctcctactgctccaaatagtctaggctgttatccatacacagacaaggatcctttccttgttgaaagttgcccgcacgtctactttgttgggaatcaagataaatatgaaactcgattgttggaagggccagaaaaacagaaagtgaggctaatctccatcccaaggttctctgagagtggagttgctgttatgctcaatctgaggaacttggaatgcagcacattgagtttctctacaagctttgatgcctga

SEQ ID NO: 1254 - protein, 435 aa, Sorghum bicolor
MPVPKPMERKQAAYSNLDERYAIQGEKYQGQQYSHIYFTRLHHMRNLLHALVPSWKPQLPVTTVLGLEEGKDCIIVGTLYKHMKLKPSILDEYAKERSAIPLVKPHNFMHPDDHLILEDESGRVTLAGAIPPAAFVTGVVVALHGKETSAGNFLVEDVLEAGLPPQTALSSAAEDKYVVFVSGLSVGSDTFNPLQFQLLIDHVTGHLGDENEQSIASNIVRVVVAGNSVHISPRFVNGQTVASKDQSRIAEPIKELDIMLTQLVASLPVDMMPGCHDPANFSLPQQPLHRCLFSGASTYNTFSSCSNPHQFELDSVQFLGTSGQNIDDLYKYSDAKDKLEFMERTLRWRHLAPTAPNSLGCYPYTDKDPFLVESCPHVYFVGNQDKYETRLLEGPEKQKVRLISIPRFSESGVAVMLNLRNLECSTLSFSTSFDA

SEQ ID NO: 1255 - DNA, 387 bp, Sorghum bicolor
atgaagagagcatcgccggagtcggggacggtgcgccgagaaggaacaaaagaagacggcggcggggcggagatggggagccccctgggcgggtggccgtcgtacaacccgcacaacttcagccagctcgtccctgccgacccctccgcgcagccctcgaatgtcacaccagccacttatgttgcgacccacaggacagacccgccacccaatcaagtgataacaacggaggccaggaacatcctgctgaggcacttctaccagaaatctgaggagaagctgaggccaaagagagctgctccggacaacctcgctccggagaacaacaacaagcagcccaggggacctgtgggcgacgtcgggggccagtcaagcgcaagaggctga

SEQ ID NO: 1256 - protein, 128 aa, Sorghum bicolor
MKRASPESGTVRREGTKEDGGGAEMGSPLGGWPSYNPHNFSQLVPADPSAQPSNVTPATYVATHRTDPPPNQVITTEARNILLRHFYQKSEEKLRPKRAAPDNLAPENNNKQPRGPVGDVGGQSSARG

SEQ ID NO: 1257 - DNA, 1200 bp, Sorghum bicolor
atgcttcgcgggctagagaagcaccagcgcaacaacggcgaggacacgtcgccggaggccaacgactccggcgagcttgacgaccggaggagcttggaatgctccacctccaccgagatgtcgagcaacagcggccacaggtcaagaaaccgagccccggacgacgacagcttcgactcggagagcagctcatcggggccgccgacggtcaagaggtcgaccgcggtcgccgcgttactgccgcccttctctcggccaaccccgtccaagtgggacgacgccgagaagtggatttccagcccgacgtcaaaccgtactggccgtgcggggcctaccgccggaactgtgccaaagaagtctgcattggcattccctgaacatggaggccgtccaccagccgttgctaaggtggtcacggatgtgcctaccaacactggaccattggttaagaattcagatggtcttgccgatcctgatttacttaaacctgcacacaatgcttcaatagttgacgaaccagcacctgcagttaggtctgtctctatgagagacatgggaacagaaatgactccaattgccagccaggagccttcccggaccgcgactcctataattgcatctagtccaacttcttctcggacaccaactccacaacgcaccacagaactcagtgtgagtaatatagattctaacaaaatggagatgtctgaagaggagctacaaataagtacaagacaggaaattatggatcttggcgaaaggttaggcaagacaactatagctgcatgggcaagcaaggaagagaaaactgccgcacattccacgagtactacagcctataaggctgtcgatatcaacagggagaatcgagcggcagattggcaggaggcagagaaggcaaagtatcttgcaaggtttcagatggaggaagcaaagatccaagcttgggaaaatctccagaaagcgaaaattgaagctgaaatgaaaaggatagaggctaagatagagcgaaaacgggcgcgcgagcaggacaggctcgcgagcaagctggccgcagtaagccaccgagcggaggcgaagagggaggccgcggaggtgaggaggaaccaggaagccgcgagaacggaggagcaggcagcccagatccgagaaaccgggcatacgccttcctccttctcctgctggtgctggtgcctgtga

SEQ ID NO: 1258 - protein, 399 aa, Sorghum bicolor
MLRGLEKHQRNNGEDTSPEANDSGELDDRRSLECSTSTEMSSNSGHRSRNRAPDDDSFDSESSSSGPPTVKRSTAVAALLPPFSRPTPSKWDDAEKWISSPTSNRTGRAGPTAGTVPKKSALAFPEHGGRPPAVAKVVTDVPTNTGPLVKNSDGLADPDLLKPAHNASIVDEPAPAVRSVSMRDMGTEMTPIASQEPSRTATPIIASSPTSSRTPTPQRTTELSVSNIDSNKMEMSEEELQISTRQEIMDLGERLGKTTIAAWASKEEKTAAHSTSTTAYKAVDINRENRAADWQEAEKAKYLARFQMEEAKIQAWENLQKAKIEAEMKRIEAKIERKRAREQDRLASKLAAVSHRAEAKREAAEVRRNQEAARTEEQAAQIRETGHTPSSFSCWCWCL

SEQ ID NO: 1259 - DNA, 927 bp, Sorghum bicolor
atgaccgctgctcgtagccgccgctgcctgcaggcggcggtgctgctctgggcggcgctctcgccgtgggcgctcgctttagcggccgcagccgtgccggcaaagctcaaggccgcgccagcgcctgtggcgaccgggccgatgtccaaggtggaggacgccaccatgtttcggatatactacggccagagcttcaaggtcatcaagaactccggcgacggcaagagctaccttctcatgcagaacacgtccaagatggcatccaagacgaggtattgcacgggaaggatcaagtcgttcgtcatcccccttgccaacttctccatcgacaccacgacttctccagtgtcattctttgagctgcttggagtgatagaaagcttgaaaggaataacatcaaaccaagttgcttctcagtgtgtgctccaatcatatacaagtggaaatgcccagcttgtgaatagaactgatgcacagacactctcgcagtttactgcacatttcataagcgatacagatgaagatagaggttgcaacttcgcagcatatgtacccttagaagaagatgcaccattgcagagggctgagtggatcaagtacttgggaactttcacaaactctgaaggcagggctaatactgtctatgatgcaataaagacaaactacctgtgcttaagcaaagcagctgcaaaccttagcacaaggttcaagcctatagtagcgtggattgaattcacacagggaatgtggacatttgttaaagaaagttacaccttacagtatgtcacagatgcaggagcagaaactgttgatgcaactattacaaataagagatttaatagttcagacccagaggatatggacaacttccatgctattctttgtgtgagtatcaaccattcagaatctaatattacaaccctgtaa

SEQ ID NO: 1260 - protein, 308 aa, Sorghum bicolor
MTAARSRRCLQAAVLLWAALSPWALALAAAAVPAKLKAAPAPVATGPMSKVEDATMFRIYYGQSFKVIKNSGDGKSYLLMQNTSKMASKTRYCTGRIKSFVIPLANFSIDTTTSPVSFFELLGVIESLKGITSNQVASQCVLQSYTSGNAQLVNRTDAQTLSQFTAHFISDTDEDRGCNFAAYVPLEEDAPLQRAEWIKYLGTFTNSEGRANTVYDAIKTNYLCLSKAAANLSTRFKPIVAWIEFTQGMWTFVKESYTLQYVTDAGAETVDATITNKRFNSSDPEDMDNFHAILCVSINHSESNITTL

SEQ ID NO: 1261 - DNA, 306 bp, Sorghum bicolor
ttcctatccaacagtgaactctactacctccccgctcgccttgtcgaccatcttggatcaggcaaggggaactcaaacgggcaaaaaaattatgttcatccatccaactatatatatttacggaggaccgccccaaagggagcccgaaacagagaaaaggaacaacatcaaggcattgcaattgcagccagacaccccaatctttgcgcaaagtttgtttggtctgtgatgggatccatcttccccgggccgtcccaacaatgtgccgcccgatgctgtcgatatcttgcaggaccacaggactaa

SEQ ID NO: 1262 - protein, 101 aa, Sorghum bicolor
FLSNSELYYLPARLVDHLGSGKGNSNGQKNYVHPSNYIYLRRTAPKGARNREKEQHQGIAIAARHPNLCAKFVWSVMGSIFPGPSQQCAARCCRYLAGPQD

SEQ ID NO: 1263 - DNA, 1299 bp, Sorghum bicolor
atgagctgttccgcggccgtctccaacggcattgcgccgcgcttcctcatctgcgcgcgcggggtgctcgctctcggttcccacagccacaggagtagtagtaggagggcgaggcgcaggcacgcagtggtcttcgcgaggacgaggcggcagcgacggcggcggcccagcgagtggcagcggccgtggtggaggaccttctttgctgactggaacgaggacgaggagagcctggccgggctcagggaggacgacgagctgctggaggcgattggggccaacccggagctgtcggagaacgaaaagttccaggagtggaggaggaaggccgaggccattgttgagctgcgcgaggcccagcaggatgccatgaacgccgaggcgcggtcgtgggaggattggaccagtggtgccgtctccggcgccggcggcgcgtcggggaatggaggtggaggtggggactggggcggggaggagagcttgttggacgagataactgatgatcctgcggagatcgtgtgggataagggcgttattgaggctttcagagataccgttgatgaggattatgaggacatgctcttcgaagatcgagtctttatgtatgcctccacaaactcggccaagtttctagcattgttgattgtggttccgtgggtgatagattttgcagtccatcactatgttatgatgcccttcttagacaggtatgtcgagaaggtgccacttgcagctgaattacttgatgtaaggcgcagccagaagctgcacatggttaaagacctaaacatggaaaaagcaagataccgtcttgaagtagagattggcaaatctcctccactttctgatgaggaggtctggtttgagctgcgggaaaaagcgatagagttgagggatgattggaggctagaaaatcgagaagcttttgcaaatatatggtccgatatggtttatgggattgttctattccttcttctctgcttcaaccagagcaaagttgcgatgctgaagttcacaggatataagttgctaaataacatttcagacactgggaaggcctttcttattattctaatatcagacatccttctagggtaccattcagagtcaggttggcatacaatggtagaagttgttctcgagcattacgggcttgaatctgatgaagcggcggtcacattttttgtttgtctggttccagttgctttggatgtgtacataaagttttgggtatacaaataccttccaagattatcacccagtgtgggcaacgttctggatgaaataaagcgccattag

SEQ ID NO: 1264 - protein, 432 aa, Sorghum bicolor
MSCSAAVSNGIAPRFLICARGVLALGSHSHRSSSRRARRRHAVVFARTRRQRRRRPSEWQRPWWRTFFADWNEDEESLAGLREDDELLEAIGANPELSENEKFQEWRRKAEAIVELREAQQDAMNAEARSWEDWTSGAVSGAGGASGNGGGGGDWGGEESLLDEITDDPAEIVWDKGVIEAFRDTVDEDYEDMLFEDRVFMYASTNSAKFLALLIVVPWVIDFAVHHYVMMPFLDRYVEKVPLAAELLDVRRSQKLHMVKDLNMEKARYRLEVEIGKSPPLSDEEVWFELREKAIELRDDWRLENREAFANIWSDMVYGIVLFLLLCFNQSKVAMLKFTGYKLLNNISDTGKAFLIILISDILLGYHSESGWHTMVEVVLEHYGLESDEAAVTFFVCLVPVALDVYIKFWVYKYLPRLSPSVGNVLDEIKRH

SEQ ID NO: 1265 - DNA, 1023 bp, Sorghum bicolor
atgcatattgctctctctgtgtgtgttactgcgtgcaaattaaagcagcagctcttgctcgatcgcgggatgatgtctgagaggaatctccttgcacgccgccagccgctgccgcccgccattgccgtggcggtggtggtggtggcggtgctcgtccatccacgagcggtggcggtggcgcaggctcagccttcgccgggctacttcccgagcgccacggtgaggtccatggccttctccgaggactacgacaacctgtgggggccgcagcaccagacgctgtcgcaggacaagatggcgctcacgctcttgatggaccgaacctcaggcagcggattcaagtcgaagcgctcgtaccggaacggctacttcggcgtctccatcaaggtgcagccgggctacaccgccggcgtcaacaccgccttctacctgtcgaacaacgagctgtaccctgggaagcacgacgagatcgacatagagctgctgggcacggtgccgggggagccctacactctgcagaccaacgtgtacgtgcggggcaccggcgacggcgcgcacctggtggggcgggagatgcggttccacctctggttcgacccgaccgccgacttccaccactacgccatcctgtggaaccccgacgagatcgtcttcctcgtcgacgacgtccccatcaggcgctacgccgccgccagcacgacgttattcccggacagggagatgtgggcgtacggctccatctgggacgcctccgactgggccaccgacggcggccgctacagggccgactaccgctaccagcccttcctggcgggcttccggacgttcaggaccgccggatgcgaggccgccgcgcccgccgccgggtgcccacccgtgccggcgtcccccgccggcgctgggctcagcgtgcagcagcgtgacgccatgcgctgggcgcagcagaggtccatggtctactactactgccaggattacacaaaggatcgctccttatacccagaatgctcgctcgctacctag

SEQ ID NO: 1266 - protein, 340 aa, Sorghum bicolor
MHIALSVCVTACKLKQQLLLDRGMMSERNLLARRQPLPPAIAVAVVVVAVLVHPRAVAVAQAQPSPGYFPSATVRSMAFSEDYDNLWGPQHQTLSQDKMALTLLMDRTSGSGFKSKRSYRNGYFGVSIKVQPGYTAGVNTAFYLSNNELYPGKHDEIDIELLGTVPGEPYTLQTNVYVRGTGDGAHLVGREMRFHLWFDPTADFHHYAILWNPDEIVFLVDDVPIRRYAAASTTLFPDREMWAYGSIWDASDWATDGGRYRADYRYQPFLAGFRTFRTAGCEAAAPAAGCPPVPASPAGAGLSVQQRDAMRWAQQRSMVYYYCQDYTKDRSLYPECSLAT

SEQ ID NO: 1267 - DNA, 801 bp, Sorghum bicolor
atgggagcgaacatgatgtcgtggtcgatgcaggtggcgttggtggtggcgctggcgtttctggtgggcggcgcatggtgcggtcctcccaaggttgccccgggcaagaacatcacggccacctacggcagcgactggctggaagcgaaggcaacatggtacggtaagccaacaggcgccggccccgacgacaacggcggcgcatgtggttacaaggatgtgaacaaggcccccttcaacagcatgggcgcgtgcggcaacctccccatcttcaaggacggcctcggctgcggctcctgctttgagatcaagtgtgacaagccggccgagtgctccggcgaggccgtggtggtgcacatcacggacatgaactacgagcaaatcgccgcctaccacttcgacctggccggcacggcgttcggcgccatggccaagaagggcgaggaggagaagctgcgcaaggcgggcatcatcgacatgaagttccgccgggtcaagtgcaagtacggcgaaaaggtcaccttccacgtggagaaggggagcaaccccaactacctggcgctgttggtcaagtacgtcgacggcgacggtgacgttgtgggggtggacatcaaggagaagggtggcgacgcgtaccagcccctcaagcactcctggggcgctatctggaggaaggacagcgacaagccaatcaagtttcccgtcaccgtccaaatcaccaccgaaggaggcaccaagaccgcctatgaagacgtcatccccgaaggctggaaggccgacaccacctacaccgccaaataa

SEQ ID NO: 1268 - protein, 266 aa, Sorghum bicolor
MGANMMSWSMQVALVVALAFLVGGAWCGPPKVAPGKNITATYGSDWLEAKATWYGKPTGAGPDDNGGACGYKDVNKAPFNSMGACGNLPIFKDGLGCGSCFEIKCDKPAECSGEAVVVHITDMNYEQIAAYHFDLAGTAFGAMAKKGEEEKLRKAGIIDMKFRRVKCKYGEKVTFHVEKGSNPNYLALLVKYVDGDGDVVGVDIKEKGGDAYQPLKHSWGAIWRKDSDKPIKFPVTVQITTEGGTKTAYEDVIPEGWKADTTYTAK

SEQ ID NO: 1269 - DNA, 420 bp, Sorghum bicolor
atgaggggcctctacggcgacgacgactacaacgccagccactacggccagcagcagtcagctggcacggcggtggccaaggcgctagcctcggccacggcggccttcaccttgctggtgctgtcggggctggcggtgacgggcacagtgctggcgctcatcgtggcgacgccgttgctggtgatcttcagccccgtgctggtgccggcggccatcacggtggcgctgctcacgacaggcttcgtctcgtcaggagggttcggcgccgccgcggtggctgtgctggcgtggatgtaccgctacctgcagacgacgacctcgtcgtcggatcagcagcagcatcagcatcagctgtccggcaaggcgcacgacgtcaaggactgggcgcagcaccgcctggagcaggcacgcgcgcactga

SEQ ID NO: 1270 - protein, 139 aa, Sorghum bicolor
MRGLYGDDDYNASHYGQQQSAGTAVAKALASATAAFTLLVLSGLAVTGTVLALIVATPLLVIFSPVLVPAAITVALLTTGFVSSGGFGAAAVAVLAWMYRYLQTTTSSSDQQQHQHQLSGKAHDVKDWAQHRLEQARAH

SEQ ID NO: 1271 - DNA, 1164 bp, Sorghum bicolor
atgccgtcgcgttcgccgcggcgttcggcccgggcccccttcccgagcgccgccgagccccctcccggcctcttccccgccagggaggacctcgtccgcttgctcgccgtcatatgcatcgccgccgcagccgccgcggcctgcagcgtcctcaaccgccgccctgagcccttctgcgactccccccaatcgcccgatgactacgccgacgattcgtgtcaaccttgccctctgaacggccgatgcgtggacggtgagctagagtgcgtccaggggttcaagaggcaagacaaagcatgcatagaggacggactgctcagccaaacagctaacaagatttcagagctactacagctatggatctgcaatcagcatgctcgtgctttatgtggccaacctgccgaaatcctgtttcagcagcatgatgtctcaaatgcaattgatgaactcttgtccaagactcctgctggcctaactgaggctggaattcaacttgtgaaaactagggtgctggagagttctcaggacttcttcgacacgacatttacttccaacaaagtcaaagtatttaaatgccctgagctggtcgcggagcttcatatgcctttggcttgtcgagttcgccaatggatctctagaaataccatctgtgtggcaaccttttgtatcctgcttgcagcactgctctggatactgtggatcatttacaggaggcgggcattatctaatagagctgaacaaatatatgagcaggtttgtgaaatccttgaagataatgccataaacgccaagattgataactccaattgtgagccttgggtggttacctcttggctcagggatcacctgctggttcctcgagagaggaagaatgctttcttgtggaagaaggtcgaagaactgatactagaagattctcgaatagatcaatatccaaaggtgattaagggggagtcaaaggttgtttatgagtggcaagcaagtggctcacttagtgcaaagattaaaaaggtgcaaggtgcaagggtcaagtcaaggactggtggaggtgcgataaaatttgcagaagaaatgggtgcttgcttggttgaggtgagggagcaggggtcatgtgatttaatacgtgaagaaagaagtaaggcgaagctcacgagcagtgattag

SEQ ID NO: 1272 - protein, 387 aa, Sorghum bicolor
MPSRSPRRSARAPFPSAAEPPPGLFPAREDLVRLLAVICIAAAAAAACSVLNRRPEPFCDSPQSPDDYADDSCQPCPLNGRCVDGELECVQGFKRQDKACIEDGLLSQTANKISELLQLWICNQHARALCGQPAEILFQQHDVSNAIDELLSKTPAGLTEAGIQLVKTRVLESSQDFFDTTFTSNKVKVFKCPELVAELHMPLACRVRQWISRNTICVATFCILLAALLWILWIIYRRRALSNRAEQIYEQVCEILEDNAINAKIDNSNCEPWVVTSWLRDHLLVPRERKNAFLWKKVEELILEDSRIDQYPKVIKGESKVVYEWQASGSLSAKIKKVQGARVKSRTGGGAIKFAEEMGACLVEVREQGSCDLIREERSKAKLTSSD

SEQ ID NO: 1273 - DNA, 704 bp, Sorghum bicolor
atggccatggcggcgccgttcattgcgatggcgagcaataacatcggcagcgccagcgccaacaacgccacaggcggcggcaacggtgacatcaagcggcgccggacctcgtccgacgccctgcagcgcaccgtctccgacgtctcctacgagctccaccaccaccaccaccaccaccagcacggcgccggcggcgtcaacaagcaggagaagacgaaggcggcggatcaggccgagcagcagctgctgctgcaccccgtgcctgaggtgcaggacgccaagtgcgagtgctgcggcatgtcggaggagtgcacgcccgagtacatccgcggcgtgcgcggcaggttcgcgggccgctgggtctgcggcctgtgcgccgaggccgtgacggaggaggccgagaagatgaacggcggcggcggcgggacgctggaggaggcgctcagggcgcacatgggcgtgtgcaagcgcttcaacggcttcggccggacgcacccggtgctgttccaggccgaggccatgcgggagatcctcaggcgccgggccaagctcggccccaggtccaggtccagcatcaaccctagggaggtcagggaagtcgccgtcggcgccaaggccggcagcggcggcggcggcactactgggatcgctcgcagctccagctgcatgcccttcatcaccgacgacttcaacgaacgggcaac

SEQ ID NO: 1274 - protein, 235 aa, Sorghum bicolor
  misc_feature (235)..(235): Xaa can be any naturally occurring amino acid
MAMAAPFIAMASNNIGSASANNATGGGNGDIKRRRTSSDALQRTVSDVSYELHHHHHHHQHGAGGVNKQEKTKAADQAEQQLLLHPVPEVQDAKCECCGMSEECTPEYIRGVRGRFAGRWVCGLCAEAVTEEAEKMNGGGGGTLEEALRAHMGVCKRFNGFGRTHPVLFQAEAMREILRRRAKLGPRSRSSINPREVREVAVGAKAGSGGGGTTGIARSSSCMPFITDDFNERAX

SEQ ID NO: 1275 - DNA, 1188 bp, Sorghum bicolor
atgggcatggcggacaccagcatcttctccctctcgcctcctctgctgcgcctgcgcctgcgcatgagccaccacccccacacatcatcatcatcagctattcctcctgttcctgctgctgcatcatccaccagttccagcccgcggccgcggcggctgctcatcaagcagcagaggagcattattggtaataatcattcatcgccaacccggcaaagatcactattactgtcgtcgtctcgtgcttctgcttctgcttcttcttcttcttcttcttcttcttcttctgtggcgacggcgacggcgacggcgacggcaccggcgcagaacgagaacgagaaagacgtcgtcttcgtggctggcgccaccggcagagttgggtcccgggccgtaagggagctcatcaagcttggcttccgtgtgcgcgctgccgtcaggaacgcacagagggccacgtccctggtgcagagcgtccagcaactgaaactagaggcgcagcctgagctggagcttgtggagtgtgacctggagaagcaggcgcaggaaggcatcgtttcagccataggcaatgcttccctggtggtgtgctccatcggtgccagcgagaaggagatcctggatgtcaccggcccataccgcatcgactacatggccaccaacaaacttgtacaagctgcatctgctgccaaggtggagcacttcatcctggttacatccctgggcaccaacaggatcggcttccctgcattcctcttgaacttgttctggggagttctgtactggaaaagacgagctgaagaagcactcatcgcaagcggcattccctacacgatcataaggcctggaggcatggagaggccgacggacgctttcaaggagacgcacaacctggtgttggcaccagaggacacctacgtgggtggccaggtatccaacctgcaggtggcggagctcatcggatgcatggccgccaacaggagggcggcctactgcaagatagtggaggcggtggccgagaccacggcgccattgctgcccacggagcagctcctctccaccattccatccaagagagaaccaccctgctccggccccgctgatgatgacgagcctggggatgatgcagatccaaagccgccacaacctccgccagcacctgccgcagcagaggagtcacagacaacgtaa

SEQ ID NO: 1276 - protein, 395 aa, Sorghum bicolor
MGMADTSIFSLSPPLLRLRLRMSHHPHTSSSSAIPPVPAAASSTSSSPRPRRLLIKQQRSIIGNNHSSPTRQRSLLLSSSRASASASSSSSSSSSSVATATATATAPAQNENEKDVVFVAGATGRVGSRAVRELIKLGFRVRAAVRNAQRATSLVQSVQQLKLEAQPELELVECDLEKQAQEGIVSAIGNASLVVCSIGASEKEILDVTGPYRIDYMATNKLVQAASAAKVEHFILVTSLGTNRIGFPAFLLNLFWGVLYWKRRAEEALIASGIPYTIIRPGGMERPTDAFKETHNLVLAPEDTYVGGQVSNLQVAELIGCMAANRRAAYCKIVEAVAETTAPLLPTEQLLSTIPSKREPPCSGPADDDEPGDDADPKPPQPPPAPAAAEESQTT

SEQ ID NO: 1277 - DNA, 861 bp, Sorghum bicolor
atggacgccgccgacgagaagggagagacgccccaaatctccgaggataccgcccaccagattggcgttgatccttggtatcaagttggcttcgtcctcacaaccggggtcaacagtgcatatgttctaggatactctggatcgattatggtccctttaggctggatcggcggcacatgcggcctcctcctagctgccgccgtttccatgtatgctaatgctcttcttgcacggcttcatgaagtcggtggcaagcgccatatcagatacagagatcttgctggacacatatatggacgaaaaatttatgggcttacatgggctctgcagtacattaaccttttcatgatcaacactggttttatcatcttagctggacaagctctcaagatcgatgaatttgtcgatagcatgctgtacacaggtgccgtagcagaccttgtgtttgcttacaacactggtatgctgccagaaattcagatatttgctagcccaatgtatgaatacctggacacaaaatatggaagtgggcgtggtggtccttttgaaatccaaaacctagcgttcagggtagtagtaagaggaggctacttgacggtgaacacgctggtggcggcggtgctcccattcctcggtgacttcatgagcctgacgggcgccctgagcaccttcccactgacgtttgtgctcgcaaatcacatgtacctgatggtgaaggggcctaagctgtctgccatccagaaattatggcactggctgaatgttgttgggttcactgcgttggctgttgcgtcggcggtctcggcaataaggctcatcatgcgtgattccagcacctaccacttcttcgctgatgtttga

SEQ ID NO: 1278 - protein, 286 aa, Sorghum bicolor
MDAADEKGETPQISEDTAHQIGVDPWYQVGFVLTTGVNSAYVLGYSGSIMVPLGWIGGTCGLLLAAAVSMYANALLARLHEVGGKRHIRYRDLAGHIYGRKIYGLTWALQYINLFMINTGFIILAGQALKIDEFVDSMLYTGAVADLVFAYNTGMLPEIQIFASPMYEYLDTKYGSGRGGPFEIQNLAFRVVVRGGYLTVNTLVAAVLPFLGDFMSLTGALSTFPLTFVLANHMYLMVKGPKLSAIQKLWHWLNVVGFTALAVASAVSAIRLIMRDSSTYHFFADV

SEQ ID NO: 1279 - DNA, 717 bp, Sorghum bicolor
atggcttcgccgcacccgctcagctgggccgacgcgccgcccttttactaccacgggacgacaccccagccggcacccgactcctcctccgacggggccgggccgcgctcgctctggatcggcggcctgctgcactggatggacgaggactacctctacgcctgcttcaccacctcgcccgagcttctttccgttgtcatcagacggagcaagcagactgggcaatcagagggttttggctttctcaattttgctgaccataccaccgctgctcagattctcaagtcttacaatggtcacaagatgcctaactctgttcaagatttcaagctcaactgggccactcaacaacctgctcccgacaaacttcctgatccacatttcaagctcgacccggccatgcagcaggatgtgcctcagaggcacgacgacgataattcctcatctgagcatttcatatttgttggggacttggcctatgatgtcacagaatacatgctacaccatctgttcaagacccgctacgcatcagtgaagagggcgaaaattatcgttgacaggttcactggtcgctcgaaaggctatggctttgttcagtttggagatgtcaatgagcagacacaagcactgacagaaatgaatggagcctactgttctaccaggcctatgcggattggacctgttcccaacaagaaaagtacgtacccgtatgactaa

SEQ ID NO: 1280 - protein, 238 aa, Sorghum bicolor
MASPHPLSWADAPPFYYHGTTPQPAPDSSSDGAGPRSLWIGGLLHWMDEDYLYACFTTSPELLSVVIRRSKQTGQSEGFGFLNFADHTTAAQILKSYNGHKMPNSVQDFKLNWATQQPAPDKLPDPHFKLDPAMQQDVPQRHDDDNSSSEHFIFVGDLAYDVTEYMLHHLFKTRYASVKRAKIIVDRFTGRSKGYGFVQFGDVNEQTQALTEMNGAYCSTRPMRIGPVPNKKSTYPYD

SEQ ID NO: 1281 - DNA, 1377 bp, Sorghum bicolor
atgttgatgagtgcattgagagaggaagacgacaaggtaataactgacagcgacggagtgctcgctctgtaccaagcttcatatcttgccttcccgggaccgggagagacggtgctggaccaagcaagagcgttggctatcggcaagcgagctgcaggacgacgtgacgatgacgatgactctgactgcacacgcctgccgttgccgttgccgttgcactggacagctccgaggctgcaggccatgtggtcgctcaagggcaagggcgacgaccataaccataacaagaaggtcgccgtcgtcgatccggccatcctgcagctggctcaggtggacttcaacctggtgcaggctctccaccggcgagagctcgcggaggtgacgaggtggtggaaggagagcggcctgggcgtgggcgactactccttcgccagggaccgcgtggtggagtgcttcttctgcgccgcctgcatcgcgccggagccgcgcctggcggagtgcagggaggtgctagccaagatcggcgccctcctcgtccacctcgacgacatctacgacgtgtacggcactctggatgagctccaggccttcactgacgccattgccgccgccagctgggagaactgccgctgcaaccacctccccgagtacatgaaggccatgtactccgccatctggacaacttcggtcgccgcggcagatcgcgtgctcgagaaacatggatacgacatgcttccactctacaagaaagcgtggcacgagctgtgcaaggcgttcctggtggaagcgcagtggcagcagcagggacacatgcccagcttcgccgagtacgtcagcaacggctgggtcacgtcgacggggcctctcctgctgctccatgcacttcccgcagcaggcattattcccatcacgcagacgcagacgcagacgcagacgcaggccaataatggcgccggcgccggcggcatcgtcgactacccgaggctggtggagctgtcctcgaccatcttccgcctctgcaacgactgcgcgtcgcacgaggccgagtcagagcgaggggacgcgccgtcgtccatcgcctgctgcatggccgagccctggtgcgccggcgaggagcaagcccgcgacgccgtccagggcgtcatcgccgagacctggaaggcgctcaactgggaggtcgtcgtcgtcgccgcctcctcctcctccgggtccaaacggcggaaagcatggacgaccatggccaacctgtgcctcaacctcgcccggatcatccactgcatctaccaggacggggacggcatcagttcgccgactcatcgcatgaagcaaatggtcaaggacctgctcttcaaccctatcgtccatcttgtcctctag

SEQ ID NO: 1282 - protein, 458 aa, Sorghum bicolor
MLMSALREEDDKVITDSDGVLALYQASYLAFPGPGETVLDQARALAIGKRAAGRRDDDDDSDCTRLPLPLPLHWTAPRLQAMWSLKGKGDDHNHNKKVAVVDPAILQLAQVDFNLVQALHRRELAEVTRWWKESGLGVGDYSFARDRVVECFFCAACIAPEPRLAECREVLAKIGALLVHLDDIYDVYGTLDELQAFTDAIAAASWENCRCNHLPEYMKAMYSAIWTTSVAAADRVLEKHGYDMLPLYKKAWHELCKAFLVEAQWQQQGHMPSFAEYVSNGWVTSTGPLLLLHALPAAGIIPITQTQTQTQTQANNGAGAGGIVDYPRLVELSSTIFRLCNDCASHEAESERGDAPSSIACCMAEPWCAGEEQARDAVQGVIAETWKALNWEVVVVAASSSSGSKRRKAWTTMANLCLNLARIIHCIYQDGDGISSPTHRMKQMVKDLLFNPIVHLVL

SEQ ID NO: 1283 - DNA, 3057 bp, Sorghum bicolor
atgggttcagacaagcagattggtagcccgcgcccgctcttgggaaccctcaagatgggcagagtcaggactatcctgacacatacatacccgtaccctcacgagcactccaggcatattatgactgcagtgattattgcctgtctcttttttatatcgtctgacaacatgcatacgctgatacataaattggacaacaatatcaagtggtggtccatgtatgtttgcctcattggcttcttctatttcttctcgtctccttttcttggaagaaccattcagccaagctactcaaattttaaccgttggtatgttgcttggatttgctttgcatccctgtaccatcttcctagcttccagtcaatgggggttgatatgcgcatgaacctttcacttttcttgacaatttatttctcctcggtccttttcatcattgcctttcatatcatatttattggtctctggtacattgggttggttgcacgcttggcaggaacgaggccaggaatatggacaattctccagaactgtacagtcatcagtattgcatgctgtgtattctacagtcattgtgggaatcgtgctgtgcacaagagcaaatcttttggtagtagttctgatcccagtttgcttgctttccttaaaaatgaaaacggaagcacctggatatcaaattttctccgtatgaatcagttgaaagatgagatatgttcatcttggtttgctcctgttggatctgcaagtgactatcctattctggcaaaatgggttatttacggggagttagtttgcagtggatcctgtgctggcccatcagatgaaatatctcctttgtactcattgtgggctacatttgttggcctttatatcgctaactttgttgtggagagatcgactggatgggctcttacccacccgtcaacagatttggaggatgagaagctgaagaggcatatgaaaccagatttcctggacatggtaccttggtattcagggacatcagctgatttattcaagacagcatttgatcttatggtctctgtgactctttttgtcgggcgatttgacatgcgcatgatgcaggctgcaatgaaaggaccaacagacaatacttcaaatgatgacctattgtatgactacttcaatgaaagggaagacctttggtttgactttgttgcagacaccggtgatggagggaattcgtcatatacagttgcccggctgttagcccaaccatctattaggactgttatcggtggctctatgcatactcttccacgtgggaacttacttattatcggcggagatcttgcgtacccaaacccttcatcatttacatatgagaggcgcttctttaggccttttgagtatgctctacagcctccaccttggtacagggatgaacatatagctttggataagcctgagcttcctcctggtgtatcaaagatgactgaatatgatgggccacagtgtttcataattcctggaaaccatgactggtttgatgggcttcatacttttatgagatatatatgtcataaaagctggttaggtggatggtttctgcctcagaagaagagttattttgcattgcatcttcccaagggttggtggatatttggtcttgatttatctctccatggcgatgttgatgtgtaccaattcaagttctttgctgatgtttgtcggaataaggttggagagaatgattctgtgattgtagtaacacatgagccaaactggcttcttgattggtattggaatgagactacaggcaagaatgtatcacatttaattcaggaatacctgaaaggaagatgtaaacttcgcatggcaggggatttacaccattttatgaggcactctgccactcaatcagaaaaaactaattttgtgcaacacttacttgtcaatggatgtggtggcgcctttttgcacccaacacatgttttcagaaactttgagaggttctctggaaccacctatgaatgcaaggcagcttatccatcttatgatgagtctagtgggattgcattgggtaacatattgaagttccgcaaaaagaattggcagtttgacatcattggtggttttatatacttcatactggtgttttcaatgttcccgcagtgtaatcttgttcatatcttaaatgaagaaacttggtctgggcgtctgaaaagcttctcaggcacaatatggagtgctttgctttatatttttgagcactcttatgtctcttcagtaggaagtcttactttactgatggcctcatattcattcgtaccatccaaactatcaaggaggagaagagctattataggcggcctccatgttttggcccatttaactgcagcgctacttttaatgttgctgctggagttgggcattgaaatttgtattcgtaatcatttattggcaacttcaggttatcacactttgtatgaatggtatcgatccatggaaagtgagcattttccagatcctactggtcttcgtgctcgtttggagcaatggactctgggactgtacccagcatgtataaaataccttatgtcagcctttgacgtccctgaggtcatggctgtgacaagaataaatatatgcaagaacggaatgatgtctctttcacgtagtgttctgatcatgtactatacttctgtgtttatctatttctggattttctcgaccccagttgtttctctcatatttggtagctacctgtacatctgcatcaactggttccacatacactttgatgaagccttctcatcactgcgcattgcaaactacaaatctttcacaaggtttcatattaagaaggatggtgatctggaaatatttactcttgcagttgacaaggtcccaaagggctggaagttggatccgaggtgggaatcagagggaagagggcctcatcagctcagccatgaccggaagcatccaagcaagtggaggtcagcctcatcaccggaccctgtgagatctgtacgggttgtcgaccatttcaccattgaaagaacaagaacctcagatacggagccctcttcctga

SEQ ID NO: 1284 - protein, 1018 aa, Sorghum bicolor
MGSDKQIGSPRPLLGTLKMGRVRTILTHTYPYPHEHSRHIMTAVIIACLFFISSDNMHTLIHKLDNNIKWWSMYVCLIGFFYFFSSPFLGRTIQPSYSNFNRWYVAWICFASLYHLPSFQSMGVDMRMNLSLFLTIYFSSVLFIIAFHIIFIGLWYIGLVARLAGTRPGIWTILQNCTVISIACCVFYSHCGNRAVHKSKSFGSSSDPSLLAFLKNENGSTWISNFLRMNQLKDEICSSWFAPVGSASDYPILAKWVIYGELVCSGSCAGPSDEISPLYSLWATFVGLYIANFVVERSTGWALTHPSTDLEDEKLKRHMKPDFLDMVPWYSGTSADLFKTAFDLMVSVTLFVGRFDMRMMQAAMKGPTDNTSNDDLLYDYFNEREDLWFDFVADTGDGGNSSYTVARLLAQPSIRTVIGGSMHTLPRGNLLIIGGDLAYPNPSSFTYERRFFRPFEYALQPPPWYRDEHIALDKPELPPGVSKMTEYDGPQCFIIPGNHDWFDGLHTFMRYICHKSWLGGWFLPQKKSYFALHLPKGWWIFGLDLSLHGDVDVYQFKFFADVCRNKVGENDSVIVVTHEPNWLLDWYWNETTGKNVSHLIQEYLKGRCKLRMAGDLHHFMRHSATQSEKTNFVQHLLVNGCGGAFLHPTHVFRNFERFSGTTYECKAAYPSYDESSGIALGNILKFRKKNWQFDIIGGFIYFILVFSMFPQCNLVHILNEETWSGRLKSFSGTIWSALLYIFEHSYVSSVGSLTLLMASYSFVPSKLSRRRRAIIGGLHVLAHLTAALLLMLLLELGIEICIRNHLLATSGYHTLYEWYRSMESEHFPDPTGLRARLEQWTLGLYPACIKYLMSAFDVPEVMAVTRINICKNGMMSLSRSVLIMYYTSVFIYFWIFSTPVVSLIFGSYLYICINWFHIHFDEAFSSLRIANYKSFTRFHIKKDGDLEIFTLAVDKVPKGWKLDPRWESEGRGPHQLSHDRKHPSKWRSASSPDPVRSVRVVDHFTIERTRTSDTEPSS

SEQ ID NO: 1285 - DNA, 486 bp, Sorghum bicolor
atgtcggactccgaggagcaccacttcgagtccaaggccgacgccggcgcctccaagacgtacccgcagcaggccggcaccatccgcaagaacggctacatcgtcatcaagaaccgtccctgcaaggttgttgaggtctccacttccaagactgggaagcatggccatgccaagtgccactttgttggaattgacattttcactggaaagaagcttgaggatattgttccttcttctcacaactgtgacgttccacatgttaaccgtgttgagtatcagctgattgacatttctgaagatggatttgtcagccttttgactgagagtggcaacactaaggatgacaccaagcttcccagtgatgaagctctgcaagcccagatcaagagtggatatgatgaaggaaaggacatcctcctgaccgtgatgtctgccatgggcgaggaacagatctgtgctgtcaaggagattgggggcaagaactaa

SEQ ID NO: 1286 - protein, 161 aa, Sorghum bicolor
MSDSEEHHFESKADAGASKTYPQQAGTIRKNGYIVIKNRPCKVVEVSTSKTGKHGHAKCHFVGIDIFTGKKLEDIVPSSHNCDVPHVNRVEYQLIDISEDGFVSLLTESGNTKDDTKLPSDEALQAQIKSGYDEGKDILLTVMSAMGEEQICAVKEIGGKN

SEQ ID NO: 1287 - DNA, 429 bp, Sorghum bicolor
atggcgtcccaggccatcgagtgccaccgtgcgggtgcagagatcgtcaccggagacgccacgtgcaggaagaagtctgtggagctgctggagcagctcggcgtccccaatggcctccttccactggaggacatccaggagtttggatacaaccgcgactcaggcttcatttggctgctgcagaggaagaagctggagcacaccttcaagaaggtcaagaagacggtgtcgtacgccaccgaggtcacggcgttcgtccagaagggtaagttgtcgaagatcactggcattaaggtcaaggagctgatgctctggattagcatcatcgagatgtacatcccagaggcctcgctggagaaggtcaccttcaagtccagcaacggcctctccaggacccttgatgccgctgcctttgcgctcggggaatga

SEQ ID NO: 1288 - protein, 142 aa, Sorghum bicolor
MASQAIECHRAGAEIVTGDATCRKKSVELLEQLGVPNGLLPLEDIQEFGYNRDSGFIWLLQRKKLEHTFKKVKKTVSYATEVTAFVQKGKLSKITGIKVKELMLWISIIEMYIPEASLEKVTFKSSNGLSRTLDAAAFALGE

SEQ ID NO: 1289 - DNA, 1314 bp, Sorghum bicolor
tcctcctggctcgccgccgtggccactgccgcaacaccaagcttccgcgccgcccacgccctcctcctcacctccggccacctctcctcccgcgcctccgccaactccctcctccgcgccgccccatccccctccgcctgcgcgctcatcctacgcctccttctcctccaccgcttccgacccgaccacatctccctctccttctccctccactcctgcgcccgcgccgtcaccaccacccgcaacccgctcaccgccctcttccactcgctcgccctcaggctcggccacgcccgcgacgtctacgtcgccaacgccgccatctcttcctacttcgccgcctccgacgtcgcctctgccgaccgcctcttcgccgagctctccgctgacgacgtcgccgacgtcgtcacctggaccaccatggtcaccggccatgccaacgccaccaatctccagcgggcgaggcacttcttcgacgccatgcccgaccgcaacgtcgtttcctggaacgccatgctgggcgcctacgccagcgccggaatgctgtcccaggcgcgggacctgttcgacgcgatgcctcaaaggaacgccgccacgtggagctctatgctcactgggctcgtcctgtcgggacgctgcggggaggcgctcagggtgttccatgacatggtccgaagcggtgccgtgcccaatgagcccgcactggttagtgtggtctccgcgtgcgcgcagctgcggtctcttgagtacggcgcgtgggtgcacggatacgccgagcaggagctgcagggggcgatgagtgtcatcctcgcctccgccatcatcgacatgtacgggaaatgtgggggtatccacagtgccgtcagggtattcgccgcgatgcccgtgagaaacgtctactcctggaacgcaatgatcgctgggctcgcgatgaatggtggcgagagacaggccctgtcgctcttatggaagatgcagatggctggtgttcgaccgaatgacataactttcatcgggttgctcagcgcttgctcccactctggacttgtgaatgagggccgccggttgtttgacagtatgatcgaggactttgggatacagccagtccaacatcattacggtcttatggttgatttgattggccgctctggtcgtgttaaggaggccctatttttcgtcaagagcatgcctgtggaacctcaccctggcttatggggcgcactagctagcgcctgcaagatgcatggtgaggttgagcttggtgaggaggttgccaagaagctcattgagctggagcctcggcatggcagccga

SEQ ID NO: 1290 - protein, 438 aa, Sorghum bicolor
SSWLAAVATAATPSFRAAHALLLTSGHLSSRASANSLLRAAPSPSACALILRLLLLHRFRPDHISLSFSLHSCARAVTTTRNPLTALFHSLALRLGHARDVYVANAAISSYFAASDVASADRLFAELSADDVADVVTWTTMVTGHANATNLQRARHFFDAMPDRNVVSWNAMLGAYASAGMLSQARDLFDAMPQRNAATWSSMLTGLVLSGRCGEALRVFHDMVRSGAVPNEPALVSVVSACAQLRSLEYGAWVHGYAEQELQGAMSVILASAIIDMYGKCGGIHSAVRVFAAMPVRNVYSWNAMIAGLAMNGGERQALSLLWKMQMAGVRPNDITFIGLLSACSHSGLVNEGRRLFDSMIEDFGIQPVQHHYGLMVDLIGRSGRVKEALFFVKSMPVEPHPGLWGALASACKMHGEVELGEEVAKKLIELEPRHGSR

SEQ ID NO: 1291 - DNA, 1563 bp, Sorghum bicolor
gagacagttagccaaatcctatctggtctggttgagaggtatacggaatcaaatgatgcaaacagaaaccttgagaggctagagatggcacacatcaggctggaggctgctcttgagacatctgacaagtggcagattactgatgcatctttgctgcgttggcgtaagaagctgaagcgtgtggctcaagagtgtggcgacacactgcacaaatgcaagcaaagaatcgaacaagatcaatgggtggaacaagagctcatgaactgctccctccctagccggattgtgcgtgctaccaagtcattcattttctccactttcggcgacaaaaatgagctgagcagatttatggttcaaaggtttgagtggtttgcagatggagccagtgaatttctgagattcattgaggttggtggcacgccgcgctgtcacatgccattcaagtcccttatcaggaacctctttgcaggcatggagctgcagcataagattgtttggggaaatgagtacccttcttatctgctgtggctggtcccttccatcactccagatcatgggatagaagcctgcctgaaattcatccacaaagatgataatgcaccggagaataacttctttcttggtgcaatgctacagatatctgaaagcacagacatagttgggacagtagtgaactgcctgcagctctttcctctttgtttccagcctataattgaaactatcaagaaagagctcactcagctgcctacccaggacttctcatgggtgccatatgttgatttatggcacagaaaacactgggacaatcttcacagcttctgcacccaatggtttcgtccagatccattgtgttgcaagaagcaacaaggtctgcagattaataagccttgttgcattggtcacccagacatggtaggaattccagatgtttctctggattcagtcattctaatgcatttggagtgtcaagtcccggtatccgagcacaactacaagcagcagaccacaacctcaccatctcgacgcagatgttctacgcagcactactctccatatatgaaagctgggctcctctttaccccccatggttctacgaagcacaggcttcctgaagaaaagaactctgcagtagtgaccgtctacggtgaagagcagcactatgtgcatactgatatcaccttggaccagcttaatgagatcatgctgccaaaggcaacagattacttctacaggaaccccaaagcgacagcgtgccaaatgctttggaagtctaagcatggcactgagtacattgagtttgagaagccaaggatggaggaagagatggcaccatgtgcacggagggtaacttgtaggggaggtagtaggaaaaggaagctggaggcgcaacaagatcaggtacaggtgctggggaactggaatcgcaaggtggcatgtttcctcagttcatgggttgcacatgcgcctgtccggctgcgaggcttgatcctggactggattcagagaggcaaggaaagtcagctgccaggagtgccgccgccgccactgcacctggaaatctga

SEQ ID NO: 1292 - protein, 520 aa, Sorghum bicolor
ETVSQILSGLVERYTESNDANRNLERLEMAHIRLEAALETSDKWQITDASLLRWRKKLKRVAQECGDTLHKCKQRIEQDQWVEQELMNCSLPSRIVRATKSFIFSTFGDKNELSRFMVQRFEWFADGASEFLRFIEVGGTPRCHMPFKSLIRNLFAGMELQHKIVWGNEYPSYLLWLVPSITPDHGIEACLKFIHKDDNAPENNFFLGAMLQISESTDIVGTVVNCLQLFPLCFQPIIETIKKELTQLPTQDFSWVPYVDLWHRKHWDNLHSFCTQWFRPDPLCCKKQQGLQINKPCCIGHPDMVGIPDVSLDSVILMHLECQVPVSEHNYKQQTTTSPSRRRCSTQHYSPYMKAGLLFTPHGSTKHRLPEEKNSAVVTVYGEEQHYVHTDITLDQLNEIMLPKATDYFYRNPKATACQMLWKSKHGTEYIEFEKPRMEEEMAPCARRVTCRGGSRKRKLEAQQDQVQVLGNWNRKVACFLSSWVAHAPVRLRGLILDWIQRGKESQLPGVPPPPLHLEI

SEQ ID NO: 1293 - DNA, 1071 bp, Sorghum bicolor
atggatcagagctttgggaatctcggggccggagctggtggtgggagcagcagcgggggctccaactccaaggcggcggtgtcgtcgtcctcgttcctgcagctgccgctgtcgacggcgtcccccgcgtactacggcgcgccgctcgcgctcctgcaccaccacgccgccgccgtcgccgcgggcggccccggcccgtcgtcgtcgcagcagcagcagtcgccgtacgccaccaagcacgccagcaccgccgagatgtcgtcggcggaggccgaggccatcaaggccaagatcgtcgcgcacccgcagtactcggcgctcctcgccgcctacctcgactgccagaaagtgggcgcgccgccggacgttctggagaggctgacggccatggcggcgaagctggacgcgcgcccgccgggccgccacgagccgcgcgacccggagctggatcagttcatggaggcgtactgcaacatgctcgtcaagtaccgggaggagctgacccggcccatcgacgaggccatggagttcctcaagcgggtggaggcgcagctcgactccatctccggcggcggcggctcctcctcctccgcgcgcctctccctcaccgatggtaaatcagaaggtgtcggctcttctgaagatgacatggatccaagcggccgtgagaatgacccaccggagattgacccgcgagcggaggacaaggagctcaaataccagctcctgaagaagtacagtggctacttgagcagcctcaggcaagagttttccaagaaaaagaagaaagggaagctcccaaaggaggccaggcagaaactgctccactggtgggagctgcactacaagtggccttacccttcagagacggagaagattgcgcttgcagagtcaacaggcctagaccagaagcagatcaacaactggttcatcaaccagaggaaacggcattggaagccgtcagaggacatgcctttcgtgatgatggaaggcttccacccgcagaacgccgctgcgctgtacatggacggcccattcatggccgacggcatgtaccgcctcggttcatga

SEQ ID NO: 1294 - protein, 356 aa, Sorghum bicolor
MDQSFGNLGAGAGGGSSSGGSNSKAAVSSSSFLQLPLSTASPAYYGAPLALLHHHAAAVAAGGPGPSSSQQQQSPYATKHASTAEMSSAEAEAIKAKIVAHPQYSALLAAYLDCQKVGAPPDVLERLTAMAAKLDARPPGRHEPRDPELDQFMEAYCNMLVKYREELTRPIDEAMEFLKRVEAQLDSISGGGGSSSSARLSLTDGKSEGVGSSEDDMDPSGRENDPPEIDPRAEDKELKYQLLKKYSGYLSSLRQEFSKKKKKGKLPKEARQKLLHWWELHYKWPYPSETEKIALAESTGLDQKQINNWFINQRKRHWKPSEDMPFVMMEGFHPQNAAALYMDGPFMADGMYRLGS

SEQ ID NO: 1295 - DNA, 4947 bp, Sorghum bicolor
atggccgccactccggaccgcgccaatgccgacctccgtcgccgcctcgccgtcgacacccctccgccgccccagatcgccagagagaagcaaggccttgatactgaaatacccctttctcctcagtggcttatgaaggtgggagaaaacagggatcctgtttcacagggtatccgctcagatctttcaaagacatcagggactggtgaagacccaggctacagcgcgaagaaaaaagatattttcaggtcttctgtgcttgatggtgaaactgggcgccgtgaccgctggcgcgatgatgaaagggaacccaattcgacccatcggtggagtcgctggagggagacagataaggaacatggtgatgcacgcaaagtggaaagatggtcagatgacacctccaagcattctgtagatggtcatcgtgttccgcaggagcgctggggcgattccaataataaggaaggcagttatgaccaacggcgtgagaataagtgggctgcacgttggggttccaatgataagtggggggattcaggtaaagagggtgatgcttcccgtggaaaaggtttctctcactatggaaaggatgtcaacagttacgaaaaggatactgaaaaggatgacaatgtttctcgttcatggaaatctagttattctgcgggccgtgggcgtggagatttgcctcactatccttctcagactccgcagaaatcatctgctacttatggatatggtagggggaagccagacaatgattttgcaaattttccaaacaatcgtggaaagttcacatctggtacaagtgcaatcagtagtggatcttcacgaccattccatcttggtctactttctgacagacctggtggtgtatcagatcgttcagcattcagatatagtaggatgaagttgcttgacatatacagaagttgtgatgtcactgattttaagttatctgtcgattgtttggaggaagtctctgtgttcatgcaagaagatgctttggaacctttagcactatctgctcctgttgctgaagaagcggccattctaaaagcaattgacaaaggggatatcataaacagtggtgtccatcaggcttctaaagatggttctgctggaaaagctggtagagaagagcagccaggaggcgtagaagtctcaggtgttgctggaaatactgattcgacagcaagaggggagtcaatgcgtcctgggacatctacctatgttgttccacaaaggtctcagtttactggagaacataagcttgggccatctgaatttgggcatcaaatacctagtttcttaaatcaagaaactaaaactgttggcatgatgggttttgataacttcgccagtccagtgcagcctcatcctaatccagaaagcctctctctgtactacaaagatccacaaggtcaaattcaaggccccttttctggtgctgacattattggctggtttgaggcaggttattttggcattgatttgctggttcgtccagtgaatgccccccctgatattcctttcttaatgcttggggatgttatgcctcatctgagagcaaaggcaaggcccccgccaggatttgccacttcaaagccaagcgatatgctagctccggagacccaacctacagggaagtttgtcagctctagcatgcaagcaggatcagctggcatcggaatatttgacagtgggccaagcaggaaagacaatcctgttgaggctcaaaatcgtttcctggagtcacttatgtccaatagtgtgcggaatccttcggcagacactatctctttaacaggaggtatgaatgaacttggcagtagtagctttggcaacatttctgtgcgtggaggtgagagtggggtcaatatgaactatcttttggcacaaaaaggactgttggagaggcaaaattctttgcaaaaccctgttacatattggacaggagatgctgctccagcatcacaagcacatccaatggctgatacatctcgccaatctttgcaatcccagaatgttgatttactagccatgctgcaatcaaaggagaaacctcaagttgctactggtaattctggactgccactatggcccaattaccctgaagcaagaaatgttaatcctaacatgcatggtggagatcttgctcaaggggttcttaatatgcgtcaagatctgcagaactcccagaacattggtattggtgttcaacagcacaacttaatgccacaaaaccgaccagctttgtctcatttgccacctgagaagcttgccgagatatctcaagatccacagctgttaaatatgcttcagcagcaatatcttttgtcacaactacagttgcagtcacagacacctttgacacctcagccacaactctctatgttggacaagatgttattgctcaagcagcagcagcaacttcagcagcagcagcaacttcagcagcaacagcagcagcagcaacaacaactgcaacagcagctgcagctggagcagcaacaaaagctattgttgcagcagcaactactttctcagatggtacctcacgttcatcccaatcagcacactgatgattcttatacattgaagcatacttctgtgccatctgatgattctatgggtcttggtcttagaagaatgcaagagactatcgaagtcgatcagaaattgcctgtccatggtatgcaggtggggcagcaacctaatcagtcaattatgaattttagaaatatggatggtgtagctttatctcaaagctctcctggaatgttggaagattttgcgaatgtcgacttacaattgaaatcaactatggtaaactcaaagctggtggaagctgcagatagaaacgaggggtttaaatctcacgaagtgggcactgcagcagaaaaaaacatgtctggaaaggatttggattctggatctactaggattatagggagtgcttcagatgaagctaaggatttacatgaaccaccactagatccaaagtcagaaaatgtattatctgatatatctggtcaggttcaagaattgaatctgtcggcagaaaatacctcttctggcattgtgacagctgtggcaactgaagtaaaagttactgatacacaggagaccaagaaagcagagaagaaaaagaagcaaaagaaaaaacaggctgctgcagatgctggcaaaggagcatcaaaggcggtttcagcccagcaaccaaggcaggaaactgaggttgacagttctgatcttggtggtaataagcatgatttaccagatgacacagaggaactattttggggttcacctatcagagtgcaaaatgagatattaccccccaaaagtcttccagaggaatatgacgctggcaaagctgaatcacagttcagttctctatcatctgatcctcatagcatggcaagccagcgtgcatggaaacaacctactcagggtcccaggcctaagtcactgctggaaatccaagctgaggaacaattgcgtgcacagaaaggattagctactgaaactgctaagccagcagcttcagtcccttcaattccttggaatggcatgacaatatcctccgagcaacattatgggggttcaagtaaatcattgggaagcacggaaagtgctggtgagagaaataaaagaagccagttgcatgatttactggcagaagaagttctggcgaggtcaagcattgcagataatgagaacttaggtaatgccaatgatgcattttaccctcctctgtcgcctgctgctgttcagcctcagcctgctgctcctgctcttgatgataatgacttcattgaggccaaggacaaaaagaacaaaaagaaggcagcaaaaacaaaagcttctactgtgaaagctccatcacctgttggttcctttgatccaccagctatttcaatgccctctgaaaagggaaagtctgtcaagcaagcacaacaggagttagaaatattgccagctccaccaagtggtccatcctttggtgattttgttctttggaagagtgatcagactagctctgtgcctgctccagcatggtctaatgactcagcaaaggtacagaaacctttgtctttgagagatattcagagagaacaagaaaggagaaccgcttatgtccagcaacaagcaccctcaccaactccagcaaaggtggccccgaaccataaaagtcaggggaatgcttcttcccggcaagcttctggatcatctccatcacaggcagttgcccctgtccaaataagttccaatgctcccagtcgttccaagtcaattgctgaagatgatttgttttggggcccttctgagcactccaaacaagataaaaagcagtctgagtttccatctctgtcaagtcagagcagaagttccatgatgaaggatcaatctccactgaatcgtcaaaagtctcaggcaggcagattgccagtttcttctgctgctactgccaaccaatctggcaaagggaaagcagaggctgcgaacaagcagactgaggcaatggacttcagagattggtgtgagagtgaatgggccaggctcactggaacaaatgatataagcttccttgagttctgcataaagcaatcaactaccgaagcggagatgctccttcacgagaacattggttctcttgaccgcagtcaccagttcatcgacaagttcctcaactacaaggccttcctgtcagcagacgtgatcgacatggccttccaagctcccaacacgcgtggtacccgcggtgacggcgcagggcgtgcaaacgctgctcctgcagccagaggaggcacgagcgtggacgcggagctggatgttgtcgggaagaagaaaggcaagaaggggaagaaggtgagcgcggcagtgttggggttcaacgtggtgagcaaccgtataatgatgggcgagatccagaacgttgattag

SEQ ID NO: 1296 - protein, 1648 aa, Sorghum bicolor
MAATPDRANADLRRRLAVDTPPPPQIAREKQGLDTEIPLSPQWLMKVGENRDPVSQGIRSDLSKTSGTGEDPGYSAKKKDIFRSSVLDGETGRRDRWRDDEREPNSTHRWSRWRETDKEHGDARKVERWSDDTSKHSVDGHRVPQERWGDSNNKEGSYDQRRENKWAARWGSNDKWGDSGKEGDASRGKGFSHYGKDVNSYEKDTEKDDNVSRSWKSSYSAGRGRGDLPHYPSQTPQKSSATYGYGRGKPDNDFANFPNNRGKFTSGTSAISSGSSRPFHLGLLSDRPGGVSDRSAFRYSRMKLLDIYRSCDVTDFKLSVDCLEEVSVFMQEDALEPLALSAPVAEEAAILKAIDKGDIINSGVHQASKDGSAGKAGREEQPGGVEVSGVAGNTDSTARGESMRPGTSTYVVPQRSQFTGEHKLGPSEFGHQIPSFLNQETKTVGMMGFDNFASPVQPHPNPESLSLYYKDPQGQIQGPFSGADIIGWFEAGYFGIDLLVRPVNAPPDIPFLMLGDVMPHLRAKARPPPGFATSKPSDMLAPETQPTGKFVSSSMQAGSAGIGIFDSGPSRKDNPVEAQNRFLESLMSNSVRNPSADTISLTGGMNELGSSSFGNISVRGGESGVNMNYLLAQKGLLERQNSLQNPVTYWTGDAAPASQAHPMADTSRQSLQSQNVDLLAMLQSKEKPQVATGNSGLPLWPNYPEARNVNPNMHGGDLAQGVLNMRQDLQNSQNIGIGVQQHNLMPQNRPALSHLPPEKLAEISQDPQLLNMLQQQYLLSQLQLQSQTPLTPQPQLSMLDKMLLLKQQQQLQQQQQLQQQQQQQQQQLQQQLQLEQQQKLLLQQQLLSQMVPHVHPNQHTDDSYTLKHTSVPSDDSMGLGLRRMQETIEVDQKLPVHGMQVGQQPNQSIMNFRNMDGVALSQSSPGMLEDFANVDLQLKSTMVNSKLVEAADRNEGFKSHEVGTAAEKNMSGKDLDSGSTRIIGSASDEAKDLHEPPLDPKSENVLSDISGQVQELNLSAENTSSGIVTAVATEVKVTDTQETKKAEKKKKQKKKQAAADAGKGASKAVSAQQPRQETEVDSSDLGGNKHDLPDDTEELFWGSPIRVQNEILPPKSLPEEYDAGKAESQFSSLSSDPHSMASQRAWKQPTQGPRPKSLLEIQAEEQLRAQKGLATETAKPAASVPSIPWNGMTISSEQHYGGSSKSLGSTESAGERNKRSQLHDLLAEEVLARSSIADNENLGNANDAFYPPLSPAAVQPQPAAPALDDNDFIEAKDKKNKKKAAKTKASTVKAPSPVGSFDPPAISMPSEKGKSVKQAQQELEILPAPPSGPSFGDFVLWKSDQTSSVPAPAWSNDSAKVQKPLSLRDIQREQERRTAYVQQQAPSPTPAKVAPNHKSQGNASSRQASGSSPSQAVAPVQISSNAPSRSKSIAEDDLFWGPSEHSKQDKKQSEFPSLSSQSRSSMMKDQSPLNRQKSQAGRLPVSSAATANQSGKGKAEAANKQTEAMDFRDWCESEWARLTGTNDISFLEFCIKQSTTEAEMLLHENIGSLDRSHQFIDKFLNYKAFLSADVIDMAFQAPNTRGTRGDGAGRANAAPAARGGTSVDAELDVVGKKKGKKGKKVSAAVLGFNVVSNRIMMGEIQNVD

SEQ ID NO: 1297 - DNA, 1134 bp, Sorghum bicolor
atgatcactggggctctgcaggtcgccgccggcggccagccgctcctgctcacccgtcggggccagcagcggcgccgggtgttccggccgccccaagcagtggcgtccgacgccgctgccgccgccacggcgaacgaggagggcggcaaagtggcgctgggcgggtccggcgtcgccgtcaccaagctcggcgtcggggcctggtcctggggcgacaccacctactggaacgagttccagtgggacgataggaaactgaaggccgctaaaggagcatttgacgcgagtatcgactgtggaataaccttttttgatactgctgaagtgtatggagcagggatatcaggagcgattaattcagaaagtttactaggaagatttatcaaggaaaggcaacagaaggaacaggtagacgtggctatcgcgacaaagtttgcagctcttccatggaggtttggtcgtgggagcgtcatttgtgcgttgaaggcctcgttggatcgccttggcgtctcttcagttgagctctaccaacttcattggccagggatatggggcaacgaagattacctggatggccttggagacgctgtcgagcagggccttgtaaaggctgttggagtctcaaactacagcgaaaaacgtctccgggatgcctaccagcgcctcaagaagagggggattccactcgcttcgaaccaagtgaattacagtctgatatacaggaacccggaggaaaacggggtgaaggcggcttgcgatgagcttggcgttactctaatcgcttattccccaatcgcccaaggtgctctgacaggaaaatacactccggagaatccccctaaaggtcctcgaggacggatatacacaccagagttcctgacaaagctccaaccacttatcaaccggatcaaggagattggagaaagctacgggaggacttcaacccaggtggtgctgaactggctggtgtgccagggcaacgtggtgccgatccctggcgccaagaacgcggagcaggcccgggagttcgcaggcgcgctggggtggagcctcacggccgacgaggtggaggagctccggtccatggcgcgccaggtgaagcccgtcatcggcttcccggtggagaagctgtga

SEQ ID NO: 1298 - protein, 377 aa, Sorghum bicolor
MITGALQVAAGGQPLLLTRRGQQRRRVFRPPQAVASDAAAAATANEEGGKVALGGSGVAVTKLGVGAWSWGDTTYWNEFQWDDRKLKAAKGAFDASIDCGITFFDTAEVYGAGISGAINSESLLGRFIKERQQKEQVDVAIATKFAALPWRFGRGSVICALKASLDRLGVSSVELYQLHWPGIWGNEDYLDGLGDAVEQGLVKAVGVSNYSEKRLRDAYQRLKKRGIPLASNQVNYSLIYRNPEENGVKAACDELGVTLIAYSPIAQGALTGKYTPENPPKGPRGRIYTPEFLTKLQPLINRIKEIGESYGRTSTQVVLNWLVCQGNVVPIPGAKNAEQAREFAGALGWSLTADEVEELRSMARQVKPVIGFPVEKL

SEQ ID NO: 1299 - DNA, 4494 bp, Sorghum bicolor
atggcgccaaaatttcatttcccccaaacccaccccaaaaattccccaaactccctaagccataactcgtcttcgccgcggcgatcggcggcgccgatggtgttcctgcagcgcacccgccccatcaacccgcgcaagcgcccagccccgccgcccgagccccccagggccgccgaccccgactcttcctccgccatcgacgcggcggcggcgctgctcgccgacgcgggctgcacgctcctcgtcccgccgcaccagcccccgtccctctcctcgccgcacttgttcgcggcccgcctctcgcgcaagctctccgcgggcggggacgcctcctccgcctccccctcggcccccgcgcggcgcctcctcgagggcctcgccgccttcgtggcctcctcccctgcgcggctccgccagctgctcctcccgacagcgccgcacgcgccgagcctcgcgcgggctctcctctccgtccccgcgctccagccgggccttctcgcgctgctcctcgagaagctgcccgagcacttcgacgacagccgcggcggcgcgctcgacggattgccgctgcaggacgacgtggggaggctcatcgtgtcgcagttccgatggctcgatttccttgtcgacgccgacgccttcgtcgacaagctcgtggaggtgctctccgtggccccgccccgcctgaagaaggagatcatcggctcgctcccggagatcgtcggtgaccagagccacgccgctgtggtcaccgcgctcgagaagctcctgcaggaggactccgagatcgtggtcgccgtgcttgatgtgctgtcggatcttaacctcaacgaggagttgcaggagcaggcagtgactgttgcgatatcatgcatccggacaattgctccagaccagatgcctcatttgctcaggttcttgcttttgtcggctacaccagtcaatgctgggaggattatattgcagatacgtgagcagctcaagtttgttggtgctgtggatccacgggctgcacgaagtaagaagcttaaagggaaggcatcggctaaaagcactgatggggcaatacttgatacactgagatcaggcctacggtttaagaatatgctttgtgaggctttcttgaaggagctgaagtcagttgaccacccgagggatcacaaagtgattgatgtttggctcatcatgcttatctatgccaatggtggtgctctacagaagagtgcagagaaaatattgaagtccaagatcttacaggagtgcataagagagacgctgtttgatcaatgcattcatggaaacactgaactggtgaaggaacatttcatgtcatacctctcagttagtgattacttgttggcttgcaaggaagagaaagctagagagtttgcggcttatttgttcacagcactatttgaagagttcactgatacatattccaggctagagcttgtgggttcattggtcgctcatataggttctggggttagctatgaagtttcatctgctctggatatcatgatttctctgacatccaacaattcggaggaactgattcctatatcttcacatataactggtaagtccacactttttattcttctactgatatataatgcaatggtaagatttatcgaccttttcaatacaggaatattggattacttggagagttttcatgaagataatcttcggaaggtttacgatatcttctgtcgtttggcactggctgctggcttcaatactggttcaggtggctctaaagtagccaatgagcttctaatggtggtgagaaagcaggttggtaatccagacatgaagtatagacggatgggaataattggggttttaaggatagtttctactattgcttccactgatgtcaatgctgctgtgaactgttcatcatctcagcaaccaaattgtgaggaggccctggaattgctgacgatgtctgttaactcatgcaaatttgtgacattacccttgatttttctatatgatgaattagctgctttgctggatagcaaagttattcactcttcaattcatgagtgggtaggagagcatgctgcagaattatttgagacaccttttcttgctgacctagaaaatggcgaactaccggagaaatgtgtatgtgatgacatagaaggagaattatggatgaagttggatggaaatgtctctccaatccttatgtcccaattttcacttttaacaacaattgagcgtttagtaaatgaaggctcacttggtggaataaatgcactacttggctgtcctttgcaccttccctctaccaagcacttggatggagctaaatgggggaacttgtcaggactgcagaaaaaaacagtgtgctattccctgtactatgcaataaactggatcagggagttgctcaatgctttcggcacacaagttgaaagtagggttgataatgtttcacagaaagcaagggatgagacagcagtaaaacttatgaagcgtgtaagaaatctgatattacttgaaggtttactgaatgcatttctcaaaaattatccattatctctgcctgagctgcgatatcttggggattgttctggagcaacaagcaccagcaaattcaacattccaaagaacatgggagaacagagcataaatggtgcttccagcaaaagacagaagggttgcaagggcaaagcctcagaaaaaatgaatcctgatgataaactcaagcaacctacaatattagatgctttcaaaagagcaggagtaacagtcagtcaagcaacaaacaaagcttcttcacaaccatcgtcaagtggaatgatgtcaaaggatattgaacaagatgctaatgatcctggtgaacttgggcttatagatttaatggcagcaccaattaaactggatatgcaaagattcaaattcagaactctgcatacaacatgcttgtctttgttgaactactcagagtgtcaaggttcatcttcttaccttgaaactgagctgccaacatatatatatcttcttcgtgatctgcataacaaattagataatctaaatccttcagccaagccttttcttagtacttctcaagcaaaatatactcgtagtcattgccataagagcacacaagaatttcttgacaaaatccagccactattcttagttttaaggaagcatctgaatggagcagtttcaatgatcaaagatgtatcagagagctgtccagataactggagttcacattcatcttctgctggcaacccagacataccatatgtggtggtctccaaatcatcaatagtgactgctgtatgcaaggagattcttggctgctacaggaagttacttgccattcctgatctgttgaatcaaccaaacatgtcaattctgaagcaacttttgcagactttgcagccaactaaaaattttgatgatgttctttccgagttccaaccatctcttgctccttgcaatgttgattacctatattgtggagcatgtaaaatgttggaggatattatggatccagtgtcctcgttctcataccttttgtcttctgatgtgttaattactttacaatcaattgtaaattctgttgttgtattgttggaaaaatctggggaaccaaatgggaaaaatatccacatgggatgctccaaagcgatcattccctttctgcgaaagcgtcttggatactcagctcataagctgctaagcgctgatttccctagcgaagatgctgaaaaaggatggcagaataaaggtgatcttatacagaagatattgcaaatatacctcaggaatagtgactctacttcagatctacttgttgagatattgcctaagcatgaggagaacactgggagtttaaacaagacgatcaaacaagcactgaaggctagagcatcacctgaaagaggatcagttgatactattctgcaagaaattcagaaatcagtggaggcatttgtctctctaataggaatgtgtaaggctcacgaaaaggtttctatgcatgcaatggcagttaaacatgggggaaagtttatcgacacatttctgaaagccttcagctttctagagacacatttcgagcaacataatggcaccatagtcaaaatgctaagaatacttcagaaagcaacaagaataatccaatccatatgttcagatgctaagggtaacaagcggacaatgatcacaagcaaagtacctcctgcaaagagatctatggaacggttcttgttccaagttaaggcgctgctacacaactgctccgccgagaaggaattccagatgggcaatttgaagcacaaggacttgcaaggccatgtggtgagctctcaagcgtatgggagcgtggatgaggaagatgaggagcagatggagaccgactccgatgctccggctgatgaggagaacaataacgacaatgccatggacgaggatgcagtgggagggagtaacgagacgccgatggaggaggaagaggaatag

SEQ ID NO: 1300 - protein, 1497 aa, Sorghum bicolor
MAPKFHFPQTHPKNSPNSLSHNSSSPRRSAAPMVFLQRTRPINPRKRPAPPPEPPRAADPDSSSAIDAAAALLADAGCTLLVPPHQPPSLSSPHLFAARLSRKLSAGGDASSASPSAPARRLLEGLAAFVASSPARLRQLLLPTAPHAPSLARALLSVPALQPGLLALLLEKLPEHFDDSRGGALDGLPLQDDVGRLIVSQFRWLDFLVDADAFVDKLVEVLSVAPPRLKKEIIGSLPEIVGDQSHAAVVTALEKLLQEDSEIVVAVLDVLSDLNLNEELQEQAVTVAISCIRTIAPDQMPHLLRFLLLSATPVNAGRIILQIREQLKFVGAVDPRAARSKKLKGKASAKSTDGAILDTLRSGLRFKNMLCEAFLKELKSVDHPRDHKVIDVWLIMLIYANGGALQKSAEKILKSKILQECIRETLFDQCIHGNTELVKEHFMSYLSVSDYLLACKEEKAREFAAYLFTALFEEFTDTYSRLELVGSLVAHIGSGVSYEVSSALDIMISLTSNNSEELIPISSHITGKSTLFILLLIYNAMVRFIDLFNTGILDYLESFHEDNLRKVYDIFCRLALAAGFNTGSGGSKVANELLMVVRKQVGNPDMKYRRMGIIGVLRIVSTIASTDVNAAVNCSSSQQPNCEEALELLTMSVNSCKFVTLPLIFLYDELAALLDSKVIHSSIHEWVGEHAAELFETPFLADLENGELPEKCVCDDIEGELWMKLDGNVSPILMSQFSLLTTIERLVNEGSLGGINALLGCPLHLPSTKHLDGAKWGNLSGLQKKTVCYSLYYAINWIRELLNAFGTQVESRVDNVSQKARDETAVKLMKRVRNLILLEGLLNAFLKNYPLSLPELRYLGDCSGATSTSKFNIPKNMGEQSINGASSKRQKGCKGKASEKMNPDDKLKQPTILDAFKRAGVTVSQATNKASSQPSSSGMMSKDIEQDANDPGELGLIDLMAAPIKLDMQRFKFRTLHTTCLSLLNYSECQGSSSYLETELPTYIYLLRDLHNKLDNLNPSAKPFLSTSQAKYTRSHCHKSTQEFLDKIQPLFLVLRKHLNGAVSMIKDVSESCPDNWSSHSSSAGNPDIPYVVVSKSSIVTAVCKEILGCYRKLLAIPDLLNQPNMSILKQLLQTLQPTKNFDDVLSEFQPSLAPCNVDYLYCGACKMLEDIMDPVSSFSYLLSSDVLITLQSIVNSVVVLLEKSGEPNGKNIHMGCSKAIIPFLRKRLGYSAHKLLSADFPSEDAEKGWQNKGDLIQKILQIYLRNSDSTSDLLVEILPKHEENTGSLNKTIKQALKARASPERGSVDTILQEIQKSVEAFVSLIGMCKAHEKVSMHAMAVKHGGKFIDTFLKAFSFLETHFEQHNGTIVKMLRILQKATRIIQSICSDAKGNKRTMITSKVPPAKRSMERFLFQVKALLHNCSAEKEFQMGNLKHKDLQGHVVSSQAYGSVDEEDEEQMETDSDAPADEENNNDNAMDEDAVGGSNETPMEEEEE

SEQ ID NO: 1301 - DNA, 384 bp, Sorghum bicolor
atggtgtctgttggcccaaaaccaggggtgcctgttattctgcgggagctggagccatcctcagagatgttcaagcaaggagcgtcccttcgagtcacaggaagtcttcagtcgttcgaggtggactctgcaaccgctgtcattcaagacggcagcgtgagtttaaaggttgacacccaacatctgagggacatcagtttccgcacgaattcggcgtaccagttcattggtgaacttcagatccgtgaaggcaatgatgcgactctactagcgcgcattggaaggaacgtcgatggcctcgacctgaacctttaccagcaggctatactcatccgacggcaacacgaagcaaagcttgtgagctccaggaccaggagagcatga

SEQ ID NO: 1302 - protein, 127 aa, Sorghum bicolor
MVSVGPKPGVPVILRELEPSSEMFKQGASLRVTGSLQSFEVDSATAVIQDGSVSLKVDTQHLRDISFRTNSAYQFIGELQIREGNDATLLARIGRNVDGLDLNLYQQAILIRRQHEAKLVSSRTRRA

SEQ ID NO: 1303 - DNA, 702 bp, Sorghum bicolor
atgctcttcacgaggaagagcttgcttccggggacagtcctgccggacggcaccaagttcggcggcggcgacggcttccccggtccccagaggttcgtcctacgggcggacgcggacgccatccctttcagctacagccagctcgacaccatcctgcggatgttccggatccctcgcggatccaacaaggcggagcaagtcgccgccacgctccggacatgcgagggcgccaacgagtccccgtccccggaccctcacacctgcgccacctccgagcaggcggcgaccgacttcgctgccgcctcgctgggggtcagtgccagcgagctggtcgccgtcgtcaccgtcgtccacgggaggaaggacgccgccaggtacgtggtggcgccagacggcgtcgcgcgcatcggcaaggcgggagccgccgccgcggtgccgtgccaccctatggcgtacccgtacatggtccactactgccaccggccggcggacgtggaggcgctccgcgtcgagctgacggggctcggaggagacggcggccacgcggaggccggcggcgcgaccgcgatcgccatgtgccacgccaacaccacgagctgggacgcccgatacttcgagatgctgaacgcgacgcgcggggaggagatctgccacttcatgccgcggaactacgtgctgtggctgccggctgccgacctgtag

SEQ ID NO: 1304 - protein, 233 aa, Sorghum bicolor
MLFTRKSLLPGTVLPDGTKFGGGDGFPGPQRFVLRADADAIPFSYSQLDTILRMFRIPRGSNKAEQVAATLRTCEGANESPSPDPHTCATSEQAATDFAAASLGVSASELVAVVTVVHGRKDAARYVVAPDGVARIGKAGAAAAVPCHPMAYPYMVHYCHRPADVEALRVELTGLGGDGGHAEAGGATAIAMCHANTTSWDARYFEMLNATRGEEICHFMPRNYVLWLPAADL

SEQ ID NO: 1305 - DNA, 768 bp, Sorghum bicolor
atggccatggcttcctcctccgtctccctccgtggcgccatcctccagcggccccacctcgcgccccgccctgccgcggccgctgccgcccgacgtgcccccacgacgaggcgccgcgccgtgcccgccaagatctcctgcatcggatgggaccccgagggcatcctgggcgcgccgcagggcggccacatcgcgcgcctcgagttccgccgccgcctcgagagggactccgacgcgcgcgaggccttcgagcgccaggtgcgcgaggagaaggagcgccgccgcaacgagcgcgaggcgcgggtgatcccggacacggacgccggcctcgtcgagttcttcctcgacaccgacgcgcgcgagatcgagatcgagatcggcaggctacggccgaggctcaaccacgacttcttcggccatatctcgcgcgaaatagcacagatcaaatttgcagtcaccagaacagcggagatggaagacagactgatcgagctggaggcgatgcagaaggttcttcttgagggagttgaggcgtatgacaagttgcagaacgaccttgttacggcgaaagaacggctcatgaagatcctgcaatcaagtgacagaaaatcgactttgctggaaatggtggagcggaatgagctcaatatatccatattaacacttcttgatgagaatattgcaagtgcgaagacgagtaatcaggatgaggcagctgctttcttggaggatgtgagatcatctcttgtgaaatatataacaatataa

SEQ ID NO: 1306 - protein, 255 aa, Sorghum bicolor
MAMASSSVSLRGAILQRPHLAPRPAAAAAARRAPTTRRRAVPAKISCIGWDPEGILGAPQGGHIARLEFRRRLERDSDAREAFERQVREEKERRRNEREARVIPDTDAGLVEFFLDTDAREIEIEIGRLRPRLNHDFFGHISREIAQIKFAVTRTAEMEDRLIELEAMQKVLLEGVEAYDKLQNDLVTAKERLMKILQSSDRKSTLLEMVERNELNISILTLLDENIASAKTSNQDEAAAFLEDVRSSLVKYITI

SEQ ID NO: 1307 - DNA, 1296 bp, Sorghum bicolor
atggggaaggacaaagaagctaccaagcttaaggaggaggagaagaagtccaaggatgaggtccatctcaagatcaagagcaaggacaagtcgaccgccgaggaggacgacaagaaggagattgagatagagattgaggccaagtttgttgagaaggaagaggtcaaagactctggtgacagtgcagggtctgcaggaggaaagggtaaagaggggaagaaagacaaagagaagaagaaggagaagtcggagaatcatgaagatgacgaagatgatgagaaggtgatcaagaagaaggacaaaaaggagaaagacaagaaaacgaaggaagatggcgaagattcagaaaaggcagacaaagacaagaaggataagaaggctaaagagaaggatggatcaaagtcgaaggattcaagtggcgagaaacaagagaaaatgaaagatgagaaaaagaaggaaggtgacaaagatgtaggggaggaggagaaacacaagaagagagaaaacaaagataaagataagaaggataaaaaggacaaagaaaaggatggatctgaaccaaagggttcaagtgatgaaaaacaagagaaaggtaaagataagaaaaagaaagacaagaagagcgaagagatggaacagaaggaggaccatctagagaataagaatgataaggccgcacagaaggatgtccacatgaacaaagagttggcgggagctgcggactcgggcacccgcgaaatcaagctaactgacactgaaccacaggagaaagaaattgatagtgaagattcagaaggcaagaagaagaacatagagaaggacaaggacgaaacgaagaagaggaagaaggatgatggtgaggacgatgaaggcgagaagaaagacaaagaaaagaaagagaagaagaaggacaagggtgacaagaagggagatggtaagaagaaagagggtgatggcgatggcgatgaaggcaaagaaggtaagaagaaagacaaggagaagaaagagaagacgaaagacaagggtgcgaaggagaagacgaccgatccggtgaagctgaaagcgaaactggagaaggtggatgccaaattgcaagacctacaagctaagagagaagatatcctgaggcagctgaaagagctggaaggcggcggcaagggaaagacgaatggagagaagcctcctgcacaggtacaggaggacaaagggaaggactctggagaggtgcctgcacagatactggaacagggtggagagagcaaggtcaaggaacagaatcctgttgccgcagcctga

SEQ ID NO: 1308 - protein, 431 aa, Sorghum bicolor
MGKDKEATKLKEEEKKSKDEVHLKIKSKDKSTAEEDDKKEIEIEIEAKFVEKEEVKDSGDSAGSAGGKGKEGKKDKEKKKEKSENHEDDEDDEKVIKKKDKKEKDKKTKEDGEDSEKADKDKKDKKAKEKDGSKSKDSSGEKQEKMKDEKKKEGDKDVGEEEKHKKRENKDKDKKDKKDKEKDGSEPKGSSDEKQEKGKDKKKKDKKSEEMEQKEDHLENKNDKAAQKDVHMNKELAGAADSGTREIKLTDTEPQEKEIDSEDSEGKKKNIEKDKDETKKRKKDDGEDDEGEKKDKEKKEKKKDKGDKKGDGKKKEGDGDGDEGKEGKKKDKEKKEKTKDKGAKEKTTDPVKLKAKLEKVDAKLQDLQAKREDILRQLKELEGGGKGKTNGEKPPAQVQEDKGKDSGEVPAQILEQGGESKVKEQNPVAAA

SEQ ID NO: 1309 - DNA, 294 bp, Sorghum bicolor
atggatagggaagccaagaaagaagcgttcaggaagtatcttgagtccagcggcgtgctcgacaccctcacgaaagttcttgttgcgttgtatgaggagaatgataagccttcatctgcagtcgaatttgttcaacagaagctgggtggcccatcaatttctgactatgaaaagctcaaggcagagaagttggatttgcaattgaagtatgataagcttttagaaacccacaaggaaacatgcagacagctggaagaacttaagaatatgaagtacggtgcaccttggaactga

SEQ ID NO: 1310 - protein, 97 aa, Sorghum bicolor
MDREAKKEAFRKYLESSGVLDTLTKVLVALYEENDKPSSAVEFVQQKLGGPSISDYEKLKAEKLDLQLKYDKLLETHKETCRQLEELKNMKYGAPWN

SEQ ID NO: 1311 - DNA, 669 bp, Sorghum bicolor
atggagctctccgtcgtgccatccctctcgctgtccccgcgccgcgcccttccgccgctcccggccaggagggcggcgcggcggccggccttcgcctgccgctgcagctgctccgcggacgccgcgtccgcggtggccacccggcggtggttcgcctccctcctcgccgccgcagcagcggcgggggttggcgtggccggaggccgaggggaagccggcgcggtgtccaccagcaggagggcgctcagggcgtccaagattcctgacagcgaattcaccaccctgcccaatggcctcaagtactatgacatcaaggtaggaagcggggctcaagctgttaagggatcccgtgttgcggtacattatgtggccaagtggaagggcatcacattcatgacaagcaggcagggtcttggtgttggtggtggaacgccatatggatttgacgtaggcaattctgagagaggcaatgttttaaaaggattggatcttggggttgagggaatgaaagtgggaggccagaggttgataatcgttcctcctgaactggcatatggaaagaagggggtccaggaaattcctccaaatgcaactattgagctggatgtcgagctactatcaatcaaacaaagtccattcgggactcctgtgaagatcattgaaggatag

SEQ ID NO: 1312 - protein, 222 aa, Sorghum bicolor
MELSVVPSLSLSPRRALPPLPARRAARRPAFACRCSCSADAASAVATRRWFASLLAAAAAAGVGVAGGRGEAGAVSTSRRALRASKIPDSEFTTLPNGLKYYDIKVGSGAQAVKGSRVAVHYVAKWKGITFMTSRQGLGVGGGTPYGFDVGNSERGNVLKGLDLGVEGMKVGGQRLIIVPPELAYGKKGVQEIPPNATIELDVELLSIKQSPFGTPVKIIEG

SEQ ID NO: 1313 - DNA, 1875 bp, Sorghum bicolor
atgcgatcttcatgggctgactcagttgcgaacgccgaggaatcggcgcccgcgactgctgctgctaacggctctgttgtgactcatggcaactcgcgccccacgcgcagctcctacgtgcctcctcacctccgcggccggccagctggtgccggctttgacacccaagcgggcctagtagcaccggcacaaggtggaccactgccctcggctgccgcacaaccttctggtcagggtgctgctgttggtggccctcgctgggctggcattgtgaatggtggtggtggcagcgttggtgctcctcgccagggttatggtggtgctggcgggggcggaggacgtggtgcttggaactcccgtcctgggggttgggaccgcagagaccgtgagcccgatccttttgccaaagctgaggctgaagaagttgactttgagggccaggagaatactggcatcaattttgatgcctatgaagacatccctgttgagaccagtggtcatgacgttcctgcaccagccaacacatttgcagagattgatttgggtgacgcattgaatgagaatatccggaggtgcaagtatgtgaaaccaacaccagtgcagcgttacgccatcccaatctccattgctgggcgggatctcatggcctgcgcacagactggatccggaaaaactgctgcattctgtttcccaatcatcagtggcatcttgaagtctccaaggccacaacagaggtcgcggagctcaaggactgcttttcctctggctctgatcttatcaccaactcgtgagctttcagtccaaatccatgaagaagcaaggaagtttgcataccagactggtgtcagagttgtggttgcatatggtggtgcaccaataactaaccagctgagggacttagagagaggtgtggaaatccttgtggcaactcctggtcgcttaatggatctgttggagagggctagagtctcactgcaatcgataaggtatttagctctcgatgaagctgatcgtatgcttgatatgggttttgagccacagatacgtaaaattgttgagggaatggacatgcctcaacgtggtgagaggcagacaatgctgtttagtgcgacattcccaaaagagatacagaggatggctgcggatttccttgctgattacatctttcttgctgttgggagagttggttcaagcaccgatttgattgttcagagggtggagtttgtccttgattcagacaaacgaagctacctcatggaccttcttcatgcacaaaaggctaatggcacacatggaaagcacgctcttactttggtctttgtggagacaaagaggggggctgatgctctggaggactggctttttagaaatggattccctgcaactagcattcatggagacaggacacagcaggaaagggagcatgcacttaggtccttcaagagtggagcaactcccatccttgtggcgactgatgttgctgctcgtggtcttgacataccgcatgttgcccatgtgattaattttgacctccctaatgatatagatgattatgttcatcggattggaaggaccggacgtgctgggaaatctggtctggcgactgcattcttcaacgagagcaacactacacttgcaaggccgttgagtgatctcatgaaagaggccaaccaggaggttcctaagtggcggtggtggtggatatgggggatcatcaggatacggtggtggctatggcggcggcggtggcagcggctatggtggtggtcagagtatgagttcttgggactaaaccagactctaagcgaaaaatgggtcaaccatgatcaattagtccctgttgggtggaacgaatgcttggaatttgttgcttga

SEQ ID NO: 1314 - protein, 624 aa, Sorghum bicolor
MRSSWADSVANAEESAPATAAANGSVVTHGNSRPTRSSYVPPHLRGRPAGAGFDTQAGLVAPAQGGPLPSAAAQPSGQGAAVGGPRWAGIVNGGGGSVGAPRQGYGGAGGGGGRGAWNSRPGGWDRRDREPDPFAKAEAEEVDFEGQENTGINFDAYEDIPVETSGHDVPAPANTFAEIDLGDALNENIRRCKYVKPTPVQRYAIPISIAGRDLMACAQTGSGKTAAFCFPIISGILKSPRPQQRSRSSRTAFPLALILSPTRELSVQIHEEARKFAYQTGVRVVVAYGGAPITNQLRDLERGVEILVATPGRLMDLLERARVSLQSIRYLALDEADRMLDMGFEPQIRKIVEGMDMPQRGERQTMLFSATFPKEIQRMAADFLADYIFLAVGRVGSSTDLIVQRVEFVLDSDKRSYLMDLLHAQKANGTHGKHALTLVFVETKRGADALEDWLFRNGFPATSIHGDRTQQEREHALRSFKSGATPILVATDVAARGLDIPHVAHVINFDLPNDIDDYVHRIGRTGRAGKSGLATAFFNESNTTLARPLSDLMKEANQEVPKWRWWWIWGIIRIRWWLWRRRWQRLWWWSEYEFLGLNQTLSEKWVNHDQLVPVGWNECLEFVA

SEQ ID NO: 1315 - DNA, 5589 bp, Sorghum bicolor
atggcgccgccgcgcggcgacaggaagaaggggaagggcgccggcgggaagaccgatctgcgccccgaccggaagcagttcaaagggcatcgcaaggaggttgcagccgctgagcagggggatggcgacggagagcggcagcagttggcagcgccgggttccgctgcgctcctcgccgcagcttctgacgaagctgacttcccgagagggggacgcagcctcctgagcaaggatgagatggcggaggctcgcgcggaggcggagcaggatttcgagagggaggggaagaagggtaaggggaaaaggaagaggaggggcggcgagtcgtctggttttggcccggacgacgacttggggacactctttggtggcgccaccactgggaagctcccacgctatgctaatcgcatcacagtaaagaatatttcaccaaatatgaagctctggggtgttgtaattgaggttaaccagaaagatattgtgttaagtctacctggtggaattagagggtttgttcgctcagaggatgtgtgcgacattgctttgcaggaaaatcgcaaggatagtgagaacagtttatgtgcaaaagttgttcatgttggtcagcttgttccttgtatagtcctacgagttgacgatgataagaaagaaggaaaagtacttgctgcccaagtcaaaagcattgaggaccatggttacattcttcattttggagtatcctcctttagcggatttatgcaaaaggatgacaaagaaaatgtgaagattgagcgccgacaactgatgcattgtgttgtgaaggcgattgacaaaactcgggctattgttcacttgagctctgatgaagacttgctttgtaaatctattattaaggatctgaaaggcctttctattgatcatttgattcctgggatgatggttaatgcacgcgtccattcagttcttgaaaatggagtcatgttatcatttcttacttatttcagtggaacagttgatatttttaatttgttgaattcctttccctctggtaattggaaagatgattacagtaagaataagaaggtaaatgctcgcatcctgttcgttgatccatcaacaagagcagttgggcttacattgaacaaacatttacttcatcttgaagtaccccctattaatctaaaagctggagatatctacgataaatcaaaggtgctgagggtagataaaaaggctggtctttttctggaaataccttctccaactccatcacctggatttattagtatacatgatgtgtcagacaaggatgcaaaaaacttggagaagtttaaggaaggcagtagcttacgtgtccgtatacttggagtacggaatcttgaaggagttgcaataggcactgtaaaagacagtgcttttgaagggtctgttttcactcatgatgatgttaaacctggaatgttagtgagagctaaggttgctactgtggagccattcggtgctattgtacagttttcaagtggtgtgaaagcactttgcccgcttcctcacatgtcagagttggaacatgttgtgaaaccaccaaagaaatttaaggttggagctgagcttcttttccgtgtattgggctgcaaatccaagagagttacagtgacatacaagaagtctctggtgaaatcaaaacttgatgtgctagcatcatatgctgatgcaaaaattggtttagtgactcatggatggattactaaaattgaaaagcacggttgctttgtaaaattctacaatggagttcagggttttgttagcagatctgaccttggattagaggctggaactgaagcagaaaatgtttatcatgttggtcaagtggtcaaatgtagaattatcaatgtgatacctgcttcaaggaaactaaatgttagttttgtcatatcccataatagggttattccaatagacactccaaagttgggtagtattgtctctggtgttgtggaacggcttactcctgcagctgttgttgtcagtgtaaatggcttctccaaggggacaatactgaatgaacatttggcagaccatcatgatattgaaggtcacaatttagttctttcggcaaagcactcacttatcaattgcgcaaatgacattccttctgagatatcgcagatgcatcctggagttgtagttcatggttacatctgcaacattatcgaatctggatgttttgtccgttttctcggacatttgactggtttctctcccaaggacaaagcagttgataggcggatagaaaggctttctgatgcgttctatgttggccagtcagttcggagtcatatactcagtgtaactgcagaaactgctagagtaaaactctcacttcaacagtcaatgtgctcctcaacggattcttcgtttattcaaggatactttcttctggatcagaagattgcagcattgaagtactcaagcaatgattgggctcacacttttggcattggtagcttagttgagggggaggtgggagcaatagaagaatatggtattatccttaacttcaaagaccatctggatgttgttggcttaatcgagcaccatcagcttggtggcagtagtgtggaagtggggtcttctgtgaagggccttgttttggatttatctgatggagttgttaatttgtcccttaaaccagagctaattggcagtgttagaaatgttggaaaaaagaagaaacgccaaagggctgcagttgcagacttggagcttcatgaggaagtgaatgcagttgtggaaataatcaaagggagctatttggtcctttccatccctgagtacaattacgcaattggttttgcaccactgatggattacaactcacaactgcttccccaccaccactatgataatggacaacgcattactgtggttgttggaaatatcccaagttctgactcttctggaagacttatcctactaccaaaggcttcagctcagtattctgccctctctgaatctaaaagggctaagaaaaaatcaggctacaaaattgggtcacttgttgaagcagagattattgatatcaagccgcttgaacttctactgcaatttggtggcaatcttcatggaagaatccatattactgaggttcctgaaaaggattctgatgagcatccctttagtaaactcagaatagggcaaaagcttactgccagaattgttgcagaggctgaaccttctggaaagagtggcaaaaacttcaaatgggaattgtctattaggccatgtatagtcaacggagagtttgacgaattaactgctcaaaaagaacaaaagcacaccacaaatgagattgtacgtgcttatgtcgtcaaggtggataaggaatgggtctggttaactgtatcaagaaatgttatggctcatttatttgtacttgatagttcttccgagcccagcgaactgaaagaattccagcagcgctttagtgaaggccaagcagttaaaggccgtgttatcaatgtgaatcgggagaaaagattacttcggttgaaggcacttgataaccaatgcacacagctgaatatagatgaaatacaacaatcaaagtcctctgtgtttgaacaaacaaaacaaggagatatcatcggtggacgtgttcaaaaaattctacctggcgttggtgggcttgtcgttcagattggacctcatctccgtgggagggttcattatactgaaattgttgactcatgggtgaccgaacccttgtctggattccatgagggccagtttgtgaagtgcaaggtcctgtctgtgagccgctcatcagaaggatcacttcgagttgatctatcactccgttcatcaaacctgatcagagactctaacaactcaggactagttgatgatctggcaacctgtacctcccggatcgaaaagatcaaggatctgcttcccggaactgagattaagggctatgtgaagaatgttaattccaaaggatgttttattatgatttctcgaatggttgaggctaggattactctatcaaatttgtcagatgagtatgttgaaaatccgcagaaggatttccctgttggaatgcttgtacacggaagggtcctgtctacggacccatcatcagggagagtggaggcatcacttaggaagaccactggttccaaattggaaaagctggatgatattagttatagtgatttgcatgttggggatatcattgatggccaagttaagcgggttgaatcctttggattattcgttacaattcggagaagtgaactggttggtctgtgccatgtatcagaactttctgatgaacctgtcgttgatattaactcttgctataaagctggtgatatggttaaagccaaaattctgaagattgatgagaagcggcatcgagtatcacttggaatgaagaagtcgtactttgattctgatctgactgctgacacaaatgatgatgaagatgatgaaagtgctcttatggacatcagtgttgcccctcagatggttgaatatcataatagaagtttagttaatcgcaaagcagaaccaatagcttctgtgccgcctcttcaggtttccttggatgaatctgaatgttctgacctagaggataataataataataaaggccctgaaattgcaaatggaactgaagcaaatgctaaaaagaatgataaacaattaaagaaggaagcaagaaaacaaagggaactagaaatcagtgctatggaggaaagggctttgcagggagatgtaccacaaactccagatgattttgagaagttggtcaggagctccccaaatagtagttttgtctggataaaatatatggccactttgttagatcttgcagatgttgagaaagcacgtgcagtagctgagagggctttaaaaacaataatcccaagagaagaagaggagaaacttaatgtttgggtagcatatttcaatctggaaaatgaatatggtagtccacgggaggatgctgtgaaaaaggtattccaaagagccttgcaatattgtgatcccaaaaagttgcacttggctcttcttgcgatgtacgagaggaccgaacagtatgaacttgcagatgaacttcttgacagaatgaccaaaaggttcaaaacatcctgcaagatatggttatgccgcattcagttcgccctcaagcaaggcaaggatgttgcgtgcatcaaatccattgtaaaccgtgcgcttctaagtttgccacataggaagcgcataaagttcctctcgcagacagctattctagaattcaaatgtggggtgcctgaagaaggaagatccagatttgaactaatattgcgggagtacccaaaaagaacagacctttggagtgtttatcttgaccaagaaatccgccttggtgacatagaagttatacgggcattgtttgagagggtgacttgtcttaccctacctccaaaaaagatgcagttcttgttcaagaagtaccttaattttgagaagtcacttggtgaagacaacgaaagaattcagtttgtgcagcagaaggcaattgaatatgttcagagttcactgccgtcacaagacaacccttga

SEQ ID NO: 1316 - protein, 1862 aa, Sorghum bicolor
MAPPRGDRKKGKGAGGKTDLRPDRKQFKGHRKEVAAAEQGDGDGERQQLAAPGSAALLAAASDEADFPRGGRSLLSKDEMAEARAEAEQDFEREGKKGKGKRKRRGGESSGFGPDDDLGTLFGGATTGKLPRYANRITVKNISPNMKLWGVVIEVNQKDIVLSLPGGIRGFVRSEDVCDIALQENRKDSENSLCAKVVHVGQLVPCIVLRVDDDKKEGKVLAAQVKSIEDHGYILHFGVSSFSGFMQKDDKENVKIERRQLMHCVVKAIDKTRAIVHLSSDEDLLCKSIIKDLKGLSIDHLIPGMMVNARVHSVLENGVMLSFLTYFSGTVDIFNLLNSFPSGNWKDDYSKNKKVNARILFVDPSTRAVGLTLNKHLLHLEVPPINLKAGDIYDKSKVLRVDKKAGLFLEIPSPTPSPGFISIHDVSDKDAKNLEKFKEGSSLRVRILGVRNLEGVAIGTVKDSAFEGSVFTHDDVKPGMLVRAKVATVEPFGAIVQFSSGVKALCPLPHMSELEHVVKPPKKFKVGAELLFRVLGCKSKRVTVTYKKSLVKSKLDVLASYADAKIGLVTHGWITKIEKHGCFVKFYNGVQGFVSRSDLGLEAGTEAENVYHVGQVVKCRIINVIPASRKLNVSFVISHNRVIPIDTPKLGSIVSGVVERLTPAAVVVSVNGFSKGTILNEHLADHHDIEGHNLVLSAKHSLINCANDIPSEISQMHPGVVVHGYICNIIESGCFVRFLGHLTGFSPKDKAVDRRIERLSDAFYVGQSVRSHILSVTAETARVKLSLQQSMCSSTDSSFIQGYFLLDQKIAALKYSSNDWAHTFGIGSLVEGEVGAIEEYGIILNFKDHLDVVGLIEHHQLGGSSVEVGSSVKGLVLDLSDGVVNLSLKPELIGSVRNVGKKKKRQRAAVADLELHEEVNAVVEIIKGSYLVLSIPEYNYAIGFAPLMDYNSQLLPHHHYDNGQRITVVVGNIPSSDSSGRLILLPKASAQYSALSESKRAKKKSGYKIGSLVEAEIIDIKPLELLLQFGGNLHGRIHITEVPEKDSDEHPFSKLRIGQKLTARIVAEAEPSGKSGKNFKWELSIRPCIVNGEFDELTAQKEQKHTTNEIVRAYVVKVDKEWVWLTVSRNVMAHLFVLDSSSEPSELKEFQQRFSEGQAVKGRVINVNREKRLLRLKALDNQCTQLNIDEIQQSKSSVFEQTKQGDIIGGRVQKILPGVGGLVVQIGPHLRGRVHYTEIVDSWVTEPLSGFHEGQFVKCKVLSVSRSSEGSLRVDLSLRSSNLIRDSNNSGLVDDLATCTSRIEKIKDLLPGTEIKGYVKNVNSKGCFIMISRMVEARITLSNLSDEYVENPQKDFPVGMLVHGRVLSTDPSSGRVEASLRKTTGSKLEKLDDISYSDLHVGDIIDGQVKRVESFGLFVTIRRSELVGLCHVSELSDEPVVDINSCYKAGDMVKAKILKIDEKRHRVSLGMKKSYFDSDLTADTNDDEDDESALMDISVAPQMVEYHNRSLVNRKAEPIASVPPLQVSLDESECSDLEDNNNNKGPEIANGTEANAKKNDKQLKKEARKQRELEISAMEERALQGDVPQTPDDFEKLVRSSPNSSFVWIKYMATLLDLADVEKARAVAERALKTIIPREEEEKLNVWVAYFNLENEYGSPREDAVKKVFQRALQYCDPKKLHLALLAMYERTEQYELADELLDRMTKRFKTSCKIWLCRIQFALKQGKDVACIKSIVNRALLSLPHRKRIKFLSQTAILEFKCGVPEEGRSRFELILREYPKRTDLWSVYLDQEIRLGDIEVIRALFERVTCLTLPPKKMQFLFKKYLNFEKSLGEDNERIQFVQQKAIEYVQSSLPSQDNP

SEQ ID NO: 1317 - DNA, 1242 bp, Sorghum bicolor
atggcgagggcgcgcggtggcgccgcgtgggtgctgctggcggcggcgtgggtgctgtgggcggcggcggcggcggaggccaggtcgccgtccgggaggagggtgcaccggcacctcaagcgcctcaacaagccggccgtcaagagcatcgagagtccagatggagacatcatcgactgcgtgcatatctcccaccagccagcctttgatcatcctctcctcaagaaccacacaatacagtttaggccggcgtaccaccctgaaggtctatacgaagatgccaagagcagcataggctcaaacaatgccggtgagaagccgatgctccagatgtggcatcgaaatggcaggtgtccggagggcacggtcccaatcaggagaaccaagaaggatgacctgctccgagctagctccatgaggcggtatggcaggaagcggcatactgctccaaacccgctgtctgttgatcctaacatgctcagtgagggtggtcaccaacacgccatagcgtacgttgagggtgataagtactatggtgcaaaggccaccattaatgtgtgggagcccaagattcagcaggctaacgaatttagcctgtcccagctctggatcttggggggttcatttggggaggatctcaacagcatagaggctggttggcaggttagccctgacctctatggtgacaacaacaccaggttgttcacatactggactagtgatgcataccaggccacagggtgctacaacatgttgtgctccggtttcattcagataaacagcgagatcgccatgggggctagcattttccccatctcgaactacgcaggctcccaatatgatatcagcatcctgatctggaaggaccccaaggaaggcaactggtggatgcagtttggcaaggaatacgtcctgggctactggccatccttcctcttctcctacctcgccgacagcgcatcaatgatcgaatggggcggggaggtggtgaactcggagcccgacggcacgcacacgtcgacgcagatgggcagtgggcacttccccgaggaagggttcggcaaggcgagctacttcaagaacattcaggtggtggacagcagcaaccagctcagcgcccccaagggcgtgggcaccttcaccgagcaatccaactgctacgacgtgcagaacggcaacaatggcgattggggcacctatttctactatggcggccccggcaagaactcgaattgcccatga

SEQ ID NO: 1318 - protein, 413 aa, Sorghum bicolor
MARARGGAAWVLLAAAWVLWAAAAAEARSPSGRRVHRHLKRLNKPAVKSIESPDGDIIDCVHISHQPAFDHPLLKNHTIQFRPAYHPEGLYEDAKSSIGSNNAGEKPMLQMWHRNGRCPEGTVPIRRTKKDDLLRASSMRRYGRKRHTAPNPLSVDPNMLSEGGHQHAIAYVEGDKYYGAKATINVWEPKIQQANEFSLSQLWILGGSFGEDLNSIEAGWQVSPDLYGDNNTRLFTYWTSDAYQATGCYNMLCSGFIQINSEIAMGASIFPISNYAGSQYDISILIWKDPKEGNWWMQFGKEYVLGYWPSFLFSYLADSASMIEWGGEVVNSEPDGTHTSTQMGSGHFPEEGFGKASYFKNIQVVDSSNQLSAPKGVGTFTEQSNCYDVQNGNNGDWGTYFYYGGPGKNSNCP

SEQ ID NO: 1319 - DNA, 768 bp, Sorghum bicolor
atggatctggagacagagaatcgtcttgcttctttactacttgaagaggcccagagattacaattagaggctaacagggaagttgttcatgcatatctgcggaaacctaatgttaggcatcgtccaaactcacggttcctcacagccacagtccgtggagttcagcaagcaaatcgtgttgtggaggttgatgaaatgtggcgtgccagggaaaaggaactagagttggagtcaaaaatgaaaggcagaagtaaagatcgtgatgattttaggggtgagaagcgcaaaagtgatttgagaaaccatatctccagctcaagggttgaacaagaaggaaccacttataataattcctactcagaccaggaggatggtctcagggatgatgaaattgaaagatttcttcattcaagcgcaaagcgaggacgtggggccgttggttctaggatggatgagcctggtccatacctcgattctttgtcccgccatcaggacaatggacctagtgctgacatacgcgtggaagaaaaatgggagcgcagagtacaaggcccagagaagccttcacttttgggatctaaatctcttgatggtcattgtcgcaaggacactttggatggtaggtcatcaagctctgaaccacagaccaaaaaagaaaagaaaaataagtctgagaaaagagagaagatagagaaaaagaaggaaaaggataagaagaaatccaaacaccgccgccaccaccatcacagaagcaccagaagtgaatga

SEQ ID NO: 1320 - protein, 255 aa, Sorghum bicolor
MDLETENRLASLLLEEAQRLQLEANREVVHAYLRKPNVRHRPNSRFLTATVRGVQQANRVVEVDEMWRAREKELELESKMKGRSKDRDDFRGEKRKSDLRNHISSSRVEQEGTTYNNSYSDQEDGLRDDEIERFLHSSAKRGRGAVGSRMDEPGPYLDSLSRHQDNGPSADIRVEEKWERRVQGPEKPSLLGSKSLDGHCRKDTLDGRSSSSEPQTKKEKKNKSEKREKIEKKKEKDKKKSKHRRHHHHRSTRSE

SEQ ID NO: 1321 - DNA, 456 bp, Sorghum bicolor
atggcttcgtccagcagcagcaacctcctcgcagccgccgtgctgctctccgtgctcgcagccgccggcgcgagcgccgggacgacctgcgtgccggggtggggcatcccgcacaacccgctgccgagctgccgctggtacgtggccagccggacctgcggcatcgggccgctcctcccgctgccggagctgaggaggaggtgctgccgggagctggcggacatcgcggcgtactgccggtgcacggcgctgagcatcctcatcgacggcgtgatcccgccgggcccggacgcgcagctggagggcaggctggaggacctgccgggctgcccgcgggcggtgcagaggcgcttcgccgccaccctcatcacggaggccgagtgcaacctgcccaccatcaccggcgtcgccgagtgcccctggattctcggcggcgaaaccatgccctccaagtag

SEQ ID NO: 1322 - protein, 151 aa, Sorghum bicolor
MASSSSSNLLAAAVLLSVLAAAGASAGTTCVPGWGIPHNPLPSCRWYVASRTCGIGPLLPLPELRRRCCRELADIAAYCRCTALSILIDGVIPPGPDAQLEGRLEDLPGCPRAVQRRFAATLITEAECNLPTITGVAECPWILGGETMPSK

SEQ ID NO: 1323 - DNA, 678 bp, Sorghum bicolor
atgccctgctgcccgccgtcgctgctcggagtcgggccgcggctgcgctccttcctccgcgactacgacgcgctccagtccctcgccctcgcgctcatctacctccagattgtttgtgcactgatcggatcacttggggcattgttcaatggggttcttgtgatcaacctggtgattggtctatttgctgttgttgcaattgagagcagtagccagagacttggccggacatatgctgtccttctcttctttgctgtcgtcattgacgttgcttggtttatactcttctcacatgctatctggacgattactcctgatgagaagtatggtcgactttttgttttctcactcagactagcattgtggatgcaaatcattgggttttcagtaaggtttttgtcttcattcttatggattcagatgtatagattaggggcttcttccagcacgccaacatattttgaaaccaaccatgaagcaagaaatagtttcttaagccctagatctgattctgttagacggagttccatggcagatgatatattgggaggttcaatctatgatccttcttactactcgtcactgttcgaggatgttcgaaacaattcatgcaatcatcaggtattaccttctagtttctgcacactgttctttttcattcaatgcttaacttattag

SEQ ID NO: 1324 - protein, 225 aa, Sorghum bicolor
MPCCPPSLLGVGPRLRSFLRDYDALQSLALALIYLQIVCALIGSLGALFNGVLVINLVIGLFAVVAIESSSQRLGRTYAVLLFFAVVIDVAWFILFSHAIWTITPDEKYGRLFVFSLRLALWMQIIGFSVRFLSSFLWIQMYRLGASSSTPTYFETNHEARNSFLSPRSDSVRRSSMADDILGGSIYDPSYYSSLFEDVRNNSCNHQVLPSSFCTLFFFIQCLTY

SEQ ID NO: 1325 - DNA, 1437 bp, Sorghum bicolor
atggccggcgtccacgaaccgcccaccggcggcgacgccgccggcgccaacggcagtagatcacggtggcggcgtccgcggcgcgtcctgatgttcccgctgccgttccagggccacatcaacccgatgctgcagctgggcgacgtgctgcacgcgcgggggctcgcggtgaccgtgctccacacgggcctcaacgcgccggacgccgcgcgccaccgggagttccagttcgtgccggtccccgacggcgtcccgcccgacgtcgcggcgtccgggaacgtcgtcgacatcatcgaggccatgaacgccgccatggaggccgacggggcggcggccctcagggccgtcctcgagtccgtggtcgcggacgagacgctgccccctgccgcgtgcatcgtcttcgacgccaacctcctcgccgtgcccagcgctgctgcggcggtcgggctcaggacgctggtgctgcgcaccgccagcgctgcctgcctccgatgcttcatggcgtaccccatgcttcaccaaaagggctatctgcctcctcaagagtccaaactctacatgccagtgaaagagctgccgccgctgagggtaagggacctcttctactcaagccggagcgaccccaagaaaatgcgcgagctactcgctcgggccatggaagcaacgaggaattcctccggtgtagtgatcaacacactcgacgctctggagaaaccagagctgaagaggctctgccaagagctccacatccctatggtacttgctcctggccctctccacaagctgtcctccaagaacacaaggaggagtagcatgctggaccaagactgcagcagcagttgcatcgagtggctggacaagcagcccacagaatccgtgctgtacgtgagcttcggaagcttggcatccatggatgccaaggagttcttggaggtggcttggggcttggccaacagtggacatccttttctatgggtggttcgtgaagattcggtacagggctttgatggtggtccggattttccaaatggatttgaggctgcagttcatggcaggggcaaggtgatccggtgggcgccgcagctggaggtgctggcgcacccggcggtcggtggattttggactcacaacggatggaactccacgttggagagtatcagtgagggtgttccgatgatttgcaggcctcagttcgcggatcagatgatgaacactaggtacgtggtgaacacatggggtgtagggttggagttggaaggtgagcttgagagaggcaaaatagaggaggccgttaggaagctcatgaaggaaaaggagggagaggagatgagggatagagctaaggagctcaagaagactgtggcggattgtttggaaactggtgggacttcacaggttgccattgataagttggtggattatatactttcaatgtga

SEQ ID NO: 1326 - protein, 478 aa, Sorghum bicolor
MAGVHEPPTGGDAAGANGSRSRWRRPRRVLMFPLPFQGHINPMLQLGDVLHARGLAVTVLHTGLNAPDAARHREFQFVPVPDGVPPDVAASGNVVDIIEAMNAAMEADGAAALRAVLESVVADETLPPAACIVFDANLLAVPSAAAAVGLRTLVLRTASAACLRCFMAYPMLHQKGYLPPQESKLYMPVKELPPLRVRDLFYSSRSDPKKMRELLARAMEATRNSSGVVINTLDALEKPELKRLCQELHIPMVLAPGPLHKLSSKNTRRSSMLDQDCSSSCIEWLDKQPTESVLYVSFGSLASMDAKEFLEVAWGLANSGHPFLWVVREDSVQGFDGGPDFPNGFEAAVHGRGKVIRWAPQLEVLAHPAVGGFWTHNGWNSTLESISEGVPMICRPQFADQMMNTRYVVNTWGVGLELEGELERGKIEEAVRKLMKEKEGEEMRDRAKELKKTVADCLETGGTSQVAIDKLVDYILSM

SEQ ID NO: 1327 - DNA, 903 bp, Sorghum bicolor
atggattacatggactttgtgcagaagcatgttgactctggtgctgatatttcagttgcgtgtgttcctatggatgaaagtcgagcatctgattttggattgatgaaggccgacaggaatggtcgcatcactgatttccttgaaaagcccaagggtgaaaatttgaaatcaatgcaagtggatatgggattgtttggattatccccagagtttgcaagtacatacaaatacatggcttcaatgggaatatatgtatttaaggcagatgttctcagaaagcttctgagagggcattatcctactgctaatgattttggctcagaagtgattccaatggctgcaaaagattatgatgtgcaggcttatttgtttgatggttactgggaagatattgggacaataaagtctttctttgaagcaaaccttgctctcaccgatcagtttcccaacttctatttttatgatcccgtgaagcctatttttacatctcctagatttttacctccaaccaaggtagaaaattgcaaggttttgaactctataatttcacatggctgctttctaaccgagtgcagtgttgagcactctgtcattggtatccgctcaagattagaactgggggtgcagctcaaggacaccatgatgatgggggcagattactaccagactgaagttgagagattatctgaactgtcagttggaaaagttccagttggtgttggagagaacactaaaataaggaactgtatcattgataaaaatgctcgaattgggaagaatgtagtcattatgaactctgagaatgtgcaagaagcagacaggacagctgaaggatattacattcgttctgggataactgtggtgctcaagaatgcagtaattctgaatggtacaacaatttag

SEQ ID NO: 1328 - protein, 300 aa, Sorghum bicolor
MDYMDFVQKHVDSGADISVACVPMDESRASDFGLMKADRNGRITDFLEKPKGENLKSMQVDMGLFGLSPEFASTYKYMASMGIYVFKADVLRKLLRGHYPTANDFGSEVIPMAAKDYDVQAYLFDGYWEDIGTIKSFFEANLALTDQFPNFYFYDPVKPIFTSPRFLPPTKVENCKVLNSIISHGCFLTECSVEHSVIGIRSRLELGVQLKDTMMMGADYYQTEVERLSELSVGKVPVGVGENTKIRNCIIDKNARIGKNVVIMNSENVQEADRTAEGYYIRSGITVVLKNAVILNGTTI

SEQ ID NO: 1329 - DNA, 240 bp, Sorghum bicolor
atgggtctctccaccaaactttttgcggtcctcctcctgctcctcattggtggttatactgatacgcagctgggaccggtgactatggcactggcgaggaagtgtgagtcgccgagccaccgcttccagggaccctgctccagagacgcaaactgcgcaaccgtttgccggactgaaggttttaccggtggcaagtgcaaaggcctacgccaccgctgcttctgtaccaaggactgctag

SEQ ID NO: 1330 - protein, 79 aa, Sorghum bicolor
MGLSTKLFAVLLLLLIGGYTDTQLGPVTMALARKCESPSHRFQGPCSRDANCATVCRTEGFTGGKCKGLRHRCFCTKDC

SEQ ID NO: 1331 - DNA, 690 bp, Sorghum bicolor
atgtgtggctgctgcggcgagtgctgggacaatgtcaaggactggctcatctgtctcgccgtcgtcatcggcctcatcgtcatcgccggcgtcgtcatcgtcatcgtcatcttcggcgggcctctccgccacgtcaggatccgcgtggaggacgcgtcgctcacccggttcgcgctggtgaccacgcccacgacggcgctcgcctacaacctcacgctggcgctgaccgtgcgcaacccgaactgggccatcggcatcaagcacgacaagccgctggaggccgcgtacagcttcgacgggcagccgttcgagcgcgtgcacgtcgccgacaagggcgacaagcagggtccccggaagacggtggtgtaccaccgccgagttcaggaaggagaacgccacgggggtgttcgaggtggaggtggcggtgacggggaagttcaagtacacgctgcgcaagaccaagtgcaagatcgaggccacctgcccactcaagctgcagctcgccgcgccgggggcaacgtccgtcgtgttccagaaagtcgactgcgagctcgccaagtccgacgacaagtactgctagagatgatgattatattggtttgcaaatgcattgattttgatttggagctcatgtgctgtgttttactcatcctgtccccctcttattggtccttgttgcaattgagttga

SEQ ID NO: 1332 - protein, 229 aa, Sorghum bicolor
MCGCCGECWDNVKDWLICLAVVIGLIVIAGVVIVIVIFGGPLRHVRIRVEDASLTRFALVTTPTTALAYNLTLALTVRNPNWAIGIKHDKPLEAAYSFDGQPFERVHVADKGDKQGPRKTVVYHRRVQEGERHGGVRGGGGGDGEVQVHAAQDQVQDRGHLPTQAAARRAGGNVRRVPESRLRARQVRRQVLLEMMIILVCKCIDFDLELMCCVLLILSPSYWSLLQLS

SEQ ID NO: 1333 - DNA, 252 bp, Sorghum bicolor
atggagcgaatccttgactgtgccaaacccatcagggcaaccatcagggtttcctcttatcatgtgcttcaagacaatcatgtctttgatctcctagagcacaatgatagtgaggtgcctgtgcaagatgatgccaatggaaagactcatcttaagggcctctccgaggttggaatcaattccattcaagagtttcaaattttgtgttatgggagtgacaagctccaaaatccaagcattgcttccagctaa

SEQ ID NO: 1334 - protein, 83 aa, Sorghum bicolor
MERILDCAKPIRATIRVSSYHVLQDNHVFDLLEHNDSEVPVQDDANGKTHLKGLSEVGINSIQEFQILCYGSDKLQNPSIASS

SEQ ID NO: 1335 - DNA, 675 bp, Sorghum bicolor
atgccagcgacggcgacgactcatcgctgcggcggaggacgaatggccgctatgggcggcactccgagcccggctaagcggccccgccactctgacgactccgcctctggcggcggctccgattctgactctgatggggacctcgtcagtgacctcagggagatcgtgtgcctgcttcggcttatcaagggcggggccaacaaggacgggcagaagatctgtgagcagatcgttgtcagtgtggcagcagatattcagactatgctagaagaaacccagctgaaatttgaggaggaaagacagaatttgctaaaagtactgtctaacgcttccaaagagcagtgtgagagttcactgaacgaagagtacggcaagtttcaggaaacatatgacacgttctgtaaagaaaaggatgctcacatgcagactttcagagacctgttctccaaagttgaagttgagaagaagaaattgcttgagaagtacgaacattataggaaggcggagaccaacacattatcggaacttgacaaaacattctcagagaaggtaacacgtgcggaacaatctgtcagaagggtgaagcaggatgacaagtcatttatcatctttcgcaagtctattggctcgtctcttgagtgtggctctgatgatgattttgaccttgatgagtga

SEQ ID NO: 1336 - protein, 224 aa, Sorghum bicolor
MPATATTHRCGGGRMAAMGGTPSPAKRPRHSDDSASGGGSDSDSDGDLVSDLREIVCLLRLIKGGANKDGQKICEQIVVSVAADIQTMLEETQLKFEEERQNLLKVLSNASKEQCESSLNEEYGKFQETYDTFCKEKDAHMQTFRDLFSKVEVEKKKLLEKYEHYRKAETNTLSELDKTFSEKVTRAEQSVRRVKQDDKSFIIFRKSIGSSLECGSDDDFDLDE

SEQ ID NO: 1337 - DNA, 597 bp, Sorghum bicolor
atggcgcagctcccagaccccgccgccgccaatgtagcggccgggaaagaagagacggcaggctgggaggacgcgctggacctggacgactccgacatccgcttcgatcccctcccccactctttcggcgccaccgcctcccagtcccagccccagcaggacaagcccccgcacccctcccaccaccaccccagccaccgcatccctggacctgccgccgccgccgtccaggacacggtcgtcccccgctccgtcacccgcccgcctctcacactgggacgcggggacgcgcgcgccacggacgccgacttcctgcggcccccgtggctcagcgccctccagttccttgggaaggaccgcgcgtgggagcggccggggatcagggccattaagggcgacgaggacttgcttcgagcacctttggtggctggggtggtgacatcgtgcaagccaaacgggctcggagatctcttcttgattctaaaggatccaaccgactcaatcggtgcttcagttcacaagaaagttcttttggaggagaataatggccatgatatctcgattgggtgtgccgttgtttttagtaagtccaggtag

SEQ ID NO: 1338 - protein, 198 aa, Sorghum bicolor
MAQLPDPAAANVAAGKEETAGWEDALDLDDSDIRFDPLPHSFGATASQSQPQQDKPPHPSHHHPSHRIPGPAAAAVQDTVVPRSVTRPPLTLGRGDARATDADFLRPPWLSALQFLGKDRAWERPGIRAIKGDEDLLRAPLVAGVVTSCKPNGLGDLFLILKDPTDSIGASVHKKVLLEENNGHDISIGCAVVFSKSR

SEQ ID NO: 1339 - DNA, 1041 bp, Sorghum bicolor
atgtcgacggcgacggctgcggcgttgtacgcgcagccaacagacgtgactctcgtgaaggacttcctgcggccgtgggtgacatcgggcgacaccaaggcgggcggcgccggcgccggcgccgccgcgtacgtgcacgcggctgatctctactccgcggaccccgaagagttggcgcgcgcgttccagcctgccgtctctcgggacggcgacgccgtctggtacttccttagtccgctgcgcaccaagagcccccgtgatcggcgcaaggtgcgcgccgtcgccgatggcacggggtgctggcatagcgaggccgggcctaagaacgtcattgaccacctcgacggcggacgtcacgtcggctaccgccagagcttttcgttcatgcggaggcgcgaaactggtcctgacgttcgagctggctgggtaatggcggagttccaccttcaccacgaaaacttggggaggaaggttgagggcctcgtgctgtgtaagatgtaccgcagcccgcgtatccatggtcctgcggtggtgcctgacagtgacgacatcgtgcactccgacgtgtcactgtacgcggaaacaatgttttgttgtgggaagagcaaggcggtcgacgatgacgacgactcctacagtgtgccgccaagatggcaacgacgacatgccatgaactcggaccgcacggccacggccacagcaatgacagcgtctcttctcaagaagaaggtggacggcgatgacgcggtctccggcacgaccatggctgcggtgccgtgccccaataacaaggtggtggtggcggatgacgaggacttgttggtgttaccgcccgcacgaaagaagatgaaggtggcggtggcggatgccgatagctccggcacagcgttggcgctcaaggcgaccgccgctggcgccccgtctatggcggcccagctgcactgcccccagtgtgggttccacctcgccgctctgcaggcgctcgtgacccttaccaaatccaagtcgatcatgccctggtcatgccctgaggagatgtag

SEQ ID NO: 1340 - protein, 346 aa, Sorghum bicolor
MSTATAAALYAQPTDVTLVKDFLRPWVTSGDTKAGGAGAGAAAYVHAADLYSADPEELARAFQPAVSRDGDAVWYFLSPLRTKSPRDRRKVRAVADGTGCWHSEAGPKNVIDHLDGGRHVGYRQSFSFMRRRETGPDVRAGWVMAEFHLHHENLGRKVEGLVLCKMYRSPRIHGPAVVPDSDDIVHSDVSLYAETMFCCGKSKAVDDDDDSYSVPPRWQRRHAMNSDRTATATAMTASLLKKKVDGDDAVSGTTMAAVPCPNNKVVVADDEDLLVLPPARKKMKVAVADADSSGTALALKATAAGAPSMAAQLHCPQCGFHLAALQALVTLTKSKSIMPWSCPEEM

SEQ ID NO: 1341 - DNA, 1560 bp, Sorghum bicolor
atggtgcaacaacctagaattaactctaaaatggatgaagtcatccgtaaggccaggatgccaaagacaactaattcaactggcttagtagattcacatcgccattatatacagaatgttgataagcccgacagggcatatacaactaaaagggccaagcgacctggaaaagcaaatgcttcaagtggcaagatttttgtgacaactgaacccgatcattttggaccgatccttcccaaacatgaccccatgagggaaattggcgtcaaagttggagaaacatgggcagatagattggaatgcagacaatggggtgctcatttccctcatatagctggaattgctgggcagagcggaaagggtgctcagtcagtcgccctatctggaggctatgaagatgacgaagatcatggggattggtttctttatactggaagtggcgggagggatctaagtggaaacaagagaacaaataaagagcaaggattcgatcaaacatttaggaacatgaacgaggctcttcgacaaagctgcttgtcgggtcaccctgttcgggttgtgcggtcgcataaagtgaaacactctttgtacgctcctaaattgggcgtgaggtatgatggaatttacagaattgagaaatgttggaggaagattggtattcaggggaagttcaaagtctgcaggtatctctttgtacgctgtgacaatgaaccagcaccttggaccagtgatgatcatggtgatcgtccaaggccattgcccgacattccggagttagaaaatgcaactgatatatatgagagagatgagcaaccttcatggggctacgatgagagagaacgctgctggaaatggatgcgtgatgaaccgcagccaacaaggataaagaatgctggcaaacaagtccagagaagagcaaggtctaacactaaaagacttctgaaagaatttagttgttctatctgctgcaaagtgatgacagaaccactctctgctccctgtggtgacaacttctgcaagacttgtttgctgggggcatatgataagcagtcctccgtgagagaaagaagcggtggcggtcgtacccttagggctcagaagatcgtgaagagatgcccatcctgtagaattgacatcagtgacttcctagtggatccacagatcaaccgagacataatgaatgtgattgagtctctgcaactgaaactcgaagaaggtaacaccaccaaggacataccatatggtggtggtgacatggctgaggaattccatgatgatgaacaagaggaaaatgatggcggcggtatggagatggatgaggctggttgtagctttgatgtcgaagagggagacaatgctgaggatcatgaggataacccagctgatatggatgatgatgcttgtggcgaaattgtggttggaatcaaagaagaagggcagcagcctgaccagaaacgcaagggtgacactgacattggcactgatggtcctaataaaaggacgacaaccagagttggcgtgggacaacagaacagcaagggcgatgaggcaggcatgtaa

SEQ ID NO: 1342 - protein, 519 aa, Sorghum bicolor
MVQQPRINSKMDEVIRKARMPKTTNSTGLVDSHRHYIQNVDKPDRAYTTKRAKRPGKANASSGKIFVTTEPDHFGPILPKHDPMREIGVKVGETWADRLECRQWGAHFPHIAGIAGQSGKGAQSVALSGGYEDDEDHGDWFLYTGSGGRDLSGNKRTNKEQGFDQTFRNMNEALRQSCLSGHPVRVVRSHKVKHSLYAPKLGVRYDGIYRIEKCWRKIGIQGKFKVCRYLFVRCDNEPAPWTSDDHGDRPRPLPDIPELENATDIYERDEQPSWGYDERERCWKWMRDEPQPTRIKNAGKQVQRRARSNTKRLLKEFSCSICCKVMTEPLSAPCGDNFCKTCLLGAYDKQSSVRERSGGGRTLRAQKIVKRCPSCRIDISDFLVDPQINRDIMNVIESLQLKLEEGNTTKDIPYGGGDMAEEFHDDEQEENDGGGMEMDEAGCSFDVEEGDNAEDHEDNPADMDDDACGEIVVGIKEEGQQPDQKRKGDTDIGTDGPNKRTTTRVGVGQQNSKGDEAGM

SEQ ID NO: 1343 - DNA, 1341 bp, Sorghum bicolor
atggacgtggagtacgacgtgatcgtgctgggcacggggctcaaggagtgcatcctcagcggcctcctctccgtcgaccgcctcaaggtgttgcacatggacaggaatgactactacggtggagactccacatcgctcaatctcaatcagctctggaaacggttcaagggtgaacaaacaccacctgcacacataggagctagcagagactacaatgtcgatatggttccaaagtttatgatggcaaatggtgcattggttcgtgtgctcattcatactggcgtcaccaagtacatgtccttcaaagctgtggatggaagctatgttttcaacaagggaaagatccacaaggttccttctaatgatatggaagctctcaaatctccactgatggggttatttgagaagcgaagagctgggaaattcttcctttatgtccaagattacaaggaagatgaccgaagtactcataagggttatgaccttactaaactaacgacaaaagaactcatatcaaaatatggtttggatgataacacgatagacttcattggacatgcagtggctcttcatagagatgatagctatttgacagaacctgcaattgacactgtaaagcggatgaagctttatgcagaatcagtggctcgctttcaaggaggatcaccatatatttatcccttgtatggtttaggagagctgccacagggttttgcaagacttagtgctgtctatggtgggacctatatgttgagtaagccagagtgcaaggtagaatttgatagtgaaggcaaagtttgtggtgttacatcagagggggagactgcaaaatgcaaaaaggttgtctgtgatccttcctacctacctaacaaggttaaaaaagttggaaaagtttttcgggcaattgctatcatgagccatcccatcccaaatactgctgaatctcactcagtacagatcatattaccacagaagcaacttggtcgcagatcagacatgtatgttttctgttgctcctattctcataatgtcgcatcaaaaggcaaatacatcgcattcgtgtcagcacaagcagagactgataatccagagaaggagctaaagcctgggatcgatcttcttgggacagtagatgagttatttatcgacacatatgacagatatgaacctagcaatgactcatcagcagacaattgtttcatctcaacaagttatgatgccacaacacactttgagtccactgttatggatgtactttccctttacacaaagatcaccggaaagactgttgatctcagcgtggatctaagcgctgcaagtgctgctgatgatgatctctga

SEQ ID NO: 1344 - protein, 446 aa, Sorghum bicolor
MDVEYDVIVLGTGLKECILSGLLSVDRLKVLHMDRNDYYGGDSTSLNLNQLWKRFKGEQTPPAHIGASRDYNVDMVPKFMMANGALVRVLIHTGVTKYMSFKAVDGSYVFNKGKIHKVPSNDMEALKSPLMGLFEKRRAGKFFLYVQDYKEDDRSTHKGYDLTKLTTKELISKYGLDDNTIDFIGHAVALHRDDSYLTEPAIDTVKRMKLYAESVARFQGGSPYIYPLYGLGELPQGFARLSAVYGGTYMLSKPECKVEFDSEGKVCGVTSEGETAKCKKVVCDPSYLPNKVKKVGKVFRAIAIMSHPIPNTAESHSVQIILPQKQLGRRSDMYVFCCSYSHNVASKGKYIAFVSAQAETDNPEKELKPGIDLLGTVDELFIDTYDRYEPSNDSSADNCFISTSYDATTHFESTVMDVLSLYTKITGKTVDLSVDLSAASAADDDL

SEQ ID NO: 1345 - DNA, 510 bp, Sorghum bicolor
atggaggcatcgaagaaattaacgtggttcgcgctcgcgttcaccgtggtggtcgccgctgccggcggtgtcgtctcggcccagaacacggcgcaggattttgtgaacctgcacaactccccgcgcgccgacgtgggcgtcgggagcgtgacctggaacaccacggtggcggcgtacgcgcagagctacgcgaaccagcgcgccggcgactgccggctggtgcactccggcggcccctacggggagaacctcttctggggctcggcgggctacgcctgggcggcgtcggacgccgtgggatcctgggtggcggagaagcagtactacgaccacgccaccaacacctgctccgcgccgtccggccagtcgtgcggccactacacgcaggtggtgtggcgcgcctccacggccatcggctgcgcccgcgtcgtctgcagcaacaacgccggcgtcttcatcgtctgcaattattacccgcccggcaacgtcattggacagagcccttactag

SEQ ID NO: 1346 - protein, 169 aa, Sorghum bicolor
MEASKKLTWFALAFTVVVAAAGGVVSAQNTAQDFVNLHNSPRADVGVGSVTWNTTVAAYAQSYANQRAGDCRLVHSGGPYGENLFWGSAGYAWAASDAVGSWVAEKQYYDHATNTCSAPSGQSCGHYTQVVWRASTAIGCARVVCSNNAGVFIVCNYYPPGNVIGQSPY

SEQ ID NO: 1347 - DNA, 747 bp, Sorghum bicolor
atggagctggaaagaagggcggccaaggcagaggacgaggtgaaacagaaagaggaggaggtgaggcagaaagaggagcttatctccactctgcaacgacaggttgtgcactacgaatcccggctctcggaatgcgaggtcaggatgaagtctgtggaggaggagctgcagaggcagatcacttcgttacagatggctcagaccgctgggggaaggagagatggatcgacgaggcacggccaggaagaatcatctcgcggaagccttccgccgtcgtctcagccgtcatcggcgaggcaccagcagcgcggttccgagcctgccgccgtcgccgtcgtcgagttcgacgctgccgaggagacgacgacactggaggagccggtaaaccagcaactggccagggagatccagacggagacggaggcgtctgagcacaccgcgcgcgcggtggtcgaggtggttgggccgccgtctcctagcagcgccaagtcggtggaggagctcaagacgctgaagcggcagttcgccgcgtggaagaaggagtacgaggcgcggctgaagaaggccaaggccgagctcaagaggctcgcccaagccgagaagaagggcggcggcggcgacggacacgcgcaccagcggcggtgcgggtggtggaggttcaaagcgcccaagtgctgccgggcgcccaagtgctgtagcttcaagctgccgagccccaaatcgtgctgctgctgcttccgccgttga

SEQ ID NO: 1348 - protein, 248 aa, Sorghum bicolor
MELERRAAKAEDEVKQKEEEVRQKEELISTLQRQVVHYESRLSECEVRMKSVEEELQRQITSLQMAQTAGGRRDGSTRHGQEESSRGSLPPSSQPSSARHQQRGSEPAAVAVVEFDAAEETTTLEEPVNQQLAREIQTETEASEHTARAVVEVVGPPSPSSAKSVEELKTLKRQFAAWKKEYEARLKKAKAELKRLAQAEKKGGGGDGHAHQRRCGWWRFKAPKCCRAPKCCSFKLPSPKSCCCCFRR

SEQ ID NO: 1349 - DNA, 1248 bp, Sorghum bicolor
atgagcacccaccagggatggttgctacaatctgggcatagcgttgttgatatcagtggttcaaagatggttctccatataacccacagggcgttcagttttcgatgctttgctgccaatgggcgtggctttggtgcagattctactaataagagaaaaattaaaagcaagaagaggccaaaagatgttgcgctggagccgagtgaggtaatatctggaaatccaaagaacagggagcaatgggtgccagaattaagaagtggaagtgaaaacaaatctggtaaacaagtcatggataagaaatttttggaaaaagtggaagcagttcgaaggtctgctcttgagaaaaagaaagctgaagagaacaaagattatcaagctattgattatgatgctccaattgagtcagataaaagtacaattggctttggtactaaggttggaattggcgttgctgttgttgtctttggactagtcttcgcttttggggatttccttccttacggaagtgttagccctagcaaagaaagtgcagtagttaaacaaaagctttctcaagaggaagaagaaaaatttaagaatgcactgcaaggctttcaagcaacactgagtaagtcgcctaatgatcctaccgctcttgagggtgcagcagtatcgctggttgaactaggtgagtatgagaaggcatcaacgttccttgagaagctaattaaggtaatccctgataaagcagaagcataccgtttgcttggtgaagtaaaatttgagctcaaggattacgaagggagttcatcgtcatacagaagcgctttatcttcatcagataatattgattttgaagttctccgtgggctgacaaattcattacttgctgctaagaagccagatcaggcagttgatataattctgttatgccgtcaaaagttgaatgaaaagagtcaaacaggactagtggatttggaggctgcaaatgacaatgatcgccagaagcctcaagatattgacccgatccaagttgacctgcttttagggaaggcttattctgattggggccatatcagtgatgctatctccgtctacgatacactaataactgaacatcctgaagacttccgtggttacttagcaaagggaatcatattaaaggaaaatggtaaagcaggtgatgcagaaagaatgtttattcaggcaaaattctttgccccagaggcagcaaaggcactagttgatcgctatgcacaaagatag

SEQ ID NO: 1350 - protein, 415 aa, Sorghum bicolor
MSTHQGWLLQSGHSVVDISGSKMVLHITHRAFSFRCFAANGRGFGADSTNKRKIKSKKRPKDVALEPSEVISGNPKNREQWVPELRSGSENKSGKQVMDKKFLEKVEAVRRSALEKKKAEENKDYQAIDYDAPIESDKSTIGFGTKVGIGVAVVVFGLVFAFGDFLPYGSVSPSKESAVVKQKLSQEEEEKFKNALQGFQATLSKSPNDPTALEGAAVSLVELGEYEKASTFLEKLIKVIPDKAEAYRLLGEVKFELKDYEGSSSSYRSALSSSDNIDFEVLRGLTNSLLAAKKPDQAVDIILLCRQKLNEKSQTGLVDLEAANDNDRQKPQDIDPIQVDLLLGKAYSDWGHISDAISVYDTLITEHPEDFRGYLAKGIILKENGKAGDAERMFIQAKFFAPEAAKALVDRYAQR

SEQ ID NO: 1351 - DNA, 375 bp, Sorghum bicolor
atggcgggcaccaccaggaggagcaggaagtcctcgtcgtcgagctcatcggcgcagcagcagctggctgccggcgcgctgcttgtggccgttgtcgtgttggtggcggcgtcgtcgtcgggcgtgctggtggcggtggaggcggtgtgcgacatgagcaacgagcagttcatgtcgtgccagccggcggcggcgaagacgacggacccgccggcggcgccgtcgcaggcgtgctgcgaggcgctggcgggcgcggacctcaagtgcctgtgcggctacaaggactcgccgtggatgagcgtgtacaacatcgaccccaagcgcgccatggagctccccgccaagtgcggcctcgccacgccacccaactgctag

SEQ ID NO: 1352 - protein, 124 aa, Sorghum bicolor
MAGTTRRSRKSSSSSSSAQQQLAAGALLVAVVVLVAASSSGVLVAVEAVCDMSNEQFMSCQPAAAKTTDPPAAPSQACCEALAGADLKCLCGYKDSPWMSVYNIDPKRAMELPAKCGLATPPNC

SEQ ID NO: 1353 - DNA, 894 bp, Sorghum bicolor
atggcaaccagatcatcgctggtgccactgctgctcattgcagtagctgttgcacagattgttgggtcacaagctggcagcatttccatatactgggggcagaatggtggcgagggcacactggctgacacctgcgccagcggcaactacaagattgtcaacttggcattccttgtaacatttggcaatggccagactccagagctcaacctagcaggccactgtgatcccacaagtggtggctgcgcaagccaaagcgacgacatcaagtcatgccagagcaatggcgttaaggtcatgctctcgattggtggagcttccggtagctactaccttacctcagccgcggatgccaagactgttgccacatacttgtggaacaatttcttaggggggcactcatcttctcgccccttgggcgatgcggtcctcgatggcatagactttgacatcgagggcggcaccacccaacactgggatgatcttgcaagatacttgaaagggtacagcaactctggcaggagggtgtacctgactgctgcacctcagtgccagtttcctgatgcctatgtcggtgatgcgctcaacactggtttgtttgactacgtctgggtgcagttctacaacaaccctctttgccagtacagctcaggcagcaccactgatcttgctgatgcatggaagcagtggctgtcaattccggcgaagcaggtctttcttggcctcccagcttcgcctgaggcagctgggagtggttttataccagctgatgacctcaagtctcaggtgcttccattgatcaagagctcagggaaatatggagggatcatgctgtggtccaagtactatgatgaccaggatgactacagctcttcagtcaagagcgatgtttag

SEQ ID NO: 1354 - protein, 297 aa, Sorghum bicolor
MATRSSLVPLLLIAVAVAQIVGSQAGSISIYWGQNGGEGTLADTCASGNYKIVNLAFLVTFGNGQTPELNLAGHCDPTSGGCASQSDDIKSCQSNGVKVMLSIGGASGSYYLTSAADAKTVATYLWNNFLGGHSSSRPLGDAVLDGIDFDIEGGTTQHWDDLARYLKGYSNSGRRVYLTAAPQCQFPDAYVGDALNTGLFDYVWVQFYNNPLCQYSSGSTTDLADAWKQWLSIPAKQVFLGLPASPEAAGSGFIPADDLKSQVLPLIKSSGKYGGIMLWSKYYDDQDDYSSSVKSDV

SEQ ID NO: 1355 - DNA, 624 bp, Sorghum bicolor
atgtctagggcaccggatgagtgtccagaccccaaaaggatcccgtcatctgttttccggaggtcaaaatcgaaatcaccaacagactggagtgtgacatcaaatgaatctctctttagcatcaatgttgggaatgcgagcttctcgaaggatcatttcttcttgtatggcaaatcaggtgaactaggcaaccctaatgacccattggcgccactgccgccgttgccaaggctgagcactagctctagcccaatgaaaagtgaggtggcaactgtacaggacggtgctaaagtgaagcctgctaccagggttgggggcgatggtgatgacaataatgagtataacaacagcttgtcacaccgattggcaggtgaagtgaggtctagtgaatccctgaaaggcgatgctcctgagcttgcccggcaaagcacatcgcagctatcacagcaggcagagcctcttgttgagcaggaagcaccgaaagttgaagacaaggcactggaagctgagcaagccccggccctggccacagcaccagaacaaacaccggcaccagcaccagaatcaacaccacaaccaccagccgcgacaaaatggtttccttgctgttcttgttgttgctga

SEQ ID NO: 1356 - protein, 207 aa, Sorghum bicolor
MSRAPDECPDPKRIPSSVFRRSKSKSPTDWSVTSNESLFSINVGNASFSKDHFFLYGKSGELGNPNDPLAPLPPLPRLSTSSSPMKSEVATVQDGAKVKPATRVGGDGDDNNEYNNSLSHRLAGEVRSSESLKGDAPELARQSTSQLSQQAEPLVEQEAPKVEDKALEAEQAPALATAPEQTPAPAPESTPQPPAATKWFPCCSCCC

SEQ ID NO: 1357 - DNA, 999 bp, Sorghum bicolor
atggcctccgacgcgaggctctccttaccgtgccgcctgccctcgctcctccctccgccggtgctgctgcgccggttgccccgcgccgccgccgccgcggcggcgtcaacctccccgcggtgccgcgtcgccagtacggcggcggcggcgcctgcccgcgcccgcggccggttccggcctcgcgcctccgaggttgaagggcagggcccggtgcagcagcagcagcaggtggaagatgaggtggtggacagcaacgtgctccagtactgcagcatcgaccgcaagaagaagaagaccatcggggagatggagcaggagtttctccaggcgctgcaggccttctattacgaccagaaggcgatcatgtccaacgaggagttcgataacctcaaggaggagctcatgtgggaaggaagcagcgttgtgatgttaagcgcagatgagcaaaagcttttggaagcctccatggcatatgtctctggcaaccccatcatgacggatcaagaattcgatgaactaaagctgagacttaagaaagaaggaagtgacattgtaacggaaggtccaagatgcagtctacggagtcgaaaggtctacagtgacttgactgttgactacttcaagatgttgctgctatatgttccagcagctgtggtagctctgacactattcttcttcttggatgatttgacgggatttgaaatcacacttcttcttgagttgccagagcctttcagtttcatcttcacatggtttgctgcactgcctttaatattttgggtagcacaggcattcaccaatgtcatagtgaaagactttctgattttgaagggcccatgtccaaactgtgggactgaaaatctttccttcttcgggaccattttatcagtgtctagcggtggttcaacaaacagtgtgaaatgtgcaagttgtggcactgtcttggagtatgactctgcatcccgattgattacactcccagaaccggctgaggcataa

SEQ ID NO: 1358 - protein, 332 aa, Sorghum bicolor
MASDARLSLPCRLPSLLPPPVLLRRLPRAAAAAAASTSPRCRVASTAAAAPARARGRFRPRASEVEGQGPVQQQQQVEDEVVDSNVLQYCSIDRKKKKTIGEMEQEFLQALQAFYYDQKAIMSNEEFDNLKEELMWEGSSVVMLSADEQKLLEASMAYVSGNPIMTDQEFDELKLRLKKEGSDIVTEGPRCSLRSRKVYSDLTVDYFKMLLLYVPAAVVALTLFFFLDDLTGFEITLLLELPEPFSFIFTWFAALPLIFWVAQAFTNVIVKDFLILKGPCPNCGTENLSFFGTILSVSSGGSTNSVKCASCGTVLEYDSASRLITLPEPAEA

SEQ ID NO: 1359 - DNA, 501 bp, Sorghum bicolor
atgggcgtcgtctcggcagcggcggacgcgcttgtcgcggttttctccctgaccatcgccgtcgcggcgccgctgatcgacgcgcagtccgtcctcccgcacaccctctacccggcgccgctcctggaactcaagcgctggtacgccgccgagttcggcgactacctcgtcgcccagccccccgccttcttccgcggcctcgtctgcctcgagctctccttccagtggccgctcgccgtcgccacgctctacggcatcctcacccgccgccgctgggccgccacaacctccctcatggccggcgtcgctaccctcacatccatgtctgcagttcttggtgagattttgggttcaggcaaagcaacaccaaagttacttcagatgtatgctccttttgccgtttttgctgtcattgccattctacgtggactttgctcatgctctgggcgcactactgctggttcatcccttgggccttctgcccggaagaagagggtctag

SEQ ID NO: 1360 - protein, 166 aa, Sorghum bicolor
MGVVSAAADALVAVFSLTIAVAAPLIDAQSVLPHTLYPAPLLELKRWYAAEFGDYLVAQPPAFFRGLVCLELSFQWPLAVATLYGILTRRRWAATTSLMAGVATLTSMSAVLGEILGSGKATPKLLQMYAPFAVFAVIAILRGLCSCSGRTTAGSSLGPSARKKRV

SEQ ID NO: 1361 - DNA, 3426 bp, Sorghum bicolor
atggagtgcaacaaggaggaagcttcaagagctaaggatttagctgtggtaaagctgcaagaagcagactatgctggtgctaaaaggattgccctcaaggctcaaaagcttttccctggccttgaaaatatttctcagctgttaactgtctgtgaagttcacatctgtgctgctgttaagatcaatggggagactgactggtatggtatccttcaagtagaaacaactgcagatgacatgttactcaagaaacaataccgcaaacttgctctcttactccatcctgataagaacaagtttgtgggtgctgaagctgcctttaagctaattggagaagctcacatgatactgacagataaagtaaaccgttcgcgtcatgactcaaaaaggaactcatttattccaaaatctgcaccaaagaagcgtggacgaccatcaaacaaaactgactatgttgctaagagggccaataaggagaacactgatgctggacattcaactttctggaccatttgcttgacttgtggaaccaaataccagtatccatatagtttgttgatgaaagttctctggtgccagatctgctcaaagggtttccttgcttatgatttgtctaagaaaccttctgtcggagtggaagcatcaaatccatggagtggatttcggatgcaacaccaaatgttccccccaaatcaatggacacactttgccaaccaacaacacaattaccagagtgtccctactcagcaaaatcctatcactggtcatcaagctcctgtccccaaccagcaacaacctcagaatgtctctggtcagcaaactccagacattaaccagcaacaacgatcacagaaattccctttcagttcagagccaaagaatgtggtaaactctcatccacggggtggatctggtatgcaacaggaaatgtgtcctccgaatgaacccacacatgtatctgaccaaaaactctactatcaaagggcccctggtcagcaaaaccctgtcaatggtaatcaaactcctgtcactgaccatcaacagcaatctctgaaagttggggataagaatacttctgtcactacccagcaacaatctaccaaaccccctttcagttcaggatcaaagaatgtagtgagttctcaaggggcagattttctgaacaataatgcaactgcaaatagtaaccttacagctgaagctggggcttgtagtagagaaaagattacaaaaaaaccatcattcagtgttgaaaatggtgaagatagaactaaatcaccagctgagagttctgataaagttcatctagtaaatgagcaaatgaaaggaaatgaggtagctacaggatccagtcatgccataaatggtagccaggttgctacgaaagatgttcttactgccacaagtgcagataaaacactcgggcagcatccttgtacagcaaggcagcagagaaataatgtaattgttgaagatgggtctgatgggtgtggaaaggttagtgatcatcttcctgattctcctggaaagaaaaggataagaaaagaacattcttcctatactggtggcaaaagtgaccatacaacagaaaatgaagttgctgaagcaaacagccaacacaaatatagtattccaagcaaagagaagatgacaaatcaaaaagaagaaatgatcagtggcttaaatgacaatgtgttgcaaggaacaaaaagaaaacaacaatctacaagttctggaattggaagcgatgctgctgctagatctgtgaacaatagttgtcccagcaacgctacagtttcatgtccagattcagacttctacgactttgagaaaaacagggatgcagatcgattcacagttgatcagatatgggcaatttatgatgatcttgatggcatgccaagatactatgctcgaattaagcaggtttactctccaaactttatgttgcagtacacatggctagagcatgatcctttgtgtgatgctgagaaggaatggtcttctaaggagctgcctgttgcttgtggaaatttcagacttggaaccacactcttgactgaagatatcaagatgttttctcatgttgtttcttggacaaaaggaaggaagaggaacagatatgagatttatcctaagaaaggtgaagtttgggcacttttcaggggatgggacatcaagtggagttcagattccgatgatcataggcattatgattatgatattgttgaaatcacctcagactttgctacgggtttaggcacttatgtggttcccttggtaaagattaaaggttttgtcagcttatttgttcgatcaagcatcgaagcaccatttctgatacctagtggcaacacccttagtttctcgcacagcatcccttttcacaggttggcagaaactgagaggaaacacatcccaaatggtgctcttgagctggatactgcatcactaccttctgatttggacaaagcgtttactcctgtgaaccttgacagcagttttatgagcaccggagatggtaacactacatgtaacgtttcatctactagatcttgtaaagtgccagttggaaagaccgaacagagtcaggatggtactggtacagatgtgaaggatgaagttgagaaattgaatcagaatacaaagattgaacaagataatggctcagaggcttcagtgattgatcattgtggtgatgggtggaatgatagctctccaccagaatcaccgactagcttttgttaccctgatacagagttttgcaacttcactagtttcagatcatttgacaaattcaagaaagggcaagtttgggcactgtattgtgatactgacaagttcccaaagtactatggtttaataaagagcgtcgattcagaagactgcagaattcgcataaagtggcttgagcactgtccatgtgaacaagtggagaagcgcttggcacaagacggtttgtctattggctgtggaatatttgaagtcagcaggcaaagtgaaatctatgattgtacagaagtcttctctcacaatatggaggtgatgctgacgggtaaagggaaaaaatatgaaatccttccttgtactggccaggtatgggctatatacaaggactggagcagtgcatggagctttgaagattacagtagatgtgaatattttctggtcgaggtcatggagatttctaatgttaatataacagtgtcctgtcttacaaaagtggatggctttagcacagtattcatgccagagcagaaaggtgaatccaggagttccatgagaatagcaaggagtgacttgattatgttttctcatcaggttcctgccttccgcttgacaaatgaaaatgactatctttgtggttactgggaacttgatcctgcatcactaccagaagttttactggtcagaaaaaccaagtga

SEQ ID NO: 1362 - protein, 1141 aa, Sorghum bicolor
MECNKEEASRAKDLAVVKLQEADYAGAKRIALKAQKLFPGLENISQLLTVCEVHICAAVKINGETDWYGILQVETTADDMLLKKQYRKLALLLHPDKNKFVGAEAAFKLIGEAHMILTDKVNRSRHDSKRNSFIPKSAPKKRGRPSNKTDYVAKRANKENTDAGHSTFWTICLTCGTKYQYPYSLLMKVLWCQICSKGFLAYDLSKKPSVGVEASNPWSGFRMQHQMFPPNQWTHFANQQHNYQSVPTQQNPITGHQAPVPNQQQPQNVSGQQTPDINQQQRSQKFPFSSEPKNVVNSHPRGGSGMQQEMCPPNEPTHVSDQKLYYQRAPGQQNPVNGNQTPVTDHQQQSLKVGDKNTSVTTQQQSTKPPFSSGSKNVVSSQGADFLNNNATANSNLTAEAGACSREKITKKPSFSVENGEDRTKSPAESSDKVHLVNEQMKGNEVATGSSHAINGSQVATKDVLTATSADKTLGQHPCTARQQRNNVIVEDGSDGCGKVSDHLPDSPGKKRIRKEHSSYTGGKSDHTTENEVAEANSQHKYSIPSKEKMTNQKEEMISGLNDNVLQGTKRKQQSTSSGIGSDAAARSVNNSCPSNATVSCPDSDFYDFEKNRDADRFTVDQIWAIYDDLDGMPRYYARIKQVYSPNFMLQYTWLEHDPLCDAEKEWSSKELPVACGNFRLGTTLLTEDIKMFSHVVSWTKGRKRNRYEIYPKKGEVWALFRGWDIKWSSDSDDHRHYDYDIVEITSDFATGLGTYVVPLVKIKGFVSLFVRSSIEAPFLIPSGNTLSFSHSIPFHRLAETERKHIPNGALELDTASLPSDLDKAFTPVNLDSSFMSTGDGNTTCNVSSTRSCKVPVGKTEQSQDGTGTDVKDEVEKLNQNTKIEQDNGSEASVIDHCGDGWNDSSPPESPTSFCYPDTEFCNFTSFRSFDKFKKGQVWALYCDTDKFPKYYGLIKSVDSEDCRIRIKWLEHCPCEQVEKRLAQDGLSIGCGIFEVSRQSEIYDCTEVFSHNMEVMLTGKGKKYEILPCTGQVWAIYKDWSSAWSFEDYSRCEYFLVEVMEISNVNITVSCLTKVDGFSTVFMPEQKGESRSSMRIARSDLIMFSHQVPAFRLTNENDYLCGYWELDPASLPEVLLVRKTK

SEQ ID NO: 1363 - DNA, 1824 bp, Sorghum bicolor
atggctgcaatgatgggttcaatatctgcctatggttcttaccaaacaaataggcccagtgcactaaagcaggcacctcacatgcagttccaacaatgttgtagcagtggagttgggttcttaagcaagcactcacaatccatgcgaagtaagacacagctggctaaaagaagagctacaaataatggaattcatccaaagactactaggccccgggcacctattgtctgttctactggaatggctataatttttgttgcaactgaagtgcacccatggtgcaaaactggtggcctcggtgatgttgtaggaggactgcccccagctttggctgctatgggacaccgtgtcatgacaatagctcctcgttatgatcaatacaaggatgcatgggatacaagtgtccttgttgaggtaaatattggtgacacagtagaaactgttcgattcttccactgctacaaaagaggagtcgatcgtgtttttgttgatcatcctatgtttcttgaaaaggtatggggcaagactggagcaaaattgtatggtcctactactggaactgactatcgagataaccagttgaggttctgtcttttgtgccttgctgcattggaggctccaagagttctcaatctcaacagtgaacatttctccggaccatatggggaagatgttgtctttgtagcgaatgattggcacactgctgttctgccatgctatctgaagagcatgtataagccaaatggaatttatgctaatgctaaggttgctttctgcattcataatattgcctatcaaggtagatttgccagagcagacttcgaacttcttaatctacctgacagtttcttgccatcatttgattttattgatggatatgttaagcctgttgtagggagaaagattaactggatgaaggcagggatcattgagagtgatctggttctaacagttagtccacattatgtaaaagaactcacttctggcccagaaaaaggtgttgagttggatggtgtccttcgcacaaagcctcttgaaactggaattgtaaatggcatggatgtttatgaatgggatcctgcaactgataagcacatcagtgtgaaatatgatgcaacaacggcacctgaagcaagacctctcaataaagaaagattgcaagctgaagttggattgcctgtggactcgagcatccccgttataatttttgttggccgtcttgaagaacagaaaggatctgacatactcattgcagccattccagaatttgtgggcgagaatgttcagataattgttcttggcacaggaaagaagaagatggaggaggaattgacgcagctggaagtgaaatatccaaacaatgctagaggcatagcgaaattcaatgttccattggcacatatgatgtttgctggcgcggacttcattattgtcccaagtaggtttgagccctgtggtctcattcagttgcaagggatgagatatggagtgatccccatctgttcatcaactggaggacttgttgacacggttaaggagggtgtcaccggattccacatgggttctttcagtgtcgagtgtgaaactgtagacccagctgatgtcacagcagtagcgtcaactgtcacacgagccctgaaacagtatgacacctcggcattccatgagatggtgcagaactgcatggcgcaagacctgtcctggaagggacctgcaaagaagtgggaggaagtgcttcttggcctcggagtcgagggaagtcaggctggcatcgatggcgaggagattgctccacttgccaaggaaaacgtagctactccctga

SEQ ID NO: 1364 - protein, 607 aa, Sorghum bicolor
MAAMMGSISAYGSYQTNRPSALKQAPHMQFQQCCSSGVGFLSKHSQSMRSKTQLAKRRATNNGIHPKTTRPRAPIVCSTGMAIIFVATEVHPWCKTGGLGDVVGGLPPALAAMGHRVMTIAPRYDQYKDAWDTSVLVEVNIGDTVETVRFFHCYKRGVDRVFVDHPMFLEKVWGKTGAKLYGPTTGTDYRDNQLRFCLLCLAALEAPRVLNLNSEHFSGPYGEDVVFVANDWHTAVLPCYLKSMYKPNGIYANAKVAFCIHNIAYQGRFARADFELLNLPDSFLPSFDFIDGYVKPVVGRKINWMKAGIIESDLVLTVSPHYVKELTSGPEKGVELDGVLRTKPLETGIVNGMDVYEWDPATDKHISVKYDATTAPEARPLNKERLQAEVGLPVDSSIPVIIFVGRLEEQKGSDILIAAIPEFVGENVQIIVLGTGKKKMEEELTQLEVKYPNNARGIAKFNVPLAHMMFAGADFIIVPSRFEPCGLIQLQGMRYGVIPICSSTGGLVDTVKEGVTGFHMGSFSVECETVDPADVTAVASTVTRALKQYDTSAFHEMVQNCMAQDLSWKGPAKKWEEVLLGLGVEGSQAGIDGEEIAPLAKENVATP

SEQ ID NO: 1365 - DNA, 342 bp, Sorghum bicolor
atggccagcaccaacatggcgtcggccacctcgcggttcatgctggccgctggcgtgcccaccgccggcagcggcagcggcagcagcggccgcgtcagcttcgcgccggcgcccaaccagctgggcaggaggctcgtggtccgggctgacccggaagctccggctgaaccggcggaaggggagggcgccgtggccaccaagcccaaggccgagaagccgccgccgatcgggcccaagaggggcaccaaggtgaagatcctgaggagggagtcctactggtacaacgggatcggcaacgtcgtcaccgtcgatcaggttaactaccagctcactctccgctag

SEQ ID NO: 1366 - protein, 113 aa, Sorghum bicolor
MASTNMASATSRFMLAAGVPTAGSGSGSSGRVSFAPAPNQLGRRLVVRADPEAPAEPAEGEGAVATKPKAEKPPPIGPKRGTKVKILRRESYWYNGIGNVVTVDQVNYQLTLR

SEQ ID NO: 1367 - DNA, 1065 bp, Sorghum bicolor
atggcgacggagtgcgctgccgccgcggccgatctggccaccggccgtccccgcaagcgggcgaggtttggctgggacgtggcgccagctgccgaggctcagataggaacattttgtgggcaagaagttggtgatgtggccagcctgctattatcagcaaatccttccgaccatacttgttcgtctctgctcccgaagggtgtggctcgaaatgcttcccctccctggagagaagacgacaaagatggccattacgtatttgctgttggagagaatttgacctctcgctacaagatatacagaaaaatgggtgaaggtacttttggtcaagtactggaatgctgggaccgagaaagcaaagagatggtggctattaaaattgttcgctctgtaaagaaatacagtgatgcagcaatgatagagattgatgtcctgcagaagcttgcaagaaatgatgctgcaggaaaacactgtgttcaaatacggaactggtttgactatcgtagccatatttgtattctaattcatactgatctgaaaccagagaacatcctccttgtttcttcagattatgtcaagttacctgatcccaaggatggatcattctcaaggaaactgccaaaatcaagtgccgttaagttgattgactttggaagcgcagcatatcatcaccaggatcgcagttacattgtatctaccaggcactatcgagcccctgaagttattttggggcatgggtggagctatccgtgtgatatctggagtgttggttgtatacttgttgagctttgctcgtcgtttgccttctgtaaactcagccagcatgcagagaagtacgtcagaagaggaagattgaactggccagaaggagcagcaacaaaagagagcattagagctgttctcaaactgcctcgccttcagaacctggtgatgcagcatgtggatcactctgctggggacttcattgaccttctgaagcgcctcctagcctatgagccctcgaaaatgaaaggagcagcacgcatcgagatggcgggtccggccaactcgccgccgtgccactag

SEQ ID NO: 1368 - protein, 354 aa, Sorghum bicolor
MATECAAAAADLATGRPRKRARFGWDVAPAAEAQIGTFCGQEVGDVASLLLSANPSDHTCSSLLPKGVARNASPPWREDDKDGHYVFAVGENLTSRYKIYRKMGEGTFGQVLECWDRESKEMVAIKIVRSVKKYSDAAMIEIDVLQKLARNDAAGKHCVQIRNWFDYRSHICILIHTDLKPENILLVSSDYVKLPDPKDGSFSRKLPKSSAVKLIDFGSAAYHHQDRSYIVSTRHYRAPEVILGHGWSYPCDIWSVGCILVELCSSFAFCKLSQHAEKYVRRGRLNWPEGAATKESIRAVLKLPRLQNLVMQHVDHSAGDFIDLLKRLLAYEPSKMKGAARIEMAGPANSPPCH

SEQ ID NO: 1369 - DNA, 867 bp, Sorghum bicolor
atgggcgccggcctcctcctcggcgacgccgccagcctgggggcctaccacgccctacgccgccggaggacgcacctctaccgtcgcaactggggctccaagcccctgccgcgcccgccggtctggctcggcgcggccgctcgtgtttcacggaatcgcgacgaccgccgtggccacgtgcccaggttcgccgcctccgcctcgggcggccgtgacgagcccggggagctagccgaggacgaggcgcagaggaagagggagcgggaggcggagctgaatcgccgactgaaggaggccgaggtggcgaaggagcaggcggaaaggagggagacggcgaagcaaatgtttgaattggggcaaagggcctacgggaaaggaatgtatggacgctcaattgaattcttggaggctgcactcactatcatacgtccctcctctctcctcggtggcgagatccaaatttggcttgcaatggcatatgaagccaataggaggcacaaggattgcattgcattgtacaaagagttggagagtacccaccctatgatcaacatcagacggcaggcagctgaacttagatacattttagaggcacccaagttgaagatatcaaacgacgaggtggtcacaataccacaaattgggagcagctgggattggtatgctggaacatggagcgacaaaatcaaggaacaagaggacaagaaaagaaagatgattgctgctagcaaccaagttcaaccttctccaaacatctttggagacttctctttcttgcgactgccaagtgaatggaagaagagtgcatgggtgattgttactttgtgggtccttttgattggaacagcaatctatctgcaaacatga

SEQ ID NO: 1370 - protein, 288 aa, Sorghum bicolor
MGAGLLLGDAASLGAYHALRRRRTHLYRRNWGSKPLPRPPVWLGAAARVSRNRDDRRGHVPRFAASASGGRDEPGELAEDEAQRKREREAELNRRLKEAEVAKEQAERRETAKQMFELGQRAYGKGMYGRSIEFLEAALTIIRPSSLLGGEIQIWLAMAYEANRRHKDCIALYKELESTHPMINIRRQAAELRYILEAPKLKISNDEVVTIPQIGSSWDWYAGTWSDKIKEQEDKKRKMIAASNQVQPSPNIFGDFSFLRLPSEWKKSAWVIVTLWVLLIGTAIYLQT

SEQ ID NO: 1371 - DNA, 783 bp, Sorghum bicolor
atgcgccgccgtcgtcgcggtagacctgcaccatcggggagcgcccacggcgtccgcgacggcactctggggatggcgacacgtgacgacggcgctccgggctggagcggcggccgcggccaccgcagcctgagcagcggctgctgcctttgccgcggcgagacgagcctcagggctgccgggatcgacagccttgccgtccctccttggcgagccatcgctcttgcccccggcggccgcggcggccagacgcgctctcttggcagagttggaagacatggagaaggcggtggctgggttgtattacaagatggcaggtcggagcgtctgactgtttgcgctggtccaaataccgcttctgttcaagatgctttgacagagtaccgtgtgattgagtcttgtcctcaagaattattccctcggactgggaggaagcatcaggttctgggaacaccaattgttggggattacaagtacggacggcaagcgcaccagaactggacgcctcttcccatgccgcaaacaatcaatgaggaaatgctcaagaaaaggaagcttccctttgggcttgctttgggcggtggaagcgtagctgagcagcagccacagctgcatctacactgcaagcagatgatccttcctgacatctcagcagctatgcagcagctgcagtcttcagatgctgaccacaatttctctgatctggagaagctgagctttgtcgccccattgccattgcacatgcagttgagctggaggattctgatgtccataggcaagtaa

SEQ ID NO: 1372 - protein, 260 aa, Sorghum bicolor
MRRRRRGRPAPSGSAHGVRDGTLGMATRDDGAPGWSGGRGHRSLSSGCCLCRGETSLRAAGIDSLAVPPWRAIALAPGGRGGQTRSLGRVGRHGEGGGWVVLQDGRSERLTVCAGPNTASVQDALTEYRVIESCPQELFPRTGRKHQVLGTPIVGDYKYGRQAHQNWTPLPMPQTINEEMLKKRKLPFGLALGGGSVAEQQPQLHLHCKQMILPDISAAMQQLQSSDADHNFSDLEKLSFVAPLPLHMQLSWRILMSIGK

SEQ ID NO: 1373 - DNA, 1125 bp, Sorghum bicolor
atgggagcatatgcgacgactggtatgcagatgatggcaacgcgcccttgcatcccagcctgcaggcaaatgcttgggccgacatcagcactgtctgcatttggaagggcaatttgtaccagaactggttttgctagctcttctaaagccacatcagcaggaccactggtttctttaaatcgcaagagggttgttgtgagggcaatgtcgcagagaggtgcccaaggacttcccattgatctcacaggtaaaagagcatttattgctggagttgctgatgataatggttatggttgggcaatttctaaggctcttgctgctgctggtgctgagattcttgtcggtacatgggtgcctgcgctgaacatatttgagacaagcttgagacgtggaaagtttgatgaatcacggaagctacctgatggatctcttatggaaattgctaaagtatatccactggacgcagtttatgacacccctgaggatgttcctgaagatgttaaagcaaacaaaagatatgctggagcttcaaactggactgttaaggaagttgctgagactgtaaagaatgattttggtagcattgacatccttgtacactctcttgccaatggtcctgaggtaacaaaaccactgctggagacatcaaggagaggataccttgctgcaatttcagcatctagttattcttatgtttctttacttcaacacttccttcccataatgaatccaggaggtgctagtatctctttaacttacatagcttctgaaaggataattcctggatatggtggtggtatgagttcagccaaagcagcacttgagagtgatacaagagttcttgcttacgaagcaggtcgaaaaggcaaaatcagagtgaacacaatatcagcaggtccattgggaagccgagcagcaaaagccattggatttatcgagaagatgatagagtattcttatgtcaatgcaccactccagaaggaattattggcagatgaagtggggaacacggcagcattcctcgcgtctcctttggcatcagcaatcactggttcaactatttacgttgacaatgggctcaacacaatgggacttgcacttgacagccctactttatccacatga

SEQ ID NO: 1374 - protein, 374 aa, Sorghum bicolor
MGAYATTGMQMMATRPCIPACRQMLGPTSALSAFGRAICTRTGFASSSKATSAGPLVSLNRKRVVVRAMSQRGAQGLPIDLTGKRAFIAGVADDNGYGWAISKALAAAGAEILVGTWVPALNIFETSLRRGKFDESRKLPDGSLMEIAKVYPLDAVYDTPEDVPEDVKANKRYAGASNWTVKEVAETVKNDFGSIDILVHSLANGPEVTKPLLETSRRGYLAAISASSYSYVSLLQHFLPIMNPGGASISLTYIASERIIPGYGGGMSSAKAALESDTRVLAYEAGRKGKIRVNTISAGPLGSRAAKAIGFIEKMIEYSYVNAPLQKELLADEVGNTAAFLASPLASAITGSTIYVDNGLNTMGLALDSPTLST

SEQ ID NO: 1375 - DNA, 1179 bp, Sorghum bicolor
atgatgatgtcggacgacgacgacgccgagccccagctcaacgcggtggagagctactacttcgttgactccacggacgagaacgaggctgtctgcttctccaacctgcctttcctgttcggggacactgatgatcttcctgactgcaagaagaggctggtgctgcgcgggactggtgacccgggcgtcaaggtgtacaatgtggttgtggcctggagactggggctcgagggaaagcagccccagtttgcggtgctcacagctgaaggtagacgatgggtacgtctcattaggcccttgaagagctacgaggagatgatcaggactctgctgatcacggcgcagatgctgcattttctcaggaggaagcctcatgagccagagaaaaccttgtggaaccacctttgcaaaatgttgaacactgatgcttacagatctgacttgtgcttctgcagcaagtttgatgtcagaccctcagaggacgatttcaggaaccaccgctcactgatgaaggagttcgcggcaaaagatcctgtcttagtaaaatcagagattttgcaagtatttgttgaaggaagatctagaaaaaatttcactgaggttggtgcagaccacatcgatgtcaagcagccgttcatcgctgatgatgaggacatagatgagatgattgtggaagatgccgataatgaatctgatgaagaagaggatgaagatttgtttgattcaatatgtgccatttgtgacaatggaggagacatattatggcacggtcaggcgcggtggtcagggaggacgtggaggggaggggaggggaggggcgggcgcggcggctgggagcctcgccagatgcggctaggcgggtgtggacctcgctggatgcaggcgggcaggcacggccgctctcgccggatgtgggtgggtgtgcgcggcatgtgccggacgcaagagggcacggccctcgccggacgcaggcaagcatgtggcctcgccggatgtgggcaggcgcacagggctgggcgagcatgtggaggttggccggccacggtggcggggaagggtgcgcggtcgcggggctgtcacgtagtgcttggggcggctcgtcagccgctaggcgagtgcacggtggggcagagaggcgagcgtcacaacagaaaagaagaggagatggtcaaaaattag

SEQ ID NO: 1376 - protein, 392 aa, Sorghum bicolor
MMMSDDDDAEPQLNAVESYYFVDSTDENEAVCFSNLPFLFGDTDDLPDCKKRLVLRGTGDPGVKVYNVVVAWRLGLEGKQPQFAVLTAEGRRWVRLIRPLKSYEEMIRTLLITAQMLHFLRRKPHEPEKTLWNHLCKMLNTDAYRSDLCFCSKFDVRPSEDDFRNHRSLMKEFAAKDPVLVKSEILQVFVEGRSRKNFTEVGADHIDVKQPFIADDEDIDEMIVEDADNESDEEEDEDLFDSICAICDNGGDILWHGQARWSGRTWRGGEGRGGRGGWEPRQMRLGGCGPRWMQAGRHGRSRRMWVGVRGMCRTQEGTALAGRRQACGLAGCGQAHRAGRACGGWPATVAGKGARSRGCHVVLGAARQPLGECTVGQRGERHNRKEEEMVKN

SEQ ID NO: 1377 - DNA, 1017 bp, Sorghum bicolor
atggcgaagcagtattacgctacgagcagcctcgtggttgggtacgctctgtgctcgagtctgctctcaatcatcaacaagtatgctgtgacaaagttcggttaccctggcctcctaactgctctacagtacttgacatctgctggtggtgtttggatccttggaaagctcggctttctcacccatgaccccttcaacttggagactgcaaaaaagtttgcaccggctgctcttgtcttctacctagccatattcaccaatacaaatctcctccgccatgccaatgtagatacgttcatagttttcagatccttgaccccgcttttggttgctattgccgacacaactttcaggaagcaaccatgtccatcaaagttcacattcctatcccttgtggtcatcttgggaggagcagttggctatgtgatgacagattcagcattcagcatcacagcatactcatgggcacttgcatatctggtgaccataacaactgaaatggtgtacatcaagcacattgtgacaaacctggggctcaacacctggggctttgtgctttacaacaactttctttccttgatgctggccccgatcttttggttccttacaggggagcacaagtcagtctttgcagcgatggaatcaaggggcgaaggctggtttcacctggatgcctttgtagcagtggcattgtcatgcgtgtttgggttgctcattagtttctttggttttgcagcgagaagagctgtatcagcaaccgcatttaccgtcactggggttgtgaataagttcctcaccgtggctatcaatgtcatgatctgggacaagcatgcaactgcatatggtttggtttgcttactgttcactattgtcggtggagtactctatcagcaatcagttacagtgaaaggaaacagcgcagcgcagcgtgagctggtacccgaacaacctaaggagggcaatgacagcaaagagtttgatgaggagaaacaaagcttagtttcttcagctaaataa

SEQ ID NO: 1378 - protein, 338 aa, Sorghum bicolor
MAKQYYATSSLVVGYALCSSLLSIINKYAVTKFGYPGLLTALQYLTSAGGVWILGKLGFLTHDPFNLETAKKFAPAALVFYLAIFTNTNLLRHANVDTFIVFRSLTPLLVAIADTTFRKQPCPSKFTFLSLVVILGGAVGYVMTDSAFSITAYSWALAYLVTITTEMVYIKHIVTNLGLNTWGFVLYNNFLSLMLAPIFWFLTGEHKSVFAAMESRGEGWFHLDAFVAVALSCVFGLLISFFGFAARRAVSATAFTVTGVVNKFLTVAINVMIWDKHATAYGLVCLLFTIVGGVLYQQSVTVKGNSAAQRELVPEQPKEGNDSKEFDEEKQSLVSSAK

SEQ ID NO: 1379 - DNA, 669 bp, Sorghum bicolor
  misc_feature (598)..(669): n is a, c, g, or t
atgccttccactacgatggatgcaaatgcaatccagaagctctatgaggtctgtaaagtatcattatctgagaaagggcctctatcttctgaatctgtcgacaatgtccgtgctgtattagacatgattaccccggcagatgttggccttgagtgcgaagctgaagctgtgcgtgtttggaggagtccacgggccctgagtaggaaaagagtttttcattccagcccggccatcagataccgtcatatttacgagtgcaaaagcttctcaattggaatattttgcataccagcatcatccatcatcccactccacaaccatcctggaatgactgtactcagcaaaattttatatggcacggcgcatgtcaaatcatatgactggattgacacagctgaatctcttaacttatcaaaagtgagacctgccaaggttgtaagagacggtgaaatgtctgcgccttgtggagcgatggttcttcatccagaaggcggtggcaacatccacgccttgagagccattactccctgcgccatcctggacattttgacgcccccatactcttcagaggatgggaggcactgctcctacttccgtnnnnnnnnnnnnnnnnnnnnnnnnnnnnnnnnnnnnnnnnnnnnnnnnnnnnnnnnnnnnnnnnnnnnnnnn

SEQ ID NO: 1380 - protein, 223 aa, Sorghum bicolor
  misc_feature (200)..(223): Xaa can be any naturally occurring amino acid
MPSTTMDANAIQKLYEVCKVSLSEKGPLSSESVDNVRAVLDMITPADVGLECEAEAVRVWRSPRALSRKRVFHSSPAIRYRHIYECKSFSIGIFCIPASSIIPLHNHPGMTVLSKILYGTAHVKSYDWIDTAESLNLSKVRPAKVVRDGEMSAPCGAMVLHPEGGGNIHALRAITPCAILDILTPPYSSEDGRHCSYFRXXXXXXXXXXXXXXXXXXXXXXXX

SEQ ID NO: 1381 - DNA, 1578 bp, Sorghum bicolor
atggccgaggtgaagcctgaggacatggtgcatcatcagcccatggaccagctccagggcttcgagtactgcatcgactccaatccttcctggggcgaagggattgcgttgggcttccaacactacatactgtccctgggcactgctgtcatgatccccacgttgctggttccgcttatgggtggaaatgatgatgacaaggccaaggtggttcaaacactgctatttgttaccgggatcaagacactgctccagacgctatttggcactcgtcttcccacaatcatgggaggttcgtacgcgtatgtggttccgatcctctccataatccgtgatccctcattcacgcagatagcggatggccatactagattcctgcagactatgagagccatacaaggttcactgattgtatcctcaagcatccaaataattcttggatatagccagttatgggcaatatgttctaggttctttagcccacttgggatggttcccgtggttgcattggtggggcttggccttttcgagagaggattcccagtggttgggaaatgcgtggagattagtcttccaatgcttatcctctttgttgcgctttcccagtatctcaagcacgtgaatattcatcatgttcctgttttggagaggttctcactgctgatgtgcatcgctcttgtatgggtatatgcccacatcctcacagcaagtggtgcatacaagcacacagcacttgtcacccagatcaactgtcggacagaccgtgccaatctcatatcttcatcacaatggataagcattccataccctttacaatggggtgcaccaacattcagtgcagaccatgcattcggtatgatggctgcggtgatggtttctttaatagagaccacgggagcattcaaagctgctgcacgattggctagtgcgacacccccaccagcatatgtcctgagcagaggcattgggtggcagggcattggcaccctactagatggcctgtttggcactgggactggttctactgtttctgttgagaacgttggtctcctagggtcaacaagggttggtagcagaagagtgatacaaatttctgctggtttcatgatcttcttctccattctaggaaaatttggagcgctttttgcctcaattcctttcacaatatttgctgccatttactgtgtcatgtttggaattgttgctgctgtggggctctcctttatgcagttcaccaacatgaactcaatgcgcagtctcttcatcatcggtgtctcactcttcctgggtttatctataccagagtacttctctcggtattccacaagttctcaacaaggcccagcgcacacgaaagctggatggttcaatgactacatcaacactatcttctcatcaccgcccactgtcgccctgtttgtagcagtactccttgacaacacacttgatgtaagagatgcagctagggaccgaggaatgccatggtgggcgcgtttcaggacattccgtggcgacagcaggaatgaagagttctacactctgcctttcaacctcaaccgattctttcccccaacataa

SEQ ID NO: 1382 - protein, 525 aa, Sorghum bicolor
MAEVKPEDMVHHQPMDQLQGFEYCIDSNPSWGEGIALGFQHYILSLGTAVMIPTLLVPLMGGNDDDKAKVVQTLLFVTGIKTLLQTLFGTRLPTIMGGSYAYVVPILSIIRDPSFTQIADGHTRFLQTMRAIQGSLIVSSSIQIILGYSQLWAICSRFFSPLGMVPVVALVGLGLFERGFPVVGKCVEISLPMLILFVALSQYLKHVNIHHVPVLERFSLLMCIALVWVYAHILTASGAYKHTALVTQINCRTDRANLISSSQWISIPYPLQWGAPTFSADHAFGMMAAVMVSLIETTGAFKAAARLASATPPPAYVLSRGIGWQGIGTLLDGLFGTGTGSTVSVENVGLLGSTRVGSRRVIQISAGFMIFFSILGKFGALFASIPFTIFAAIYCVMFGIVAAVGLSFMQFTNMNSMRSLFIIGVSLFLGLSIPEYFSRYSTSSQQGPAHTKAGWFNDYINTIFSSPPTVALFVAVLLDNTLDVRDAARDRGMPWWARFRTFRGDSRNEEFYTLPFNLNRFFPPT

SEQ ID NO: 1383 - DNA, 1560 bp, Sorghum bicolor
cttccccccagcggcgcttccgcggcgaaatcctgcctcaaatccactgctgctgcttcgagcttcgggaccctgggccactccctcgctgtggagaggaaggagcatccagtccacttcccttctgctccttctcgagggaatcgcaggctggaggacgtcacgtcgactactccggcctccgccacgcagtcagactcccgaactaccgtgcagagtgaggcagaggagggggagtggactccgaacaaccttcgcaacttccctccccttggtcggcacatgatgacaaggcctggagatccagctgctcgccccgaggagacctcagcagtggcttcttcaaccaccgacatggatcgtgagctgcaacgcctgtcctcgcacgcagttatcgcctggattggccggtcatgccctgaggtcaagcctgaagtggtcaagagggccatctgctcccagcttggagtactcggcaaagacgtctctatcgtcaagcacttcccggaagacttctacatcgacttcaagcatcgccaccaccgtgatgaggcagttgccttggaaaagcttccccatgggagcctggacatccacatcaagccatggcgattgcccacccatgacagggtggagaaccccccagggcgcgatgggcgcgttatgtcccgtggttacacttggcgctacggcgtgatcgacggcgacaaagtaccttgtgactaccacgaccagccaccccggaactccaccaacactcgccgcaacgacaatgacaaccgccgcgggcggcacaggtgcaagggagacaactggagctcgctgctctttcatagcctatcacaggccccaaaagatagggagtgtgaacgctctgaaatgaggcacgaccaccgccgtgacaggaattctgttcacggcaaccatcatgagcaccttggagataacaacttcaaccagacagccatcaacagcggtgataggaccaccacgcaaacgtcctcgcgacccaacccccgcaaccgtgcaactcccatcaccaataacaagggtccagcggtgattagcccacccaagcctgccccttcgcagggggccatggggcgtaacacaagccacagcccggttcgtgcatccgacggccgagaaggggccgcagaccctccccaagcaagccctgtgaggagcgcacaggtcgagcagaacgcggtgactgcgttcatcagcacagtcacacagccgacgccggagccgctgatccaaggccctccgaaaagggcagtgatgctacggcgagccaagaagcaggcctcacttccactgcgcaagagtgttcgcatcgcggcggcatcgtggccacgtggtaatgcacaggaaaaggctcgccaggtgctcatgaagaggcttggtatcctgcaggaggagggttgctcgtcagatgacatgctgctgcactacttcaggctgttcagtggccctctctcagagatggtgatcaaggcgctgacggctctatgtggccttgacaacggcatcagcatcagtactgatgctgattag

SEQ ID NO: 1384 - protein, 519 aa, Sorghum bicolor
LPPSGASAAKSCLKSTAAASSFGTLGHSLAVERKEHPVHFPSAPSRGNRRLEDVTSTTPASATQSDSRTTVQSEAEEGEWTPNNLRNFPPLGRHMMTRPGDPAARPEETSAVASSTTDMDRELQRLSSHAVIAWIGRSCPEVKPEVVKRAICSQLGVLGKDVSIVKHFPEDFYIDFKHRHHRDEAVALEKLPHGSLDIHIKPWRLPTHDRVENPPGRDGRVMSRGYTWRYGVIDGDKVPCDYHDQPPRNSTNTRRNDNDNRRGRHRCKGDNWSSLLFHSLSQAPKDRECERSEMRHDHRRDRNSVHGNHHEHLGDNNFNQTAINSGDRTTTQTSSRPNPRNRATPITNNKGPAVISPPKPAPSQGAMGRNTSHSPVRASDGREGAADPPQASPVRSAQVEQNAVTAFISTVTQPTPEPLIQGPPKRAVMLRRAKKQASLPLRKSVRIAAASWPRGNAQEKARQVLMKRLGILQEEGCSSDDMLLHYFRLFSGPLSEMVIKALTALCGLDNGISISTDAD

SEQ ID NO: 1385 - DNA, 1308 bp, Sorghum bicolor
atgatgaaaattctcagtgaagaacaaaggcgggtttttgttcgtggttataacctttcgagcttgcttgacattaaactgacgagcagtggccccccttcactcctcaagtggttatacgaccacattgaccccaacacaatggcactcagagttggacctgggaaggagctgaagattaccaaggaagttgtgcattatgttcttggggtgtcgagcaaagggcagtctatatcagacaatgcttcctatactgctagagtcaatgaagcaaagaagctgcgcaatgaattgaatgtaacgaatgccaaggattttactgtcaaggtctgcacgaacagaatacagcagggtggcacagatgacctaacaaaacggtgcttcttccttgtcctattcaataggctttttttctcaatagccagctggcaaataaacaatgcagaaatcgggaaaaccatggacatgtcaaactttgacaacatcgattggtgccacatgatctaccaacacctggtatatgtggtgaagatgtggcacgagaagaccgatgaagagcaaacggcttacaccatatggggatgcagcactgtcatactgctctactatttggactggctcgaccaccctgctggtcctaaaaataggttccaaacccctcgcatcagcatgtttactagtgacatcataacgaacctaagcagggcggattgtgtccatgaggggcaggctatcagctgctacggaacgctcaatttccgccccccagcacagacatgctacacggctgcaccagatctgggaagcatttatgtgcctaagctatctaagttgctagccggaaagatagcatcattgaggggaagcagccggcgacacttcgaggaagtgtgtgccacttatgaccaagacgttgacaggcagtgccagacaatccaaaccgcaataaacaacatcgttgaaaagcaacacaacatggtcaccacctctggatttatgatcgatcaggtactacgagcaggggaggatgacgaggacgatgataatgaatcagtcgggagcccttcaatcaagagcaccctcagaatcatcagatgcacacggcagtaccagaccccaccactggtcacgacaaatcaattgcatctccagaagtcgaacaaatggacgaggatgttgaagaagtccaacaacctgctatactccgccacctcatcagcagttcaagacgctgcccacccccagtccaggggagtatcacctcaggaaacaactaacaaggagaatgtcgaacatgcccatcaaact

SEQ ID NO: 1386 - protein, 436 aa, Sorghum bicolor
MMKILSEEQRRVFVRGYNLSSLLDIKLTSSGPPSLLKWLYDHIDPNTMALRVGPGKELKITKEVVHYVLGVSSKGQSISDNASYTARVNEAKKLRNELNVTNAKDFTVKVCTNRIQQGGTDDLTKRCFFLVLFNRLFFSIASWQINNAEIGKTMDMSNFDNIDWCHMIYQHLVYVVKMWHEKTDEEQTAYTIWGCSTVILLYYLDWLDHPAGPKNRFQTPRISMFTSDIITNLSRADCVHEGQAISCYGTLNFRPPAQTCYTAAPDLGSIYVPKLSKLLAGKIASLRGSSRRHFEEVCATYDQDVDRQCQTIQTAINNIVEKQHNMVTTSGFMIDQVLRAGEDDEDDDNESVGSPSIKSTLRIIRCTRQYQTPPLVTTNQLHLQKSNKWTRMLKKSNNLLYSATSSAVQDAAHPQSRGVSPQETTNKENVEHAHQT

SEQ ID NO: 1387 - DNA, 951 bp, Sorghum bicolor
atggcggcttcttgcgcctccaccctcccttcgctctccttcgtttcctcctcttccagttcatcccgccgattcaggcgctctggtgtggtggccatggccagcgttgggcagaaggtgtatgcgcccggtgtggcggtgtcggagggcaatggcgggctccagaaaatcgacctcaaatccccgcacgggagcgaggctgagatttatctgtttggagcatgtgttacttctttcaaagtccctaatggcaaggacctgctctttgttcgaccagatgctgtgtttaacgggcagaaacccatcagtggtggaattccacattgtttcccccagtttggcccaggtcctatgcagcagcatggatttgcacggaatgtgaattggtctatcacagattcagaagtcatggaaggagatccaactgtaactttggaactgaaagatgactcttatagtcgttctatgtgggatttcagcttccatgcactgtacaaggtttccctgcactctacaagcttgtcaacaactctagaaataataaatacggatgtcaagcctttctcattcaactcagcactccacacttatttctctgcttccatagctggtgtttctgtgaaaggtctaaaaggttgcaaaactctcaataaggatcctgacccgaaaaatcctttggagggcaaagaagagagggaagaggtgacttttccaggattcgttgactgcatctaccttggtgcaccaagtgagctcatcctggacaatggattgggtgacaaaattgccatcgcaaattcaaattggtcagatgcagtcttgtggaatcctcacttgcagatggaggcctgctacaaagattttgtctgtgtggaaaacgccaagattgaaatggtacaactggagccaaaacaatcttgggtggcagaacagaaaattgaactagtctga

SEQ ID NO: 1388 - protein, 316 aa, Sorghum bicolor
MAASCASTLPSLSFVSSSSSSSRRFRRSGVVAMASVGQKVYAPGVAVSEGNGGLQKIDLKSPHGSEAEIYLFGACVTSFKVPNGKDLLFVRPDAVFNGQKPISGGIPHCFPQFGPGPMQQHGFARNVNWSITDSEVMEGDPTVTLELKDDSYSRSMWDFSFHALYKVSLHSTSLSTTLEIINTDVKPFSFNSALHTYFSASIAGVSVKGLKGCKTLNKDPDPKNPLEGKEEREEVTFPGFVDCIYLGAPSELILDNGLGDKIAIANSNWSDAVLWNPHLQMEACYKDFVCVENAKIEMVQLEPKQSWVAEQKIELV

SEQ ID NO: 1389 - DNA, 1434 bp, Sorghum bicolor
atggctgccgagctcacgcagcgctgcatcgtcttggtgccgttcccagcgcagggccatgtcaccccgatgctgcacctggcgcgcgccgtcgtggaccgcgggcacggcaacatctcggccaccgttgccgtgcccgacttcatccaccgccgcatgggccagttctccgccgccgaggtcgccctcgtgtccatacccagcggcgtagcggacgacggcggcgacgacgagccccccggatccggcagcttcctgcacgccatggagcactacatgccagcccaactggagggcatgctgctgacggcgcggcgcggcgccgaaggagcccgccgcgtctcgtgcctgcttgttgtcgtcgatctcctcgcgtcgtgggcgatacccgtggcggcgcggtgcagcctgccggtcgtcggcttctgggttgggatgttggcgacataccgtaccgtggcggtaatcccggagcttatcggcaagggcatcatctctgaatccggtaacctactgccagcagacggaaccatgaaagatcacaagaacattggagatctcaacatattgccagcaaagttaaaactgagattcaaagatcttccatggctcctggacagcacgcttcctcaaaagtcaagaatcgacttctggcttcaggcacttgatcgtgcaaagtgcctgccctgcatcctcgtcaactccatccccaacgaaggtggcaactcctctgatgaccagcatcagtatgatctgccacaggaccagcagatgctccaacaagttggtcccttattgttcaacgacgactcctcaaagaagacgacctccatgtggctggctgacaacacctgcatagattggttagacaagcagagccctggttcagtgatttatgtttcgttcgggagctgggctgcaccgatccaacctgacaagatcactggatttgcgcgtggtttggaggcctctggccggccattcctgtgggctctcaagaaccacccgtcgtggcgagctggcctcccggataattacgaagagaaggtttccggccgtggcaagatcgtctcgtgggcgccgcaggaagacgttctcaagcatagggccctgggctgctatattatgcactgtggctggaactcggtgctggaagctgcacggcaaggggttcgcatgatatgctaccctgtcactgcagaccatttcatcaactgtgcctacattgttaacatgtgggagattgggattgagctggccagcagtgaccagagtgatgtgaaagactgcattgagagagtcatggaaggcaacgagggaaagcatttgcagcaaaaggtaaatgagttgagagaaacaatcacggttggtgaggccatgggtgttgccaagagtaacctcaacttattcatggacagaatcaataacatttag

SEQ ID NO: 1390 - protein, 477 aa, Sorghum bicolor
MAAELTQRCIVLVPFPAQGHVTPMLHLARAVVDRGHGNISATVAVPDFIHRRMGQFSAAEVALVSIPSGVADDGGDDEPPGSGSFLHAMEHYMPAQLEGMLLTARRGAEGARRVSCLLVVVDLLASWAIPVAARCSLPVVGFWVGMLATYRTVAVIPELIGKGIISESGNLLPADGTMKDHKNIGDLNILPAKLKLRFKDLPWLLDSTLPQKSRIDFWLQALDRAKCLPCILVNSIPNEGGNSSDDQHQYDLPQDQQMLQQVGPLLFNDDSSKKTTSMWLADNTCIDWLDKQSPGSVIYVSFGSWAAPIQPDKITGFARGLEASGRPFLWALKNHPSWRAGLPDNYEEKVSGRGKIVSWAPQEDVLKHRALGCYIMHCGWNSVLEAARQGVRMICYPVTADHFINCAYIVNMWEIGIELASSDQSDVKDCIERVMEGNEGKHLQQKVNELRETITVGEAMGVAKSNLNLFMDRINNI

SEQ ID NO: 1391 - DNA, 1152 bp, Sorghum bicolor
atggggaggaggtggcgttggcacgccgtcgccgcgctcggcgtcgcgtgcgcggccgccgttgttgccgccgccgccgacacggggatgggcccaatggaatttgggtggcggatcgtgctggggtcactaatcgggttctttggcgccgcgtttgggagcgttggcggcgtcggcggaggcggcgtcttcctgccgatgctagcgttgatcatcggctttgatcccaagtcatcggccgccatgtccaagtgcatgatcatgggtgcgtctgtgtcaactgtctactgcaatctcaagctgaagcacccgagtttggacataccgctgatcgactacgacctcgccatgctcatccagcctatgctgatgcttgggatcagcataggtgtaatcttcaatgttgttttccctgactggctggtcacggctctcctgataatcctcttcctagtaacatcaacaaaggccttcttgaagggcgttgagacatggaagaaagagaccataaagaaaaggaagtcatcacttctgaagaatgtttactggaaggagttcggtctccttgcatttgtgtggctggcattccttgggcttcagatcgcaaataagtacagtgcttactgctccgcgctatactgggccttgaattctctccagatccctgtggcagtaggagtgaccatgtatgaagcacatgggttggcaactggaaagaaggtgttatcatcgaagggaagccaacagaatgccctaaaatcttgccagctctttgtatactgtcagtttggtatcattgcagggctcgtggggggtctactaggtgttggaggtggcttcattatgggtccattgttcttggagctcggtatccctccccagccagcactatgtgaggaagttgatcagtcggctagggcgtgcttcactcatcatcttcatcttggcttccatgatctttgtcagcgcaatttctcttggtaccatattctaaaactagctgagattaaccagaatccctatggcgcgctggatagttacataaataatcatcgtcttcctgcaggtggggtaggaatctcaaacatagttcacaagattgagtgtcaccagtacatgggttttgaaagcctttgcaattatggtgcgtag

SEQ ID NO: 1392 - protein, 383 aa, Sorghum bicolor
MGRRWRWHAVAALGVACAAAVVAAAADTGMGPMEFGWRIVLGSLIGFFGAAFGSVGGVGGGGVFLPMLALIIGFDPKSSAAMSKCMIMGASVSTVYCNLKLKHPSLDIPLIDYDLAMLIQPMLMLGISIGVIFNVVFPDWLVTALLIILFLVTSTKAFLKGVETWKKETIKKRKSSLLKNVYWKEFGLLAFVWLAFLGLQIANKYSAYCSALYWALNSLQIPVAVGVTMYEAHGLATGKKVLSSKGSQQNALKSCQLFVYCQFGIIAGLVGGLLGVGGGFIMGPLFLELGIPPQPALCEEVDQSARACFTHHLHLGFHDLCQRNFSWYHILKLAEINQNPYGALDSYINNHRLPAGGVGISNIVHKIECHQYMGFESLCNYGA

SEQ ID NO: 1393 - DNA, 1398 bp, Sorghum bicolor
atggcgctcaagcagaagggcaccgatgccgccgctaccgacaccaagaagcgccgccgcgtcggcttctccggcaccgatgctggtgttgaggcaaatgagtgcatgaaagtatttctagtaaggaatccagatgaggtgggctctgtagactgcacttctattgagccgttcgatctaaaccatttttttggtgaagatggaaagatatatggttacaaaaatcttaagataaatgtgtggataagtgcaaaatcattccatggatatgctgatatttcatttgacgaaacgtctgatggagggaaaggaataacagatctaaagcctgttcttcagaacatttttggagaaaacttggtagaaaaagaagaatttctgcatacattttcgaaggaatgtgaatgtatcagaactgccgtgacaaatggtagtgccatcaagcttgatggctcatatgaatcagacccagcagttgagattgttcgagttgaactccaaggtgctgctgcatttctttattctcgtctggtaccgcttgttcttcttctggttgaaggttccacgcctatagatattggagaacatggatgggaaatggttttggtagtaaagaagacaacacaagaggctgtttcgaaatttgaactgctaggttttgcagctgtccataacttctatcattatcctgagagtactcgcttgcgaatcagccagatacttgtcttgccaccttatcagggtgagggccatggtcttcgtcttcttgaagcaatcaattatattgcacagtctgagaacatatatgatgtaaccatagaagacccttctgactacctgcagtatgtgcgctcatccattgactgcctccgtctcctcacgtttgatccgatcaaatctgcactcagtgctattgtctcgtctctgaaggagaccaacctgtcaaaaaggactcacagtttgagaatggttccaccagctgagctgatggagactgtccgtcagaagctgaagatcaacaagaaacagtttctccgatgctgggaaattctaatcttcctaagccttgactctcaggagcataagagcatggacaacttcagggcctgcatatatgaccgcatcaagggggagatccttggcagtgcctctggaactaatgggaagcgtctattgcagatggtaagcagttcaaatgaggagtcttttgctgtgtattggacacaggagagtggggacgcagatgaccaaactgttgagcagcagccagaagatctcaagactcaggagcagcagctcaatgagctcgtagacaaccaaatggaggagattattggggttgctaagaacgtcacctcacgtggcaaggacaagctggtagagctggtggcccaatga

SEQ ID NO: 1394 - protein, 465 aa, Sorghum bicolor
MALKQKGTDAAATDTKKRRRVGFSGTDAGVEANECMKVFLVRNPDEVGSVDCTSIEPFDLNHFFGEDGKIYGYKNLKINVWISAKSFHGYADISFDETSDGGKGITDLKPVLQNIFGENLVEKEEFLHTFSKECECIRTAVTNGSAIKLDGSYESDPAVEIVRVELQGAAAFLYSRLVPLVLLLVEGSTPIDIGEHGWEMVLVVKKTTQEAVSKFELLGFAAVHNFYHYPESTRLRISQILVLPPYQGEGHGLRLLEAINYIAQSENIYDVTIEDPSDYLQYVRSSIDCLRLLTFDPIKSALSAIVSSLKETNLSKRTHSLRMVPPAELMETVRQKLKINKKQFLRCWEILIFLSLDSQEHKSMDNFRACIYDRIKGEILGSASGTNGKRLLQMVSSSNEESFAVYWTQESGDADDQTVEQQPEDLKTQEQQLNELVDNQMEEIIGVAKNVTSRGKDKLVELVAQ

SEQ ID NO: 1395 - DNA, 1791 bp, Sorghum bicolor
atggacgaagccagcccacggtgggtgaacgtatcgaccacacggcccattcagccggacgccatttacggcgtgccgtcggccatcctgaagacggccgtcgtggcgggtggaaacgacacggcgatcaccgtgaggaagtggcagtatgacacgccgagctcctactcgttcatgatcctcctgcacttcgtcgacttccaggacactcagcttcggcagtttgatatctacgtcaacgagaacgatccatcgggaatggagctgaagtcgtacaacaagacatcgttcctgactccgtcccatgtgtacactgaatcctacagggctcccgacggcaactacaacatcactcttgccaagaccaacgcctccgtgctgcctccgatgatcaatgcgctcgagatctaccttcgcgtcccgtacgagaatccgacgacacttgctcaagactttgacgccatcatggctatcaaaactgagtatggagtcaagaaaaactggatgggtgatccatgttttccaatcaaatttgcttgggacggcgtgaaatgcagcaatgcaagtggtaacacgtcgaggataacatcactagatctctccaacagctcgttgcatggcacaatatctaagaattttacactgctcacagcactcgagactttagatttatcttacaaccagttgagcgggtcaatacctgattccctaccaagtttgccttccctacaagttctacatgatggtggctctgtatgcaacaaaccttcaccaagcccaccaagaaataaagtagctatcatagctatttcagtagtggttcctgtgttggtagtagttttacttcttatcgcatatttcatttggtggcagaaaaaaaagcctaatgtgcaaccagtccccataaatggcccaacaagagatccagaacctgataatgcttcgggaagtaaaaaaggtcatgtgtacaacctgaagaaaactgagaatcgccagttcacatacaaagacctcgagaagttcactaataatttcaagaagttcataggacaaggaggtttcaggcccgtctactatggccgtttggaagacagcaccgaggttgctgtcaagatgcgttctgaatcatcatcacatgggcttgatgaatttttagctgaggtccagagcttgacaaaggtgcatcacaggaatctagtgtatttgattggttactgctgggagaaagatcatttggcactggtttatgagtacatgtctcagggcagtctttttgatcatctgagaggtaagaatggtgtttctgaagccttgaattggaggaaacgtgtacaagtagtgcttgaagctgcacaaggcttggattatctgcataaaggttgcaatttgccaatagttcaccgtgatgtgaagaccaacaacattcttttgggtcaaaatctgcaagctaaaatcgcagattttggactttccaagacatatcttagcgatacacaaactcacatatcagccactgcagctggcacagctggttacatggaccctgactcaattgctgatttgcgacttggaagtgcctatgacatcagctccatgtggaaggtaatcgacaccgctatggtgtgcaccgcggattctgctactcaaaggccaacaatggccacagttgtgatacagttgaaggagagcctggcgttggaggaaactcgtgagaaggacagtagcatcagggcaaaccaggcgagtgatatagaagctatggtgtccacatttggtccattggcaagatga

SEQ ID NO: 1396 - protein, 596 aa, Sorghum bicolor
MDEASPRWVNVSTTRPIQPDAIYGVPSAILKTAVVAGGNDTAITVRKWQYDTPSSYSFMILLHFVDFQDTQLRQFDIYVNENDPSGMELKSYNKTSFLTPSHVYTESYRAPDGNYNITLAKTNASVLPPMINALEIYLRVPYENPTTLAQDFDAIMAIKTEYGVKKNWMGDPCFPIKFAWDGVKCSNASGNTSRITSLDLSNSSLHGTISKNFTLLTALETLDLSYNQLSGSIPDSLPSLPSLQVLHDGGSVCNKPSPSPPRNKVAIIAISVVVPVLVVVLLLIAYFIWWQKKKPNVQPVPINGPTRDPEPDNASGSKKGHVYNLKKTENRQFTYKDLEKFTNNFKKFIGQGGFRPVYYGRLEDSTEVAVKMRSESSSHGLDEFLAEVQSLTKVHHRNLVYLIGYCWEKDHLALVYEYMSQGSLFDHLRGKNGVSEALNWRKRVQVVLEAAQGLDYLHKGCNLPIVHRDVKTNNILLGQNLQAKIADFGLSKTYLSDTQTHISATAAGTAGYMDPDSIADLRLGSAYDISSMWKVIDTAMVCTADSATQRPTMATVVIQLKESLALEETREKDSSIRANQASDIEAMVSTFGPLAR

SEQ ID NO: 1397 - DNA, 831 bp, Sorghum bicolor
atggtcgggccgggcctctacgccgagatcggcaagaagaccaaggatctgctgtacaaggactaccagactgaccacaagttcaccctcactacctacacctccaatggcgtcgctgtcactgcttctagcacaaagaaagctgacctgatctttggtgagatccaatcacagataaagaacaagaacattaccgtagatgtgaaagcaaactcagagtcaaatatcattactacagttactgttgatgagattgcaacaccaggactgaaaaccatccttagctttgctgttcctgatcagaggtctggaaaggttgagcttcagtatttgcatgattatgctggagttaatgcaagcattggtctgacagccaatcctgtcgtcaacctctctgctgcctttggcactaaggctcttgcagttggtgcagatgtctcacttgatactgccactggaaacttaaccaaatacaattctggactgaggttcactcatgaagacctcatcgcatccctgagcctgaacaacaggggagacagtcttactggagcttactaccacaaggtgagcgaattgaccaacacagctgttggggcagagcttacccacagcttctcgaccaatgaaaacaccgtcacctttggcgggcagcacgctctggacccactaaccgtcttgaaggcccgcatcaacaactctggcaaggccagcgccctcatccagcacgagtggaggccaaagtctctggtcaccatctcggccgaggtcgacaccaagaccatcgagaagagctcgaaggtcgggatcgccgtggccctcaagccctga

SEQ ID NO: 1398 - protein, 276 aa, Sorghum bicolor
MVGPGLYAEIGKKTKDLLYKDYQTDHKFTLTTYTSNGVAVTASSTKKADLIFGEIQSQIKNKNITVDVKANSESNIITTVTVDEIATPGLKTILSFAVPDQRSGKVELQYLHDYAGVNASIGLTANPVVNLSAAFGTKALAVGADVSLDTATGNLTKYNSGLRFTHEDLIASLSLNNRGDSLTGAYYHKVSELTNTAVGAELTHSFSTNENTVTFGGQHALDPLTVLKARINNSGKASALIQHEWRPKSLVTISAEVDTKTIEKSSKVGIAVALKP

SEQ ID NO: 1399 - DNA, 1650 bp, Sorghum bicolor
atgaacgggtgcgcgccgggcgccggggaccgcggcgcggtgtgcgtgcgcgaggcgcgggcgctgccggccgcgccggcgccgcacgacgccgtgggccagctcagggccgccgtggacgcgctcgtcggctccgacgcgccgccctccggcatcatccgcatcgaggtgcccatcaggcagcgggtggacgccatcgagtggctgcacgtgcagaccgcgctgctgccccgctgcttcttctcggcacgggcgccgttgcccgacgcgcccgcgctcgccggcaccagcagctgcggcaacggcaacggcaacggcaacggcagtggccatcggcagcagcagccggtgagcgtcgcgggcgtgggctcggcggtcttcttccgcgggacggagcccttttctctcgctgattggcgcgcaatcaagagatttcttccaagggactgtccactgattcgcgcatatggagccatccgtttcgatgcaacgagtgatgcttcggttgaatgggaggactatggatcattctacttcattgttcctcaagttgagttcaatgagctcgaggagagctcagtccttgcgacaacgatcgcatgggatgactcgctttcatggacatggcagaacgctgtggaggagctccaatcaactctgcaaaagaccagcctacaaacagccatagtaagtctcaatcatgtcccaaccaaggcatcttgggatcttgcagttactaaagctcttcagatgatcaaagggaggcaaagagaattggtaaaggttgtactggcaaggtgtagcagatacattactgatacttgcattgaccctgtggaactgctagcttgcttgaaggttgagggccaaaatgcttatcaattctgcatacaaccaccagatgctcctgcgtttgttggaaatagccaactatttcaccggaaacacttgaatatttccagtgaggctctagctggtactcgagcaagaggaaaaacaagggcagatgactttcaaatcggtcaggatttgcttctaagtaccaaagaggatatcgaatttactatagtacgggatagcataaagaacaaactggagatgatctgtgacgaggtggttgtccatcccagcaaggctctgcggaaacttccaagagtacagcatttgtcagcacagttagctgcgagaataaggaacgaagatgatgagtttgagattctaaatactcttcatccgagtccagctgtttgtggcttgccaactgaagaggcgcgcagattcatacgagatcatgaaatttttgaccgtggaatgtacgccggtcctgttggttggtttggaggagctgaaagcgagtttgctgttgggattagatcagcgttacttggaaaaggtcacagcactttagtgtacgccggtgcggggattgttgaaggtacaaatccatcttttgaatgggatgaacttgatctcaaagcatctcaggtaccatcttgtcgaattcatgataaacagtgtgctgggtttaaattaaagagtaaggctaaatgcatccaatttttgggttattttcagtttgcaaagctgttgcggtaccaagaacaacatattcgctaccaagaggctgaaaacttgggaacagtaatctga

SEQ ID NO: 1400 - protein, 549 aa, Sorghum bicolor
MNGCAPGAGDRGAVCVREARALPAAPAPHDAVGQLRAAVDALVGSDAPPSGIIRIEVPIRQRVDAIEWLHVQTALLPRCFFSARAPLPDAPALAGTSSCGNGNGNGNGSGHRQQQPVSVAGVGSAVFFRGTEPFSLADWRAIKRFLPRDCPLIRAYGAIRFDATSDASVEWEDYGSFYFIVPQVEFNELEESSVLATTIAWDDSLSWTWQNAVEELQSTLQKTSLQTAIVSLNHVPTKASWDLAVTKALQMIKGRQRELVKVVLARCSRYITDTCIDPVELLACLKVEGQNAYQFCIQPPDAPAFVGNSQLFHRKHLNISSEALAGTRARGKTRADDFQIGQDLLLSTKEDIEFTIVRDSIKNKLEMICDEVVVHPSKALRKLPRVQHLSAQLAARIRNEDDEFEILNTLHPSPAVCGLPTEEARRFIRDHEIFDRGMYAGPVGWFGGAESEFAVGIRSALLGKGHSTLVYAGAGIVEGTNPSFEWDELDLKASQVPSCRIHDKQCAGFKLKSKAKCIQFLGYFQFAKLLRYQEQHIRYQEAENLGTVI

SEQ ID NO: 1401 - DNA, 1095 bp, Sorghum bicolor
atggagggtttagcagcgcctgtatccaaacttgaggatgtccaagcaaagaatgctgcagatccttttgagcctccgtggatcgtttcgatggcttccatgaagcaaacacctgagacgggtttggaggagttgaagaatcttgctttctataccccagtgagcctcaagtgcaaaggaaatgccaacaactgtatttacgaggataaagagtctgcagagttcaaagcttttgatcctctgtttcctaagaagccgcaaaaggaacactgtgaaatgcatgccccttgggaacaaaccaagaaatctcagccatggtggcaagtagctgatgtcgatggtttggcttcccttgtcgctgaaagagcaatggaaaacattattaacaatgatctaccaagacccactcagacagtccgtgttcatggagctgaagtgaagggtcgtgaaaacaaggatgattacgggctgcctgctctttctgtgggcaaagagccagatcctgtacatgacactatggagtatagctacagtgtttcaagcaccaccaatgacacgtattcttctgatgggggacgttggcaacaacatcaaagaaataatgtgcccggggatgcacaggattctgatggttccaccatcaatacaccaggcagcaagccaacatatcagaatgcttccgagagggccaagctactagatgctctccgtcattcacaaacacgtgctagggaagctgagatagctgccaagaaagcctatgacgagaaagaccatgtcatcaagctattgttccgtcaggcctcacacctctttgcatgcaagcagtggttgaaaatgttgcagctggaaaacatatgccttcagctcaggttcaaagaacaccagatagcaaccatgttcccggaccttccctggatggtggtgaaggaaaaggtagcaccttctcaagagcacaatgacgggactaggaagaaaggcagaaggccaaacaggaaaggtggcctctgcaatgccgttgcatttgctgttggtgttggtcttgttggtgctggattgcttcttggctggactcttgggtggctactgccgtag

SEQ ID NO: 1402 - protein, 364 aa, Sorghum bicolor
MEGLAAPVSKLEDVQAKNAADPFEPPWIVSMASMKQTPETGLEELKNLAFYTPVSLKCKGNANNCIYEDKESAEFKAFDPLFPKKPQKEHCEMHAPWEQTKKSQPWWQVADVDGLASLVAERAMENIINNDLPRPTQTVRVHGAEVKGRENKDDYGLPALSVGKEPDPVHDTMEYSYSVSSTTNDTYSSDGGRWQQHQRNNVPGDAQDSDGSTINTPGSKPTYQNASERAKLLDALRHSQTRAREAEIAAKKAYDEKDHVIKLLFRQASHLFACKQWLKMLQLENICLQLRFKEHQIATMFPDLPWMVVKEKVAPSQEHNDGTRKKGRRPNRKGGLCNAVAFAVGVGLVGAGLLLGWTLGWLLP

SEQ ID NO: 1403 - DNA, 621 bp, Sorghum bicolor
atgacgacggcgtggtggtggttcgtcgccatgaacgcggtcgtcgtggctatcgccgtgctgtccacctcctgcgcacggccacgacgccaccgctcctccggggtcacgcggagagcctcctcggcgtcggccgtgctgcagagcctcctctcattctccctcttctccttcccgtcggcatgcctgtcgtcgtacctccagcccgacatcgccgccgcaaccactgaccaagaaacagaagcagaggagctggtggcgtggtcaccaccaccacccatcaagccgtcaccgtcaccgcgcgcgctccagctcacaccgccgccgccgcccgcgccggctgcagatgacgaggaggaagaggaggaggacccgaacgcgatgagcatggacgaggcgtacgcgctggtcctggcgtcgcagcagcggccggagcgggagagggaggaagaggccaggaggtcggaggtggacgccaaggcggaggagttcatccgcaggttcaaggaccaactgcggcagcagcggctcgactccatctccaactacacgcacatgctcaaacagcgtgcgcccgccggcggcggccagatgttctccgggcagatcgctgctgattag

SEQ ID NO: 1404 - protein, 206 aa, Sorghum bicolor
MTTAWWWFVAMNAVVVAIAVLSTSCARPRRHRSSGVTRRASSASAVLQSLLSFSLFSFPSACLSSYLQPDIAAATTDQETEAEELVAWSPPPPIKPSPSPRALQLTPPPPPAPAADDEEEEEEDPNAMSMDEAYALVLASQQRPEREREEEARRSEVDAKAEEFIRRFKDQLRQQRLDSISNYTHMLKQRAPAGGGQMFSGQIAAD

SEQ ID NO: 1405 - DNA, 1713 bp, Sorghum bicolor
atgggctggcaaccccggctcctctgctgcctcttcctgtccctgtcgctggcagcggccgcgcgcgccgccgccactgttcaccaggagtgggagatcagctaccagttcaagagccccgactgcgtgcgcaagctcgcggtgaccatcaacgggcagacgcccgggccgaccatccgcgcaacgcagggcgacaccgtcgtggtcactgtcaggaactcgctgctgacggagaacgttgccatccactggcatggcatccggcagatcggcacgccgtgggcggacggcacggagggggtgacgcagtgcccgatcctccccggggacaccttcaactacaccttcgtcgtcgaccgcccgggcacctacatgtaccacgcgcactacgggatgcagcgctcggcggggctcaatggcatgatcgtcgtgaactcagcgcgcggcgggccggacggcgagccgttcacgtacgacggcgagcacgacgtgctgctcaacgactggtggcacaagagcacctacgaggaggccacgggcctcgcgtccgtgccgatcatctgggtcggggagccgcagtcgctgctcatcaacggccgcggcaggtggttcagctgctccaggatggcggctggggcatgcaacgccaccctcccggagtgcgccgcgccggtgttcgccgtcgtgcctggcaagacctacaggttccgcattgccagcgtcacgtcgctgtccgcgctcaactttgagatcgagggccataatatgacggtggtggaagccgacggccactatgtgaagccattcgtggtgaagaacctcaacatctactccggcgagacctactccgtgaccatcacggccgaccaggatcccaaccgcaactattgggtcgcttctaacgtcatcagccgcgagcctggcacccccaccggcaccgccattctcagctactacagcggccgcagcagcccgcggaagccgccgccgaccacgcctcccacgggtccggcctggaacgacaccacgtaccggttccggcagagcgtggcgacggtggcgcacccggcgcacgtccagccaccgccgccgcgcgccgaccgcaccatcctcctgctcaacacgcagaacaagatcgacgggcgcatcaagtgggcgctcaacaacgtctccttcacgctgccgcacacgccctacctggtggccatgaagagcggcctcctcggcgccttcgaccagcggccgccgccggagacgtacgcgcaccaggggtacgatgtatacgctccgccgcccaaccccgccgcgacggtcagcgacgggctgtaccggctgcagttcggctccgtcgtcgacgtggtgctgcagaacgccaacatgctggcggccaacaagagcgagacgcacccttggcacctgcacgggcatgatttctgggtgctgggctatggcatcggccgcttcgacccggcggtgcacccggcgtcgtacaatctgaaggacccgatactgaagaacacggtggcggtgcatccgtatgggtggacggcgctgcggttcaaggctgacaaccccggcgtgtgggcgttccattgccacatcgagtctcatttcttcatgggaatgggcatcgtcttcgaggaaggcgttgagcgcgtcgctcagctgccgcaagagatcatggggtgcgggaagaccaagggcggccactag

SEQ ID NO: 1406 - protein, 570 aa, Sorghum bicolor
MGWQPRLLCCLFLSLSLAAAARAAATVHQEWEISYQFKSPDCVRKLAVTINGQTPGPTIRATQGDTVVVTVRNSLLTENVAIHWHGIRQIGTPWADGTEGVTQCPILPGDTFNYTFVVDRPGTYMYHAHYGMQRSAGLNGMIVVNSARGGPDGEPFTYDGEHDVLLNDWWHKSTYEEATGLASVPIIWVGEPQSLLINGRGRWFSCSRMAAGACNATLPECAAPVFAVVPGKTYRFRIASVTSLSALNFEIEGHNMTVVEADGHYVKPFVVKNLNIYSGETYSVTITADQDPNRNYWVASNVISREPGTPTGTAILSYYSGRSSPRKPPPTTPPTGPAWNDTTYRFRQSVATVAHPAHVQPPPPRADRTILLLNTQNKIDGRIKWALNNVSFTLPHTPYLVAMKSGLLGAFDQRPPPETYAHQGYDVYAPPPNPAATVSDGLYRLQFGSVVDVVLQNANMLAANKSETHPWHLHGHDFWVLGYGIGRFDPAVHPASYNLKDPILKNTVAVHPYGWTALRFKADNPGVWAFHCHIESHFFMGMGIVFEEGVERVAQLPQEIMGCGKTKGGH

SEQ ID NO: 1407 - DNA, 594 bp, Sorghum bicolor
atggtggggaagagggagcgggactgcaagaacccgatgcgtcggacgacgagcatgacggagttcgcgccgcccgacgcgctcgcggcggtgatggaggacgaggaggaggcccagctgccctacaacagccacatcagcagccgtggcgccgcggccggtggtgggcagcagcagcagcagcagcagcaggactggctgtccgcgttcgttgggggcggcggcggcgctgggcccgggggcgccgcggcgcaggaggactggctcgcggcgtaccgcgcccgcgcggcgcccgcgcgcgcggggctccgccgcaactcggccgactactccgtcgtcgagaccgccgcgttcctccgcgcctgcgggctctgccggcgccgcctcggccccggccgcgacaccttcatgtacaaaggtgaggcggcgttctgtagcctggagtgcagggagcggcatatcacgcaggaggagtggaaggacaagtgcgcgctgacgacgtcgatcaaggacgctgccgccggcgccgccaaggccaacggccgccgctcctccggcaccggcaaggccggtggcagggtggccgcggcatga

SEQ ID NO: 1408 - protein, 197 aa, Sorghum bicolor
MVGKRERDCKNPMRRTTSMTEFAPPDALAAVMEDEEEAQLPYNSHISSRGAAAGGGQQQQQQQQDWLSAFVGGGGGAGPGGAAAQEDWLAAYRARAAPARAGLRRNSADYSVVETAAFLRACGLCRRRLGPGRDTFMYKGEAAFCSLECRERHITQEEWKDKCALTTSIKDAAAGAAKANGRRSSGTGKAGGRVAAA

SEQ ID NO: 1409 - DNA, 843 bp, Sorghum bicolor; identical to SEQ ID NO: 85

SEQ ID NO: 1410 - protein, 280 aa, Sorghum bicolor; identical to SEQ ID NO: 86

SEQ ID NO: 1411 - DNA, 1563 bp, Sorghum bicolor
atggggctgtcatcagcgtggcgggaggggcggcggacgctggtgctggtgaacctggcgtccatcatggagcgcgccgacgaggcgctgctgccggcggtgtaccgggaggtgggcgccgcgctgcacgccacgcccacggggctcggcgccctcacgctgtaccgatccatcgtgcaggccgcctgctacccggtggcggcctacgccgcgtcgcgccacaaccgcgcccatgtcatcgcgctgggggccttcctctgggccgccgccaccttcctcgtcgccgtctccgacaccttcctccaggtggcaatttcaaggggcttgaatggcattggtctagctctcgttataccagcagttcagtcgctggtggctgactccaccgacgacgacaaccgtggcacagctttcggttggctgcaactgacgagcagcataggctccatatttgggggattctttgccttgatgctggctcagactacaatcttggggattgaaggatggcgtattgccttccatctcgtcgcagtcgtcagtgtcatcgtaggcatcctcgtgtggttcttcgccgtggatccccatttccccacaaacaatgctgcctcacatgctgcaccagtgagcaaaaaatctgcacttgatgaagcaagggagctgatcattgaggccaagtccataatccagatcccaacgttccaagtcttcgtcgcgcagggtgtcagcggctcattcccatggtcagcactgtcgttcttgtccatgtggcttgagctcatcgggttcagccacgaggacaccgccattttcacgacgacctttgctgtcgccacctccattggcggccttcttggtggcaagatgggggatttctttgctcagcgatatccgaacgccgggaggatcatcctgtcgcagataagcgctggctctgctgttccactggctgctgttctcctgctgggtttgcctgataatccatccagatccagcggtgtagcccatggacttgttctgttcatcatgggactcatcatctcttggaatggagctgctacaaacgggccgatttttgcagagatcgtgcccgagaggcaaaggacaagcatctatgctttggacaggactttcgagtcgattctagcctcgtttgcgccacctgtcgttggcttgttatcgcagcacctctatggtttcaaactggacgacaaagggagcagccctgagcaggatcgggagaacgctgcgtcgctggccaaggcgctgtacacggccatttccatccccatggttatctgcagctccatatacacgttcatgtaccgcacttaccctcgagacagggagcgtgcgcgcatgcagtctatgatccagtcagagctagatcagattgagctgggcggttcgagctttggatgcggcgatgacgacaggtttgagctctttgaatcgatgcacgatggtgataagcctggtgaggttgatggcagctatggtgctgaagaatctgctgaggccgatgccggcactgaaaaactattaggaaaccatgagttgtga

SEQ ID NO: 1412 - protein, 520 aa, Sorghum bicolor
MGLSSAWREGRRTLVLVNLASIMERADEALLPAVYREVGAALHATPTGLGALTLYRSIVQAACYPVAAYAASRHNRAHVIALGAFLWAAATFLVAVSDTFLQVAISRGLNGIGLALVIPAVQSLVADSTDDDNRGTAFGWLQLTSSIGSIFGGFFALMLAQTTILGIEGWRIAFHLVAVVSVIVGILVWFFAVDPHFPTNNAASHAAPVSKKSALDEARELIIEAKSIIQIPTFQVFVAQGVSGSFPWSALSFLSMWLELIGFSHEDTAIFTTTFAVATSIGGLLGGKMGDFFAQRYPNAGRIILSQISAGSAVPLAAVLLLGLPDNPSRSSGVAHGLVLFIMGLIISWNGAATNGPIFAEIVPERQRTSIYALDRTFESILASFAPPVVGLLSQHLYGFKLDDKGSSPEQDRENAASLAKALYTAISIPMVICSSIYTFMYRTYPRDRERARMQSMIQSELDQIELGGSSFGCGDDDRFELFESMHDGDKPGEVDGSYGAEESAEADAGTEKLLGNHEL

SEQ ID NO: 1413 - DNA, 693 bp, Sorghum bicolor
atgcaagctttgaaaaggttgaagggtacatccaaggataaacgtggaaagatggctgaggggactaaacgtatatttgatgaattgactgaagctgccatgaagctaatggagaacggcgactataatgtttactcagatgatcgtgagacctttgaccgtgaggcagctgggtatgaacgtttggcacgtgctcgacttggtttgccagaagttgatggtgtctctgaagacccaaagtataaccagacaccattgtcagtactggaaattgaccaaccatcatctgtactggaaatggaacttggtccctcaactgccaatatatctacagccactgctgcaatcaacgatgatgacagtaacctggacatgtttggtgatgatgacaacgatgatgccaatcgcagttctgatgccaatactgtaggttcaggtttgaatcctggaacctcagatgtgaagaaagccgataatggaagcgtggactcagactatgtctatgatccatcttcaggttactactatagcagcagcacaggctattactatgaccctaactctggatattatggttatgcatctacgggaacctggtattcatacgatgagcaaactggaacatacaaagaaattcaggatgaacaaaccagcacggccaaagaagagctgggagatgccatcaaggagtaa

SEQ ID NO: 1414 - protein, 230 aa, Sorghum bicolor
MQALKRLKGTSKDKRGKMAEGTKRIFDELTEAAMKLMENGDYNVYSDDRETFDREAAGYERLARARLGLPEVDGVSEDPKYNQTPLSVLEIDQPSSVLEMELGPSTANISTATAAINDDDSNLDMFGDDDNDDANRSSDANTVGSGLNPGTSDVKKADNGSVDSDYVYDPSSGYYYSSSTGYYYDPNSGYYGYASTGTWYSYDEQTGTYKEIQDEQTSTAKEELGDAIKE

SEQ ID NO: 1415 - DNA, 1452 bp, Sorghum bicolor
atgctgggcaccactgtcattatacccagctcgctcgttcctcagatgggaggcggaaatgaagagaaagcccgggtggttcagacgatattgttcgtggctggcataaacaccctgttccaaacattcttcgggacacgccttccggttgtgatgggtggctcatacatcttcgtcggacccaccatctccatcatcttggctggacggtacagcaatgaagcagaccctcacgagaaattcttgcggacgatgaggggaacgcaaggtgctctcctaattgcgtcgacaattcagatcatacttgggttcagtgggctctggcgcaatgtagtcaaattattgagtccgctggcagctgttcctctagtatcacttgtcggatttgggctttatgagcttggctttccaggggtagcgaaatgtgttgaaattggccttccagaagttttcctgttggttgtattttctcagtatttgtctcaagttctggatttcgggaagtctgtctttagccggttcagtgttcttttcactgtctctattgtgtggctgtatgcttacattctcaccatcggtggtgcttacaagaattctccaccgaagacacaggtgcattgccgtgttgatcgttcaggccttatttcaggagcgccttggataagtgttccatacccctttcagtggggtgctccaacatttgacgctggagaagcttttgcaatgatgatgacttcattcattgctcttgtagagtcaactggcgccttcattggtgcttcaagatatgcaagtgcaactatgattcctccatcaattattagtcggggcgtgggatggcagggcattggcctcttgcttgattcattttttgggacagccaccgggacatcagtttcagtagagaatatcggattgcttgcattgacacgtattggcagccggagagtagtacaaatatctgcagggttcatgattttcttctctgtccttggaaaatttggagctttgtttgcatcgattccactgcccatatttgctggcatgtactgtctcttcttcgcatatgttggtggtgttggcctgagcttacttcaattctgcaatctaaacagctttaggaccaagttcatcatggggtttgctttcttcatgggcttatcagttcctcagtacttcaatgagtatacagctgttgcaagttatggtccagtgcacactggcgccagatggttcaatgacatgataaacgtgccattctcgtcaaagccgttcgtcgctgggttggtagcctacatcctggacaacacccttcagataaaggaaagcgcggtgaggaaggacagaggcaaccactggtgggaaaagttcaggagcttcaagaaagacgcgaggagccaagagttctactcgttgccgttcaatctgaacaaattcttcccttcggtctga

SEQ ID NO: 1416 - protein, 483 aa, Sorghum bicolor
MLGTTVIIPSSLVPQMGGGNEEKARVVQTILFVAGINTLFQTFFGTRLPVVMGGSYIFVGPTISIILAGRYSNEADPHEKFLRTMRGTQGALLIASTIQIILGFSGLWRNVVKLLSPLAAVPLVSLVGFGLYELGFPGVAKCVEIGLPEVFLLVVFSQYLSQVLDFGKSVFSRFSVLFTVSIVWLYAYILTIGGAYKNSPPKTQVHCRVDRSGLISGAPWISVPYPFQWGAPTFDAGEAFAMMMTSFIALVESTGAFIGASRYASATMIPPSIISRGVGWQGIGLLLDSFFGTATGTSVSVENIGLLALTRIGSRRVVQISAGFMIFFSVLGKFGALFASIPLPIFAGMYCLFFAYVGGVGLSLLQFCNLNSFRTKFIMGFAFFMGLSVPQYFNEYTAVASYGPVHTGARWFNDMINVPFSSKPFVAGLVAYILDNTLQIKESAVRKDRGNHWWEKFRSFKKDARSQEFYSLPFNLNKFFPSV

SEQ ID NO: 1417 - DNA, 2040 bp, Sorghum bicolor
atgcgacgggacgacgccggcggcggaaccgggttccacgacttgtttgactcggtgcgtcgctccatctccttccggcccaccgccgccgccgccgccccggaagcccccgcgggcccatgcggcgcgggggccggggggatcggcgtgcggatcagctcttgcctccggaagtcgcgggggatggggctgctaggtctcatcaccaaaagcccctcgccgccacgccgtatgctgccgcctgtgcccgacgagtcgggcggtggcagcggaggagggagtgggggcgaaggcggaggtggaggtggagaggagaacccgccgatccggtggcggaagggggagctcatcggggccggtgcgttcgggcaggtctacctcgggatgaacctggactcgggcgagctcctcgctgtcaaacaggttttgatcggcaggagcaacgcgacaagggagaaggcccaagctcatattaaagagcttgaagaagaagtgaagctgctcaagaacctgtctcaccccaacatcgttaggtatcttgggactgttcgggaggaagatacgctaaacattttgctggaatttgtccctggagggtctattcagtcacttttggggaagctcggttcattcccagagcctgtcattaagaaatacactaagcaaattttgcaaggattggagtatctgcatagcaatgcaataatacatagagatataaagggtgcaaacattcttgttgataataaaggttgcatcaagcttgctgattttggggcatctaagcaagtggcaaagttggctactgtgacagcagccaaaacaatgaaaggcacaccgtattggatggcacctgaagtcattgttgggagtgggcatagcttctctgcggatatatggagtgtagggtgcacagtaattgaaatggccaccggcaaaccaccatggagccagcagtatcaagaggttgctcttctatttcatgttggaaccacaaagtcgcatccacctatacctgaacatctatcaccagaggccaaagattttctgctgaagtgcctgcagaaggaaccagagctgaggtctactgcaccggacttattaaggcatccttttgtcactggaaaattggatgacctgcagccactcaatcatgctgcagacaaggactcttgtaatgagattcctgcagatgatatgccaaatggcttgggtttgaatcattcttccaactggtccactatgaactccaataaatcatcaaaaatcaagcctttatgggagggtagctgtgatgatgatgtcatgtgtgagtttgctgacaaggatgactatgcagcagttggatctagctataatcctatgtcagaaccatttgatgactgggaaaacaagtttgacataagcccagagcaaaattctcatcaaccaatggaatttggtgaattggccaaacatgctgaaagcagcataactgagaatgattttacgttccctgttgagggaagttgcgaagatgatgatgtacttacagagtcaaaaataaaggcatttcttgaggagaaggcccttgacctgaaaaagctacaaacacctttgtatgaggagttctacaacactgtgcatggagggagctgtcagggagctgatcaaactcccaagggaaaactcccaattagtccaaaattgccccctcgaggaaagtcacctccaagtaagacatgtggaggtgcatgcgatactttgactaacacagctcccgagagctgcagcaagcaatttccaagaagtagtgtggtggagagcagccgaattttgagagaaattgcttctcctcaactcaatgagtttgtggataaactccatcttgatgcccaagatagcccaagcatcagcttcaccgaaaggcagaggaagtggaaagaagagctggaccaggaacttgagcgggagagagtgatgagattagctggctgtggtaaaacaccatctccgaatagaggttccaacgtgaaaaaggagtgtcatgctgaccattga

SEQ ID NO: 1418 - protein, 679 aa, Sorghum bicolor
MRRDDAGGGTGFHDLFDSVRRSISFRPTAAAAAPEAPAGPCGAGAGGIGVRISSCLRKSRGMGLLGLITKSPSPPRRMLPPVPDESGGGSGGGSGGEGGGGGGEENPPIRWRKGELIGAGAFGQVYLGMNLDSGELLAVKQVLIGRSNATREKAQAHIKELEEEVKLLKNLSHPNIVRYLGTVREEDTLNILLEFVPGGSIQSLLGKLGSFPEPVIKKYTKQILQGLEYLHSNAIIHRDIKGANILVDNKGCIKLADFGASKQVAKLATVTAAKTMKGTPYWMAPEVIVGSGHSFSADIWSVGCTVIEMATGKPPWSQQYQEVALLFHVGTTKSHPPIPEHLSPEAKDFLLKCLQKEPELRSTAPDLLRHPFVTGKLDDLQPLNHAADKDSCNEIPADDMPNGLGLNHSSNWSTMNSNKSSKIKPLWEGSCDDDVMCEFADKDDYAAVGSSYNPMSEPFDDWENKFDISPEQNSHQPMEFGELAKHAESSITENDFTFPVEGSCEDDDVLTESKIKAFLEEKALDLKKLQTPLYEEFYNTVHGGSCQGADQTPKGKLPISPKLPPRGKSPPSKTCGGACDTLTNTAPESCSKQFPRSSVVESSRILREIASPQLNEFVDKLHLDAQDSPSISFTERQRKWKEELDQELERERVMRLAGCGKTPSPNRGSNVKKECHADH

SEQ ID NO: 1419 - DNA, 654 bp, Sorghum bicolor
atgacggcggtggagctcaggatcgggccgctggactggctgatggatgaggaggtggacgaggacgagagcccgggggtgggagatgaggatggcacggacgaggactgggctctggatatggagaagaaggggaggagaaagcggaagaggtccacgcctccgagacgctcgggacccaagcggccgcggcgctccgctccggcggtggcgcccgagccggcttcgcccgcgcgttcaccgtcggagccgtgcctgggggggacacccgagccttcgccagaagagggcttcaatgctgctgtgacggcgacggagggagtcaaggaggaagacgggttgaggaaggaggaaggggagaacgtggctccgagtccgagcaccagtggcagaggcggcggcggcggcgggaggaagccgggggctaggaggtcgtgccaccggtgcaagacggtcaggcctccggaggagacgatcaggtgcaagcgttgtgacgtgaggatctactgcgtccgctgcgtcacgaacaggtacacgacgatgtcagtggatgatgttaaggagcagtgcccctcctgccgtggactctgcaactgtacctcatgcctcaacaaggataagcagcagcttcgacccgaggtgaccgccttctga

SEQ ID NO: 1420 - protein, 217 aa, Sorghum bicolor
MTAVELRIGPLDWLMDEEVDEDESPGVGDEDGTDEDWALDMEKKGRRKRKRSTPPRRSGPKRPRRSAPAVAPEPASPARSPSEPCLGGTPEPSPEEGFNAAVTATEGVKEEDGLRKEEGENVAPSPSTSGRGGGGGGRKPGARRSCHRCKTVRPPEETIRCKRCDVRIYCVRCVTNRYTTMSVDDVKEQCPSCRGLCNCTSCLNKDKQQLRPEVTAF

SEQ ID NO: 1421 - DNA, 1278 bp, Sorghum bicolor
atgaatggcccaatagaggacattgcaacagagcttggttttcaaggaaatccgttcctccaaggtcttgtggtgagcatattcattgttggtgccttttttgggagcttaggctcatctgcattagtagataagtttggctgcaaaaggactcttcagatcgtcagtattccattgattattggagctctccttagtgcgcaggctgattctttggatgagatgcttttgggaagattccttgttggcatcgggattggcgtaaacactgttcttgttccattgtacatctctgaggttgctccaacaaaatataggggcactttgggaactctgtgtcaaattggaacatgtctaggcataattgctgcactttctttggggataccttctgagagtgatccacattggtggcgaacaatgctttatgctgcatgtgtacctggggttcttattgttgctgggatgcaatttgctgttgagagtccgcgttggcttgccaaggttggaaggttcgatgatgccaaaaaggttgtagagagcctttgggaaccttctgaagttgagaagtccatggaagagatcaaagccgttgtggtaaatgatgattcacggggcagctggtcagaccttctggtggaaccacataacagagttgcattgattggagggtcccttttctttctgcaacagtttgctggaataaatggtgttctttacttttcatcgttgacattccgtgatgttggcattacaagtggtgctttagcaagtttatatgttggaataaccaactttggaggggcactagttgcttcaaatttgatggacaagcaagggcgaaagaaacttttgataggaagctaccttggaatggcttttgcaatgttccttatagtatatggtattagcttcccgcttgatgaaggagttgcccacagcctttcaatcgctggaactcttttgtacatttttacttttgcacttggtgctggaccagttaccggtatcattataccagagctcagcagtgctcggacacgctcaaaagttatgggcttcagttttactgtgcattggatatgtaactttctggttggactatattttctggagcttgtgaacaagtttggggttggagcagtctatgcaggttttggtgcggtctccctgctgacagcagtctttgcctacaatttcatagttgaaacaaaaggacgttcgcttgaggaaattgagatgtccttgaacactgctacccctggcaagcaagagtag

SEQ ID NO: 1422 - protein, 425 aa, Sorghum bicolor
MNGPIEDIATELGFQGNPFLQGLVVSIFIVGAFFGSLGSSALVDKFGCKRTLQIVSIPLIIGALLSAQADSLDEMLLGRFLVGIGIGVNTVLVPLYISEVAPTKYRGTLGTLCQIGTCLGIIAALSLGIPSESDPHWWRTMLYAACVPGVLIVAGMQFAVESPRWLAKVGRFDDAKKVVESLWEPSEVEKSMEEIKAVVVNDDSRGSWSDLLVEPHNRVALIGGSLFFLQQFAGINGVLYFSSLTFRDVGITSGALASLYVGITNFGGALVASNLMDKQGRKKLLIGSYLGMAFAMFLIVYGISFPLDEGVAHSLSIAGTLLYIFTFALGAGPVTGIIIPELSSARTRSKVMGFSFTVHWICNFLVGLYFLELVNKFGVGAVYAGFGAVSLLTAVFAYNFIVETKGRSLEEIEMSLNTATPGKQE

SEQ ID NO: 1423 - DNA, 1386 bp, Sorghum bicolor
atgatccatgcaatcatatacgtgaagtttcataggaaggactgctataatcatggtcctgctttccgtgcttggatggaagccattaactcatgccgcaaacaggattgccagagaccagatggtgggtacaatatcaccactcgtcatgatttcatcccagaagagcaccatagcttcaagggtgtgctgtggaagtgcgggtcttgtggtgatacacttctgaggcccataaaccagggtcctccatctaatgcctgctgcattgagaacgatgacatcagtgcatcctggagtggcagcaacgggaaacctcagggaagtagctcctcgaagaaagcagacaagaggtgcaggcctgaaatggttgggaaaacacttgttatgcatgctgcaccccaaggaaaaccaaatcaaaaccatggattggttgcaacggtgaagcgtgagcctgtgtccgtgggaggctacaatgatgcaaaatcacaggggagagatacatcaaagagagctggcaagcgccataagcctgatgatcttcaggaatccagtgttctcccttctgcacccctgggaacaccaaaactgaagcatgcattggttgcaacagagagtaacaaagtctcctcagcagagtgttgcaacggtgcaaaatcaccaaaaaccattacgtcaaagaaagcaggagagcagcatgagctccagattgctcagaaagcctgttctcagccagctaaccctcagaaaagactgaagcaagaccgggttgcaccggaaaagaaagaactttcccatttgatgggctgcagcaacgagaagttattggatatgagctcctcaatgaaggcatacaggcagcatgagcccgaagacattaaggaagccactgttctgccaactgtccctggaatcaaacccatggcatcagagaagcagcgaaagggaaaatgcaaaaggaagcctgtgaaggaaaaggagaggaagcctgtgaaggaaaaggagtatgctgtgatgagtgcatggctgaacttctatgaatcagataggtcaagtggatcgcccgagccccttgtaaacaaaagaacagagcggaggaggagagaaagagaaagagcaaagatgctgacttattcacggtcaaagaagattagaagtgagccatcagtcaactctaggacatatgcctctgccagtagccacagaatcgagatggcaccacaagatagatcgatgcaacagtcccggccaccatctccatgctcagaccatgcagttggtactactgctaaccaggtggtggtgactccagcaactggagatcagtcgcagccatctgtgccatgcctggatgcccctgagatgatagtaatttctgatgatgagtga

SEQ ID NO: 1424 - protein, 461 aa, Sorghum bicolor
MIHAIIYVKFHRKDCYNHGPAFRAWMEAINSCRKQDCQRPDGGYNITTRHDFIPEEHHSFKGVLWKCGSCGDTLLRPINQGPPSNACCIENDDISASWSGSNGKPQGSSSSKKADKRCRPEMVGKTLVMHAAPQGKPNQNHGLVATVKREPVSVGGYNDAKSQGRDTSKRAGKRHKPDDLQESSVLPSAPLGTPKLKHALVATESNKVSSAECCNGAKSPKTITSKKAGEQHELQIAQKACSQPANPQKRLKQDRVAPEKKELSHLMGCSNEKLLDMSSSMKAYRQHEPEDIKEATVLPTVPGIKPMASEKQRKGKCKRKPVKEKERKPVKEKEYAVMSAWLNFYESDRSSGSPEPLVNKRTERRRRERERAKMLTYSRSKKIRSEPSVNSRTYASASSHRIEMAPQDRSMQQSRPPSPCSDHAVGTTANQVVVTPATGDQSQPSVPCLDAPEMIVISDDE

SEQ ID NO: 1425 - DNA, 807 bp, Sorghum bicolor
atgttgccttaccctaaccctcaccatttcggcgtctcccaagaacccccacacccaaaccctaccagcttccccatgcttccgccgggcgcgcatctggatcagcagcactacgtggaccatcacttcttccccggccacggccacttcaactccgagacactggaggcggtgctgaggccgacgcgcgctgctccagagtgcgaggccgcagtggcggcggcggcgcagcagggtggaagacgaaacggtgtgcccgccggcggcggccagggccagggccacgcccgggcgcggaagcggccgttccggacggacaggcacagcaagatccggacggcgcagggcgtgcgcgaccgccggatgcggttgtccctcgacgtcgcgcgcgacttcttcgcgctgcaggaccggctcggcttcgataaggccagcaagacggtggactggctgctcacccagtccaagccggccatcgaacgcctcgccgccaccgatctctcccagcgaagcgtcggcggcggcagcgacgacgcagctttgtcacccccgacgtcaggggcggcggctgatggaccaggtaagaggggaggagttgccgagaagttgagctctagaagtggtggatcggcgtccatggagatggagcacacctgcgacctggaccgcctcgtgtccgcggcaccggtgcttcgggagtactactacggcctcagcgagatgatgagcaacgacaatggaggggacggcgacgacgatggtgagtacgaggaagacggtgatttcctggacggtatgcaatattag

SEQ ID NO: 1426 - protein, 268 aa, Sorghum bicolor
MLPYPNPHHFGVSQEPPHPNPTSFPMLPPGAHLDQQHYVDHHFFPGHGHFNSETLEAVLRPTRAAPECEAAVAAAAQQGGRRNGVPAGGGQGQGHARARKRPFRTDRHSKIRTAQGVRDRRMRLSLDVARDFFALQDRLGFDKASKTVDWLLTQSKPAIERLAATDLSQRSVGGGSDDAALSPPTSGAAADGPGKRGGVAEKLSSRSGGSASMEMEHTCDLDRLVSAAPVLREYYYGLSEMMSNDNGGDGDDDGEYEEDGDFLDGMQY

SEQ ID NO: 1427 - DNA, 768 bp, Sorghum bicolor
atgggagccctgaatggtagaaacccttctaccgttttggatggcctctatggggtgcagcttggtgaccgtccatcgcagccggcacaaactgaggatgaagctctccggaccacgaccaccgttgtagagtcatcagcttgcgaacaccacaagagtggtacaacgcaacaaagattgctgatccgaagagtatggcagcagataccctcttgcttgaagcccatccactgcaccattacatgtgacaagcatgctggtgagactattgcgaatgtcgtcacctctctgcccttcattgttcttggactgcagactccaaggaagaatttgaacaccgctatctacgcgaattcgctggttggggtgggagtagcttcaagcttgtatcattcttccaaaggagaaatccgaaagtttctgcgctgggccgactacactatgattgctaccaccacactttgtttgtcgagagcacttagcaatgagaacccaagattactaatgacagcatcagcattgctcctgccgttccagccattgatggtttcagctgtccacactggactgatggaggtttcctttgcaagaagagcatcaattgaaccagagctcaggatggcacataacctgcacaaaatgtcatctctgctgggaggtgcgctgttcattgccgacgattgcttccccgagactccctatatccacgctgcatggcatcttgctgctgcgattggcattggcacttgcaacaagcttcttgaatga

SEQ ID NO: 1428 - protein, 255 aa, Sorghum bicolor
MGALNGRNPSTVLDGLYGVQLGDRPSQPAQTEDEALRTTTTVVESSACEHHKSGTTQQRLLIRRVWQQIPSCLKPIHCTITCDKHAGETIANVVTSLPFIVLGLQTPRKNLNTAIYANSLVGVGVASSLYHSSKGEIRKFLRWADYTMIATTTLCLSRALSNENPRLLMTASALLLPFQPLMVSAVHTGLMEVSFARRASIEPELRMAHNLHKMSSLLGGALFIADDCFPETPYIHAAWHLAAAIGIGTCNKLLE

SEQ ID NO: 1429 - DNA, 1833 bp, Sorghum bicolor
atgttggaccacctgatttccatactaatggatgcagttggagtgttgccagctaaggatctgcaggtgccggccgaagaggcttttgggttctcaactcactcagcgacggtctgtgtggtttgcaaactggccatcccatcgttggaagcctcatggaaacctgacagctgtggccatgccatctgcattccctgcttctggcaatatgtacctgagatggaggccactgatgggctgtctaggtgtgcagtgccttcttgtcaatctttgtgcaagcccgagaccactcaggggatgatcaatgtgggtcatggcaccttgatctcagttgcagccataaacagtggcaaagggaaagaaccgttggatggagtgcttgaggagctaggccaatgctctcgtggtgtggatccagtgcccagcagtgacttctactgtgccatatgcatggagaccgtgcatgtcggagagctcttccccgtacccgggtgcacacacctcttctgtgtcagctgcatgagccagtacatcgctgctaaggttgagaataatgtgttctccattggatgccctgaaccgggttgcaatgatggtgtgctggacccagaggtgtgccgtgacatgatctcgttgcagctgttccagaggtggggcgatgcactctgtgactcagcactgggggcattcgggttccactgccccttcaaggactgctcggcattgctggtcaatgaacgtagccctgacgaggcggtaataaggcaaaccgagtgcccacactgctcacggatgttttgtgcacagtgcaaggtggcatggcactccggcgtaacatgtgaagatttccagcagctcaggaatgatgaacagggccgagatgacccactgcttaagaaggtcgtcgtgcatgagaacaagtgccagacgtcccagcagctcaggaaggatgaacagggccaagatgactcgctgcttatgaaggccgtgcatgagaataagtggcagaggtccctccggtgtttggtagctacatgtaaatctttgtggaaggcaaatcggatgatcgatgtgggtcatagcaccttggtctcaactgaagacatggacagacagaaacagaaagacatggataatatgcttcaggagctaggccaatgctgccctggtgggtatgcgattgccagcagtgaattctactgcaccatatgcatggagtcagtggacgtcagggagctcttccccgtttctgggtgcacacacctcttctgcatcaactgcgtgagccagtacatcactgcaaaggtcgaggatagtgtgttgtccattggctgccctgaaccgggatgtaaggatggtgcattggacccagaagtgtgccgcgacgtgatcccgctgcagctgttccagaggtggggagctgctctctgtgactcggcgctaggtgcattcaagttctactgcccctttaacgactgctcggcattgctggttgacgaacgccgccacggtgaggcagcgataacacaagctgagtgcccacactgctgccggatgttctgtgcacagtgcaaggtggcatggcatgacggtgtcacctgcgcagagttccagcggcttggcaaggatgagcggagcaggaatgacctgctgctgaggaaggtcgcggagcgaagcaactggcagaggtgccccaagtgcaaaatgtacgtcgagaggaccgagggctgcgtgtacatcgtctgcaggtgtggacatcgcttctgctatctctgcgcatccccaatgtcacaaggcatccatcgttgcagtaggtgcaagaggacctggtga

SEQ ID NO: 1430 - protein, 610 aa, Sorghum bicolor
MLDHLISILMDAVGVLPAKDLQVPAEEAFGFSTHSATVCVVCKLAIPSLEASWKPDSCGHAICIPCFWQYVPEMEATDGLSRCAVPSCQSLCKPETTQGMINVGHGTLISVAAINSGKGKEPLDGVLEELGQCSRGVDPVPSSDFYCAICMETVHVGELFPVPGCTHLFCVSCMSQYIAAKVENNVFSIGCPEPGCNDGVLDPEVCRDMISLQLFQRWGDALCDSALGAFGFHCPFKDCSALLVNERSPDEAVIRQTECPHCSRMFCAQCKVAWHSGVTCEDFQQLRNDEQGRDDPLLKKVVVHENKCQTSQQLRKDEQGQDDSLLMKAVHENKWQRSLRCLVATCKSLWKANRMIDVGHSTLVSTEDMDRQKQKDMDNMLQELGQCCPGGYAIASSEFYCTICMESVDVRELFPVSGCTHLFCINCVSQYITAKVEDSVLSIGCPEPGCKDGALDPEVCRDVIPLQLFQRWGAALCDSALGAFKFYCPFNDCSALLVDERRHGEAAITQAECPHCCRMFCAQCKVAWHDGVTCAEFQRLGKDERSRNDLLLRKVAERSNWQRCPKCKMYVERTEGCVYIVCRCGHRFCYLCASPMSQGIHRCSRCKRTW

SEQ ID NO: 1431 - DNA, 3474 bp, Sorghum bicolor
atggagcggatccacgtagcggtgcgctcgcggccgctccccccggaggacgtgcggagcagcccatggaggatctcgggcaacgccatcgctcactccgcgcagtcctccacccgcttcgagttcgacaggatattcggcgaggagtgccgcactgccgaggtctacgagacccgcaccaagcaaatcgtcgactccgtggtgcgagggttcaatggcactgtttttgcatatggtcaaactaacagtgggaagactttcacaatgagaggatcggctaatgagcctggaataataccgcttgcagttcatgacttattccagcgtattcaagagcatatggacagagaatttctcgtgaggatgtcctatatggaaatttacaatgaagatattaatgaccttcttgtgccagaacatcgaaaattacagattcatgagagcattgagaaagggatctttgttgctggtttaaaagaagaaattgttacatgcgcggaacaggtcatggatttcatgtcttttggagaatcccaccggcatatcggggagacaaacatgaatctttacagcagtcgttctcacactatatttcgcatggtaatcgagagcagagaaaaaagtgacgacaatgaagctgaagactcttgtgatgctgtacgagtatctgttttgaaccttgttgacttagctggctcagaacgcgctgcaaagactggtgcagagggtgtgaggcttaaggagggttctcatattaacaaaagtctcatgactcttggtacggtcataaaaaaacttagtgaaggcattgagggtcaagggggacatgtgccataccgagatagtaaactgacaaggatattacagcctgctctgggtggaaattctaacacagctatcatctgcaatataacacttgcacaggtgtcactatcttttcttttgtacacttttcatgtccaggtccacgctgatgagacaaaaagcagtttgcaatttgcgagtagagcattacgtgtaacaaattatgcatgcgttaatgagattttgacagatgctgcattattaaaacgccaaaggaaagaaatagaagagcttcgagcaaaacttagaagtgaattggaaaaggaaagaatagctttagagttggaggaggaaaagaaagctaaagagcagcgtgacagatgcttgattcaacaggcaaagaaaattgaaaatcttagttcactggttttaaattcagacagagatgacaggagtgctgcttttagtaagaacaaaagaagggtaacatggtgttctggaccaaatgcaaagcaatttggtgttgaggatttaggaactgtccaggaaggctctacaagcagcacaattagaaatagacgggatatgggaatgccaccactttttgaagagttaatgaaagaaagtaatgatgagccttgtgctaatgcttactcatctggtgacatgtccaaagacagtgaagatgtctctcttcctgactcgcatgctttgctgcatgttaccaaccgaagaaagccaaatgcagtgaaaaaatcagatcaagagcaattcttggggagagctggtgaactattaataccccaggacccctgtgatgggaatgatgctctacatcacaaaaacactgttccttgtgtagttagtagcttatctgctcgagaatctgaagccattcttgtcatcaaacaacttcaagatcagatcaagctgttggaggcagagaagagttctatccagactaatttggatgctgttcttgagctggcaactcaacagaaggtttcatttaatgaggagtatgaagagattgctctggctgcagaagagcaaacaaaagtcgctaatgagaacctgtccacactatctgctactgtcaaatccaaacaggaactagcctatgaattcctcagtaatttattgatggagactcaaggaataaatgtggagttggatcagtggagaaactcagttgacagtgctctttcttttattgatgaactctgtcagaatctctgcattatggcacaaggaattcgtgaagtaaagcactctgctcatgaagatagtgcacggtctggttctgtgatcagggactatgagaaactgtcaacctgtttgatggacaaagtttgcaaacttgaattggagaaggactgtactcttcaacatgaaatggagaaggatgccattctcttagagcacctaaatctccagaaggaagtatcaatcttgtcatcatcttctttgatgaaagaaaaggaatctatccgaaaggaacttgatagaactaaaacaaagttaagagagaccgagaacaaacttaagaattccattcaggagaaaataaaacttcagagtgagaaagcagaggcacacaaagaaattaagaaattgcaaagccagagaactttgcttgaacgtgatttacggaaacgcgattcagctagtgttgacaaaaggcatgagctgaattccatgccacaggaactttctggagcttttgagcacatgcaggaggactaccaaaatcttgagatgcatgcttttgatatggatgtggaaatttcttctttacaagaagctctagtcacttcaattgctgaaaaggacgaagcattgtctaaagtagagcttatgacatctgaactagaagatcttgcgaataaattgaactcaacggaatcagaaagaaactcctttagcaatgagattgcactcttgaccaaaaagttagatgcatccgaatctacccttaaaagtttggagacttctctcaattctgtatcaagggaaaaggaagttttgggaatgcaatttactgatgcccttttggacatggaatctgaaagatcaatttggacagcaaaggagaaagaatacctagaagctaatcatagattgaacatctgccttgatgagaaccacaaactttcagaagatttgataaaggtgaggcaagagctagggtgttgtagagaacagtgcaaaactctagaggataaactggcgctttccgtggagagtgacatgaatgagaaaggaatgaaatgcagaaatgtctcatgcatcagtggggcttgtaaagaatccagccaaattgtggagaaaggaagaacaatatctggtgctgcgtgtgaaaatttaatacatgccaaagatacaatagatgagttgaattctaggatatctgtcatggaagtcaatatgaaaaatgatgctgcagctaataacaaagagaagacaaagcttcgcatggagattcgatgtctgcgcccacaacttgacgcccatcgtggtcggctcaaagaagcaatggatgagatgaagaccatggatgccaaataccaagaagcatccaccatgctgaagagggagctttctcagaatgctcgcgaagtcctgaggttgagagggatgcttaaagaattacagagcgcatcaaactga

SEQ ID NO: 1432 - protein, 1157 aa, Sorghum bicolor
MERIHVAVRSRPLPPEDVRSSPWRISGNAIAHSAQSSTRFEFDRIFGEECRTAEVYETRTKQIVDSVVRGFNGTVFAYGQTNSGKTFTMRGSANEPGIIPLAVHDLFQRIQEHMDREFLVRMSYMEIYNEDINDLLVPEHRKLQIHESIEKGIFVAGLKEEIVTCAEQVMDFMSFGESHRHIGETNMNLYSSRSHTIFRMVIESREKSDDNEAEDSCDAVRVSVLNLVDLAGSERAAKTGAEGVRLKEGSHINKSLMTLGTVIKKLSEGIEGQGGHVPYRDSKLTRILQPALGGNSNTAIICNITLAQVSLSFLLYTFHVQVHADETKSSLQFASRALRVTNYACVNEILTDAALLKRQRKEIEELRAKLRSELEKERIALELEEEKKAKEQRDRCLIQQAKKIENLSSLVLNSDRDDRSAAFSKNKRRVTWCSGPNAKQFGVEDLGTVQEGSTSSTIRNRRDMGMPPLFEELMKESNDEPCANAYSSGDMSKDSEDVSLPDSHALLHVTNRRKPNAVKKSDQEQFLGRAGELLIPQDPCDGNDALHHKNTVPCVVSSLSARESEAILVIKQLQDQIKLLEAEKSSIQTNLDAVLELATQQKVSFNEEYEEIALAAEEQTKVANENLSTLSATVKSKQELAYEFLSNLLMETQGINVELDQWRNSVDSALSFIDELCQNLCIMAQGIREVKHSAHEDSARSGSVIRDYEKLSTCLMDKVCKLELEKDCTLQHEMEKDAILLEHLNLQKEVSILSSSSLMKEKESIRKELDRTKTKLRETENKLKNSIQEKIKLQSEKAEAHKEIKKLQSQRTLLERDLRKRDSASVDKRHELNSMPQELSGAFEHMQEDYQNLEMHAFDMDVEISSLQEALVTSIAEKDEALSKVELMTSELEDLANKLNSTESERNSFSNEIALLTKKLDASESTLKSLETSLNSVSREKEVLGMQFTDALLDMESERSIWTAKEKEYLEANHRLNICLDENHKLSEDLIKVRQELGCCREQCKTLEDKLALSVESDMNEKGMKCRNVSCISGACKESSQIVEKGRTISGAACENLIHAKDTIDELNSRISVMEVNMKNDAAANNKEKTKLRMEIRCLRPQLDAHRGRLKEAMDEMKTMDAKYQEASTMLKRELSQNAREVLRLRGMLKELQSASN

SEQ ID NO: 1433 - DNA, 3246 bp, Sorghum bicolor
atgtcatcgtcgtcgtcgtcgccgccgccgctttctcttcttctctgcgtgtcgctgctgctctcctccacggtgcagcaaccgccttccacccaggcccagcaagcagcatcgcaagccctcgacccggccttcatgttcggctggctcaacaacaagcgggactacaccgccggcgacaccgcggtcatccaggccatgcccctgaacgtccgcgccgccgccgccgtccgcgcctcgctgtccttcacgttttcggtgaacggcaaggaaggcaacagcaggtacgtcacggacgtggcggccaacatcggcgacgacccccacgcctggaccatctccttcgtgcccctgcgcgccgggaacttcgccgcgctcgtcggcgagaagcggttcgtccccgccgagtggccgctcacgttcacggtcgccgcggccgccatgcacccgtccgcgtcgcgggcgtcgtggacgttccccggccgccgcgtcgtcgccgggtccagggcgttcctgtccatcttcccccgggacgccttcagcaatgccatcgcgcggggacccgacatgccggactacttcagggtgtcgggctcctacctcaacgggtcgtccgtggagctctgggattttcactacaacgggtggacggaggatggacgcatcggcgtcgagttcaggtcgagtgtcgcaggcgacttgttggtgcatgtttacggggatggtagggagctacgtgattcgcctctattgctcacagtgaatccaggtgtgcttaacatagcagtcagcacatgcagctggaagcatggaatcaatactttgcaggtgtcctccaagctggagatattcatatatcagagagactcctttggaaatattgttccagatatccatccattcgatgctcaagtagttgataaagcctcaaatttgaccatcccaatagtggatcttgcgatggaagcagtagctgatggagtgcagctcctatcttttaatgttgtagaggctggacagttttctctcacaattttcgatgctccactggacgaaagggtttccaacactgtgcacatgtttgatgttttcgtaggatattgcaatggatcaaacagttttgcaaatgggtctggtttggcaaattctagtgctggctcaacgtcatctttttctgttttcttgttggatcactacagaatcccttctccagttgaaacggcaaggatgcaagtgaagattttgggtaaaaatgccacatcttacgcagacccaatcataacacctggaagagaatcaaatggtgctatcaatatgtctttgtcaagtgttgtcaagtttgaccccaaagtaaaattatcagttgaaaatgaagttgttgttcgacttgttgactcattcatgaacccggtggtgtctttcaagtcaaaattgaaatttcagctgatatctgcaagcatcacaagtaccactagttttgtggcaaaagaatttgttgacaatggagatggatcatatactgctcattatgtggcaaggggacttggttcatatggcatatgtgttctttatgaggataaacagctgactccatgtccattcgacgtcaccgttcttgcagatgaatacttttcagatgttaaaaatgatactgtttcagtgtgggaggatgaatccacttccttcgatgtattgtcaaatgaccgcattgcaggaagtaaagtggaaatagctaactcatcttctccacttcatgggtcagtccagttcagcaaaacctaccgttacacacctttcgaaggattctttgggaatgactcattctcgtatacggtatgtgatgagcataacaatgtcgtcactgcaacagtcttcatatctgttctctgcagaccacctcagttcatatctttacccgacaagttgcatgttactgaagatacaatcagcccactatttgctggatttccggggatgaaaatggtgtattcagatgcaacagaaaatatatctgttacagtgacagcagagtccgggagtgtgttctttgatccagtgcgaattaaacttcaacagctatcagatagtatactttcgattagcagcaaagtgggtactaatcaagatcctgactccccctggttttgtacaagccctattttttacaaagatcttgctagtcctttgcgtatggtaaccatgcatatcaatatgtgcagaaacgaagacttccacggaaacgatgttatatctctacatgcctcgagcagaaatggtgtacgaaaaactcagttcccaaccttcgttgaaccaatcaatgatcctccggtgatacttgctccaagttcaattttcttgagtgggaaccaatcaatggaaggacataaaatatttgataagcacagggatacattccaattctccattgttgaacctgatcttcacaatttcccagagaacaagtcttcctttttcctagtgctctcgctagaagttttggagggaacgttagccaccaccttgccatccagtgccatcgccgctgcatcgatgaagactgaaggcattgacggttggcagtcgcttcagacatatgtgaccatcgcaaatcactttgtactgaaaggaactgccatcaggttccatgggagcgtccagggctgcaacaatgcaatgcagcagttgcattacaaacagatatgtgactctctcttacagggtccaaggcatggaacaacgttgtccatcactgtgaacgacctgggaaaccatggatgctatcctgactgctcagagagaatgacgatgccacttaccactgccaagactgttcgtctagttccagtcatcaaaacaaaacatgtgaactctaggcgaactatcttgtttagatggttggcagcagctgggatcgtgataatgttatgccttggctgtgttctcatgtgttgcctatgcaaatgcatgagagctttgaagagtacacgaagatacaaaatctatggtaaaattcgcacaacggagaagaccccatttcgtcagaatatgggtgcttcaccatcgcaatgcgaggaagtcggatattgccctgctactgcaactgtgcccaagctcggtgcaaaccgatcaactcttcgtcagaggtctccacgttcatgcaagcaagaactggaactccagccagtctccgggaccatgagcaatagaaatgaagaaagccttcctgttacagacaaggacaaatag

SEQ ID NO: 1434 - protein, 1081 aa, Sorghum bicolor
MSSSSSSPPPLSLLLCVSLLLSSTVQQPPSTQAQQAASQALDPAFMFGWLNNKRDYTAGDTAVIQAMPLNVRAAAAVRASLSFTFSVNGKEGNSRYVTDVAANIGDDPHAWTISFVPLRAGNFAALVGEKRFVPAEWPLTFTVAAAAMHPSASRASWTFPGRRVVAGSRAFLSIFPRDAFSNAIARGPDMPDYFRVSGSYLNGSSVELWDFHYNGWTEDGRIGVEFRSSVAGDLLVHVYGDGRELRDSPLLLTVNPGVLNIAVSTCSWKHGINTLQVSSKLEIFIYQRDSFGNIVPDIHPFDAQVVDKASNLTIPIVDLAMEAVADGVQLLSFNVVEAGQFSLTIFDAPLDERVSNTVHMFDVFVGYCNGSNSFANGSGLANSSAGSTSSFSVFLLDHYRIPSPVETARMQVKILGKNATSYADPIITPGRESNGAINMSLSSVVKFDPKVKLSVENEVVVRLVDSFMNPVVSFKSKLKFQLISASITSTTSFVAKEFVDNGDGSYTAHYVARGLGSYGICVLYEDKQLTPCPFDVTVLADEYFSDVKNDTVSVWEDESTSFDVLSNDRIAGSKVEIANSSSPLHGSVQFSKTYRYTPFEGFFGNDSFSYTVCDEHNNVVTATVFISVLCRPPQFISLPDKLHVTEDTISPLFAGFPGMKMVYSDATENISVTVTAESGSVFFDPVRIKLQQLSDSILSISSKVGTNQDPDSPWFCTSPIFYKDLASPLRMVTMHINMCRNEDFHGNDVISLHASSRNGVRKTQFPTFVEPINDPPVILAPSSIFLSGNQSMEGHKIFDKHRDTFQFSIVEPDLHNFPENKSSFFLVLSLEVLEGTLATTLPSSAIAAASMKTEGIDGWQSLQTYVTIANHFVLKGTAIRFHGSVQGCNNAMQQLHYKQICDSLLQGPRHGTTLSITVNDLGNHGCYPDCSERMTMPLTTAKTVRLVPVIKTKHVNSRRTILFRWLAAAGIVIMLCLGCVLMCCLCKCMRALKSTRRYKIYGKIRTTEKTPFRQNMGASPSQCEEVGYCPATATVPKLGANRSTLRQRSPRSCKQELELQPVSGTMSNRNEESLPVTDKDK

SEQ ID NO: 1435 - DNA, 2649 bp, Sorghum bicolor
atggagctggcactcgaggacttctacgccgacgcgagccacgccaactacagcaccagggtcacgctgcacctccgggacaccccggccgggccgagcgccgtcgacgccgcgtccgcaggtgttgatctactaaaaaatgtccgtgtgcaagcaatcgtcgggccacagacatctagccaagctaaatttcttgcagagcttgggaacaaggcatcagttccaatcatttccttttctgcaaatagcccgtcccggtcatccagccagaccccatactttatcaggacggcatggaacgactcctgccaagctgaagctattgcctcacttgtccataaatacaattggagggaagtcatccctatcatcgaggacaatgattccaacactagattcatccctgatctcattgatgccctgggacatgtcgatactcgtgtgcagtacaggtgcaagatccatccttctgctggagaagctgagataaagcatgctatatcaagcttaaaagtaaattggacaagcgtctttgttgtgcgcatgtcatatcagttagcccttaagtttttccagcttgcaaaggatgagggaatgatgggccagggctatgtctggattacagcatatggtttgacagatatcttcaatgtagttggttatcctgcacttgatgtgatgcaaggtgttgttgggattgagccttatgttgaagaaactgtgagactgaacaaattcagacaaagatggcatgagaaatataggttggaaaatcctggtacatcaattaatgagcccataacgtctggtctatatgcatatgatacagtatgggcaatagcattagcagcagagaagggcggatatgttaattcagactttgtgccgtctgaaacaaacaatgggtccactgatttcgacaaaataagtacttctagggctgctgaaaaatttcgtgatgcattcttgaaggttaatttcacaggcattagtgggcaatttgtcattcaggatatgcagttagtatcaacaacttacaaaattatcaatatagctggtcgggagaggagagcagttggtttttggactccaggattgaacatatccagaatttctatcgtatggccaggaggcagtgagacgacacctagaggatggcttttgccagtgaataaaaaactcaaaataggagtacctgtgaaacctgggtttagcagttttataagatctgaagatggtacccccaaggggttctgcattgatgtatttgaggaagtcattggtaaacttccctacaaagttcccaagcattatgtggaatttggaaatggaaaaggagaaagtaatggaacttatgatgaactcgtctacaaagtttatcttaaggaattcgatgcggtagtaggtgacataacaattttggccaaccgttctctatatgtggactacactcttccttatactgagtcaggggtacgcatgctggttccagttcgggaccagagacagaagactgcatggacattcctagaaccattaacagctgatctatggttaggaactggagcctttattgtcttcacaggttttatagtttggtttatcgagcacagaacgaatcaggaattcagaggaccgccagccagtcagattggatcagtcttctacttctccttctcaacacttgtatttgctcatagggagaggattgtgaacaatttatcaagaattgcagtagttctttggctttttgtggtgctaatattgcagcagagttatactgcaagcttaagctcaattctcacggtagaacagcttcaaccaacagtcaccaatatagatgaagttatcagacgaggggattatgttggctacctcaatgattctttcatgcctgagcttttgaaaaggttgaaaattaatgaaacaaaaatgaaggccttcagctctcctgaggagtacaatgacgccctatcaactagaaaagttgccgtcattgttgatgaaataccatacctcaaagtgtttctctcaaagtattgccacaagtacactatggttgggccaacttacaaatttgatggatttggttatgcgtttcctcgaggttctccacttacacctgaaatttcaaggggaatactggaactagcatcaaatggcagaatggatgaactggagaaacagttgtatggtgatacgtcgtgcccagacaaagatgactcccaaacttcaagcagtcttacgttgcatagctttcttgggctgttcataatcactgggacaacttcattactggcactgattttgcatgtaattatttccctttatgatcatcggagtcattggatcaatggcagcggtcagatatcatggcatgaattgcttgctgttctcttcaagatttttcatgagcgtgataatagctctaatactccggataatgaggagcctgaaatggaagatatagatcctccaacagctgagagtccatggagcatgtctaatcacatcatcgagaatgttgattcagacactgatacaggaagcacaccagatggagaaggaactccgggcagggaagtttcgaatcaggatcttggtccaccatcatttgcatacatgcattctgagggggcaatggagtaa

SEQ ID NO: 1436 - protein, 882 aa, Sorghum bicolor
MELALEDFYADASHANYSTRVTLHLRDTPAGPSAVDAASAGVDLLKNVRVQAIVGPQTSSQAKFLAELGNKASVPIISFSANSPSRSSSQTPYFIRTAWNDSCQAEAIASLVHKYNWREVIPIIEDNDSNTRFIPDLIDALGHVDTRVQYRCKIHPSAGEAEIKHAISSLKVNWTSVFVVRMSYQLALKFFQLAKDEGMMGQGYVWITAYGLTDIFNVVGYPALDVMQGVVGIEPYVEETVRLNKFRQRWHEKYRLENPGTSINEPITSGLYAYDTVWAIALAAEKGGYVNSDFVPSETNNGSTDFDKISTSRAAEKFRDAFLKVNFTGISGQFVIQDMQLVSTTYKIINIAGRERRAVGFWTPGLNISRISIVWPGGSETTPRGWLLPVNKKLKIGVPVKPGFSSFIRSEDGTPKGFCIDVFEEVIGKLPYKVPKHYVEFGNGKGESNGTYDELVYKVYLKEFDAVVGDITILANRSLYVDYTLPYTESGVRMLVPVRDQRQKTAWTFLEPLTADLWLGTGAFIVFTGFIVWFIEHRTNQEFRGPPASQIGSVFYFSFSTLVFAHRERIVNNLSRIAVVLWLFVVLILQQSYTASLSSILTVEQLQPTVTNIDEVIRRGDYVGYLNDSFMPELLKRLKINETKMKAFSSPEEYNDALSTRKVAVIVDEIPYLKVFLSKYCHKYTMVGPTYKFDGFGYAFPRGSPLTPEISRGILELASNGRMDELEKQLYGDTSCPDKDDSQTSSSLTLHSFLGLFIITGTTSLLALILHVIISLYDHRSHWINGSGQISWHELLAVLFKIFHERDNSSNTPDNEEPEMEDIDPPTAESPWSMSNHIIENVDSDTDTGSTPDGEGTPGREVSNQDLGPPSFAYMHSEGAME

SEQ ID NO: 1437 - DNA, 639 bp, Sorghum bicolor
atgaaggtgttgctcgttgccctcgctctcctggctctcgcggcgagcgccgcctccacgcttacaaccggcggctgcggctgccagacacctcatctaccaccaccgccggttcatctgccgccgccggtgcatctgccaccgccggtgcacctgccgccgccggttcacgtgccaccgccgccaccacaatgccacccacaccctactctaccgccccacccacatccatgcgctacatacccaccgcatccaagcccgtgccacccagggcatcccggatcctgcggtgttggcggcggccccgtcaccccgccgatcctgggccagtgcatcgagttcctgaggcatcagtgcagcccggcggcgacgccctactgctcgccacagtgccaggcgttgcggcagcagtgctgtcagcagctcaggcaggtggagccgctgcaccggtaccaggcgatcttcggcgtggtcctgcagtccatccagcagcagcagccgcaaggccagtcgtcaccgctcccggcgctgatggcggcgcaaatagcacagcaactgacggcgatgtgcggtctaggagtggggcagccaagtccctgcgcttcttgcagcccttttgccggtggtgtccactattaa

SEQ ID NO: 1438 - protein, 212 aa, Sorghum bicolor
MKVLLVALALLALAASAASTLTTGGCGCQTPHLPPPPVHLPPPVHLPPPVHLPPPVHVPPPPPQCHPHPTLPPHPHPCATYPPHPSPCHPGHPGSCGVGGGPVTPPILGQCIEFLRHQCSPAATPYCSPQCQALRQQCCQQLRQVEPLHRYQAIFGVVLQSIQQQQPQGQSSPLPALMAAQIAQQLTAMCGLGVGQPSPCASCSPFAGGVHY

SEQ ID NO: 1439 - DNA, 381 bp, Sorghum bicolor
atgcctatgatggaggcctcacctgtttactcggtggccagaaatgcatcaggagatgcatggaaggctctgtttgatttagctggagggtttttacgtgagtatgatcaagaagctatggtcaaattcagcgtagatgctattgatgatacagacatagttgaagatgtcctgagaccccgcattgactcaatcggtggacaaataaagaaagtaatactatcaggaacacatctaactccatgtatacaggatgtcaaatggcaagttggttcagaatacactccagcagatgccattgcacaaggattgaaatcattggctctcagtgaaacaagagtcctctcaagaactattgctgattggtttacatccctttaa

SEQ ID NO: 1440 - protein, 126 aa, Sorghum bicolor
MPMMEASPVYSVARNASGDAWKALFDLAGGFLREYDQEAMVKFSVDAIDDTDIVEDVLRPRIDSIGGQIKKVILSGTHLTPCIQDVKWQVGSEYTPADAIAQGLKSLALSETRVLSRTIADWFTSL

SEQ ID NO: 1441 - DNA, 1530 bp, Sorghum bicolor
atgggggccttcgcgaaggaggagcaccagttcctcgccgagctcggcctcgcgcagcgcaacccgggcgcgttcgtatgcggcgcgtggggcggctcgggccccgccgtcacctccaccagcccgaccaacaaccaggtcatcgcggaggtcgtggaggcgtccgtgcaggactatgaggagggcatgcgcgcctgcttcgatgccgccaagacatggatggcgtttcctgctccgaagcgaggagagattgttaggcaaatcggtgacgcactgagagcaaagctccatcaccttggcaggcttgtgtcacttgagatggggaaaattcttcctgaagggatcggtgaggttcaggaaatcatcgacatgtgtgattatgctgtggggctaagtcgccaactaaatggatccattataccatctgaacgaccaaaccatatgatgatggaggtgtggaatccccttggagttgtgggtgttataacggcatttaattttccttgcgctgtgcttggttggaatgcttgcattgctttggtctgtggaaactgtgttgtctggaaaggtgccccaacgactccactgatcactattgcaatgactaaaatagtggctagcgtattggagaagaacaatttgccaggcgcaattttcacatccttttgtggtggcactgaaattggtcaagcaattgccgttgacactaggatacctttggtttcattcactggaagtacaagggctggtctgatggttcaacaacaagttaatgcaagatttggtaaatgccttcttgaacttagcggaaacaatgccatcattgttatggatgacgcagatatccagctagctgtgcgttctgtcttgtttgctgctgtcggtacagcaggacaacgctgcactacatgccgtaggctgattcttcatgaaagcatatatcaaactttccttgatcaacttgttgaggtatacaaacaagtccgaattggggatccgttggagaagggcaccttactgggaccactgcacactcctgcttcaaaagagaactttttgaaaggcgttcaaaccattaaatctcagggagggaaaatcctttttggaggatctgccattgaatcagaaggaaacttcgtgcaaccaacaattgtggaaattacaccttctgcagcagttgtgaaagaagaactctttggtcctgtcctttatgttatgaaatttcagagcttgaaggaagcaattgaaatcaataactctgttcctcaaggattgagcagttctatatttacaaagaggccagaaattatttttaagtggctcgggccccatggtagtgattgtggtatagtgaatgtgaacatacctactaacggtgctgaaatcggtggagcatttggtggagaaaaggcaactggtggtggacgagaagcagggagtgattcctggaagcagtacatgaggagggcgacttgtacaatcaactatggaagcgagctacctctagcccagggaatcaattttggttaa

SEQ ID NO: 1442 - protein, 509 aa, Sorghum bicolor
MGAFAKEEHQFLAELGLAQRNPGAFVCGAWGGSGPAVTSTSPTNNQVIAEVVEASVQDYEEGMRACFDAAKTWMAFPAPKRGEIVRQIGDALRAKLHHLGRLVSLEMGKILPEGIGEVQEIIDMCDYAVGLSRQLNGSIIPSERPNHMMMEVWNPLGVVGVITAFNFPCAVLGWNACIALVCGNCVVWKGAPTTPLITIAMTKIVASVLEKNNLPGAIFTSFCGGTEIGQAIAVDTRIPLVSFTGSTRAGLMVQQQVNARFGKCLLELSGNNAIIVMDDADIQLAVRSVLFAAVGTAGQRCTTCRRLILHESIYQTFLDQLVEVYKQVRIGDPLEKGTLLGPLHTPASKENFLKGVQTIKSQGGKILFGGSAIESEGNFVQPTIVEITPSAAVVKEELFGPVLYVMKFQSLKEAIEINNSVPQGLSSSIFTKRPEIIFKWLGPHGSDCGIVNVNIPTNGAEIGGAFGGEKATGGGREAGSDSWKQYMRRATCTINYGSELPLAQGINFG

SEQ ID NO: 1443 - DNA, 2256 bp, Sorghum bicolor
atggatctgcgtgccccaccaaccaattatcccaaaacttttttatcttccattatcctatggcgtcgtcgtcctgacgcgggggcggcgaagaggaggccggagtcatcatcatcgtcgtcaataaacaatcgcgccagccggaggctctccctctccctctccctctcccgtccaatcgcatcgcccgcacgagcctcatcatcagtccacgaccatcaccatcaccaccaccactcgctgcagcggcccactggactcggccgcgactccgtcgtcgcgagatccagcgccgtcgtcgcgccgcctacgccgacgccgctgccgccgccgacgctgctgccggagatgccgagcccgacgatccggaggctggacgtggcctcgccggtgccggcggacatcgacatcgccaacgccgtcgagccgctcccgatcgccgacatcgcggcggagctcggcctccggcccgaccactacgacctctacggcaagtacaaggccaaggtcttgctgtcggttcttgatgacctcaaggcgcagcaggatggatactacgtcgtggtcggcggcatcacgccgacgcccctcggggagggcaagtccaccaccaccgtcggtctgtgtcaggctcttggcgctttccttgataaaaaggttgtcacatgccttcgtcaaccatcacaagggcctacctttggaatcaagggaggtgcagctggaggtggctacagccaagttatacccatggatgagttcaatcttcatctgacaggcgatatccatgcaattacggctgcaaacaatctacttgctgctgctattgatacaaggatcttccatgaaaattctcagtcagacaaaggactgttcaacagattgtgtccggcaaacaaggaaggcaagaggcactttgctgacgtaatgttcagacgtctgacaaagttgggcatttcaaagacagaccccaatgagcttacaccagatgaaatcaggcgttttgcaaggcttgatatcgaccctgagtccattacatggagacgggtgatggatgtcaatgaccgtttcctgagaaaaatcactattggacagggccctgaagaaaaaggtatggtgagagaaacaggctttgatatatctgtagctagtgaaataatggctgtattagctcttacaacttccctcgctgacatgagagaaaggcttggaagaatggtgatagggaacagcaagtcaggtgagccgataactgctgatgatcttggggttggaggtgcgttgactgtcctaatgaaagatgctattcatcccaccctcatgcaaactcttgaaggcacaccagttttagtacatgctggaccgtttgctaacattgctcatggaaattcttcaattgttgctgataagattgctttgaagttggttgggaagggtggctttgttgttactgaggcaggttttggtgctgatattggaactgagaagttcatggacatcaaatgtaggtatagtggattggtgccacagtgtgctattattgtggccacaattagagctctcaaaatgcatggaggggggcctgaggtggtggctggaaagcctctggatcatgcatatgtgagcgaaaatgtggcccttgttgaagctggatgtgtaaatctggctaaacatatatcaaacacgaggagttatggagttaatgttgtagttgcaatcaacaaatttgcatcagatactgaagcagaaatgaatgtggtgcgtagtgcatcaatggctgctggtgcttttgacgctgtcgtctgcacgcaccatgcccatggtggtaaaggagcggtcgagcttggacttgctgtccaacgagcatgtgaaagccagacagaacctctgaagtttttgtatcctttggaatctagcataaaggagaagattgagtcaattgctaagttttatggtgccagtggtgttgaatactccgagcaggctgagaagcagattgagatgtacaccaagcaagggttctccaacctccccatctgcatggcgaagacccaatactcattctcacacgtcccatccatgaagggcgcgccgacgggctttgttctaccaataagagatgtgagggccagtatcggagctgggttcatctacccgctcgtgggcaccatgagcacgatgcctgggcttcccacaaggccctgcttctacgagatcgatgtagacactgccaccgggaaggtcatgggcctgtcatga

SEQ ID NO: 1444 - protein, 751 aa, Sorghum bicolor
MDLRAPPTNYPKTFLSSIILWRRRPDAGAAKRRPESSSSSSINNRASRRLSLSLSLSRPIASPARASSSVHDHHHHHHHSLQRPTGLGRDSVVARSSAVVAPPTPTPLPPPTLLPEMPSPTIRRLDVASPVPADIDIANAVEPLPIADIAAELGLRPDHYDLYGKYKAKVLLSVLDDLKAQQDGYYVVVGGITPTPLGEGKSTTTVGLCQALGAFLDKKVVTCLRQPSQGPTFGIKGGAAGGGYSQVIPMDEFNLHLTGDIHAITAANNLLAAAIDTRIFHENSQSDKGLFNRLCPANKEGKRHFADVMFRRLTKLGISKTDPNELTPDEIRRFARLDIDPESITWRRVMDVNDRFLRKITIGQGPEEKGMVRETGFDISVASEIMAVLALTTSLADMRERLGRMVIGNSKSGEPITADDLGVGGALTVLMKDAIHPTLMQTLEGTPVLVHAGPFANIAHGNSSIVADKIALKLVGKGGFVVTEAGFGADIGTEKFMDIKCRYSGLVPQCAIIVATIRALKMHGGGPEVVAGKPLDHAYVSENVALVEAGCVNLAKHISNTRSYGVNVVVAINKFASDTEAEMNVVRSASMAAGAFDAVVCTHHAHGGKGAVELGLAVQRACESQTEPLKFLYPLESSIKEKIESIAKFYGASGVEYSEQAEKQIEMYTKQGFSNLPICMAKTQYSFSHVPSMKGAPTGFVLPIRDVRASIGAGFIYPLVGTMSTMPGLPTRPCFYEIDVDTATGKVMGLS

SEQ ID NO: 1445 - DNA, 615 bp, Sorghum bicolor
atgatgttcttggcgtcgctcgccataagaagccaaccgcgccacactgcccctctaccctacatccctatactgtctgctctgatctgctacgacacacagctgctgtccctgcacccgtaccccgatccagcgatcgcatcgcatcgcattcgcatcatgggcctctgcctgtccgtggcactctggaaggagaagctctacggcggcagccggtcagtgcggggccgcgtcgtcgtccataaggttgccggcgtggagggtggtgactgcgagtacggcatcttgggaggcgacgccgatggcgtgctgggagtagagcagaagccgccggcggcggcggcggtggcggcggtggctccggcagcggcggccatgggcatgagaagtggcggtggagtggagggagctgccgctgccgtgtccggcggcactccggtgcggccgatatggcagaggagggtgctgatgggcgtcaagtgccagctgccgcggttcagcgggatgatactctacgacgagagcggccggccggtgtgcagtggcatcagggacagagcgcgtgaccaggagaagcatgctgcggcgatctcagtgctaagggacctgctctag

SEQ ID NO: 1446 - protein, 204 aa, Sorghum bicolor
MMFLASLAIRSQPRHTAPLPYIPILSALICYDTQLLSLHPYPDPAIASHRIRIMGLCLSVALWKEKLYGGSRSVRGRVVVHKVAGVEGGDCEYGILGGDADGVLGVEQKPPAAAAVAAVAPAAAAMGMRSGGGVEGAAAAVSGGTPVRPIWQRRVLMGVKCQLPRFSGMILYDESGRPVCSGIRDRARDQEKHAAAISVLRDLL

SEQ ID NO: 1447 - DNA, 399 bp, Sorghum bicolor
atgggtaaaacatgggcgctcatcacccacctccacgctcttgcagggccgagtctcactctgatataccctctgtacgcgtcgatctgcgcgatggagagcacgaccaaggtggacgacgagcagtggctggcctactggataatctactccttcatcaccctcttcgaaatggccgccgagaacgtcctctactggataccgctgtggtatgaggcgaaactgctcttggtggcgtggctggtcctgccgcagttcaggggcgcctccttcatctacgacaagttcgtcagggagcagctgaggaagaacggggtgaggctgcacgatcaccatggccacggccacggccacgccgccgatcacgtcgcgcagaatgagcatcatggcgtgcactga

SEQ ID NO: 1448 - protein, 132 aa, Sorghum bicolor
MGKTWALITHLHALAGPSLTLIYPLYASICAMESTTKVDDEQWLAYWIIYSFITLFEMAAENVLYWIPLWYEAKLLLVAWLVLPQFRGASFIYDKFVREQLRKNGVRLHDHHGHGHGHAADHVAQNEHHGVH

SEQ ID NO: 1449 - DNA, 720 bp, Sorghum bicolor
atgaccaagtatacgaggaacaaaaaatgttcatctcatcaacttagatcatcacatcactggaaaccccacagtagttccagattcaaaaaagtttccagcaaggagataccatttgcagctatagagaaatgtgcatggacagatgcaacttgtccagtttgcatggaatttccacacaacgctgttcttctactttgttcatcacatggcaatggctgtcgtccatatatttgtgcttccggctaccagcactcaaattgtcttaatcagcttgtagagtcatgcagaaaagtagcctccgaggacctagatgcaatagagcttgcgtgtcccctttgccgtggtgaggtcaagggatataccttggttgagcctgctcggaagaagctgaatcacaagaggaggagctgcatggaagatggctgttcatacatgggcacatacagagagctctgcaagcatgtccaaaagaagcacccttctgcaaacccacgagctgtggaccccttacatgcttacagatggaagcggcttctatttcgaagttcattgcaagatatgatttgttcaactacttcagaggttatgcgaaggttattttctctcatccttcagtttgacgagattatggctgcttcgcgagagggtggtgatcgtcatggtgctaccaatgataatttgctgccaagcgctaatgcagaatccactgatccatga

SEQ ID NO: 1450 - protein, 239 aa, Sorghum bicolor
MTKYTRNKKCSSHQLRSSHHWKPHSSSRFKKVSSKEIPFAAIEKCAWTDATCPVCMEFPHNAVLLLCSSHGNGCRPYICASGYQHSNCLNQLVESCRKVASEDLDAIELACPLCRGEVKGYTLVEPARKKLNHKRRSCMEDGCSYMGTYRELCKHVQKKHPSANPRAVDPLHAYRWKRLLFRSSLQDMICSTTSEVMRRLFSLILQFDEIMAASREGGDRHGATNDNLLPSANAESTDP

SEQ ID NO: 1451 - DNA, 1026 bp, Sorghum bicolor
atggcttcgtggctgttgctccctctcccctccttcccgtggcctcccccgcccccgcccggctcctcctccggccgaggcggcggtggcggcggagacggcggcgattggaggccgaacgtcgtcgcggccttcgccggcgcgcaactcggccgctccctccgtcgccgcttcgccggcctcctccgctcaccggaggtgcgacatctcgatgccttgccgaaaatgggtgacttctggttcgaaggatcagaaccgtttgcaacattcccaattcttggtgcgatagggaatgtgctctctgcaccctatgtttgcagctctgctctgttcagtgggaacgggtcagggggtagatacatcagtaacgggaagttgttgtccagacggcctcgtggaatcgattcgaagaagaggctctggactaatgtccttcttgctcttaatgtcctggcttatgtcgctcaggtagcatcacaaggaaagcttcttttgtggggagccaagatcaacagtctgattgatagagggcaattttggcgtttggcaacatcatctctacttcatgcagatctcacccaccttgcattcaattgtttctctttgaattctattgggcccatggttgaaatgttaactggacctagaagatttcttgctgtttatttcagttcggcactggcaggttcactgatgagctatcgctgtagtgcgtcacctgcagttggtgcgtcaggtgccatttttggattggttggcgcccatgcagtttatatgtggagacatagaagattctttgggaattctagggagagtttagaacatattgggcgtgtggttgtcctgaatatgggtatgggcctcctctcaaggggaatcgataactggggccatctgggaggcttgcttggcggagttgccatggcatggttcctaggtccggcatggcaatatcagtatgtggcaaaggatggtagagcggttttcaaagacagggctccagtcctccgactaataaaggggtag

SEQ ID NO: 1452 - protein, 341 aa, Sorghum bicolor
MASWLLLPLPSFPWPPPPPPGSSSGRGGGGGGDGGDWRPNVVAAFAGAQLGRSLRRRFAGLLRSPEVRHLDALPKMGDFWFEGSEPFATFPILGAIGNVLSAPYVCSSALFSGNGSGGRYISNGKLLSRRPRGIDSKKRLWTNVLLALNVLAYVAQVASQGKLLLWGAKINSLIDRGQFWRLATSSLLHADLTHLAFNCFSLNSIGPMVEMLTGPRRFLAVYFSSALAGSLMSYRCSASPAVGASGAIFGLVGAHAVYMWRHRRFFGNSRESLEHIGRVVVLNMGMGLLSRGIDNWGHLGGLLGGVAMAWFLGPAWQYQYVAKDGRAVFKDRAPVLRLIKG

SEQ ID NO: 1453 - DNA, 1269 bp, Sorghum bicolor
atggaatgggacggcgaggtcggcatgaactccgtcccggacggcgtcgtgcagcacatcctgtcgatgctcagcaacgcccgcgacgtggccgcctgcgcctgcgtctgccgccgctggcgcgactgcgtcccctacctacccgcgctcttcttccagcggaacgccttcgacgcggccaggggcgccgcggacgacgtcatcggccggatggtggcctccgtcgcgcgcctcagggagctggtcatctactgccccttctccatggcgcgcctcccggcctggctcgccgcgcggagcgccacgctccgggtgctcgagctgcggatggacgccgccgccgacaaggtcgcggaaggtgggcacctcgactgcatcggcctggctgcgagcctggaggagctcaggctctggggagtgtctctcattgccgcgcccgcgtggggccggatggagcggctccgcgtgctggaggttgtcggtgcgccgctgcgggatagcgctgtgagagacgccatcgccgcgtgccccaacctcaccgatctgtctctgctgggctgcgactgctccggcacggtggctatcgaccttcaactgctccagcggtgccggctcgacatcgtcggcgccggcaactgctcgctcttgctcaccgcgcctcgcgtggagtccctcgagatccagggcttcagctggatcactctgcgtggtggccacagcctccgccgcctctcaattgccaagagcagcgggagggttcacaaggtggatactgggaatctcccagatctggatcacctctctctgcgcggtgttcagtggaactgggccgcagtgagctcggtgctgcagtgcgctagcgaagtgaagcatctagtgatgaagatagagttctgtggggacttggacgcactccagccgttcccggaagtcgatttggttgacttcttcgacagccacccgaagctccgcaaatttgagatccatggtgccatgttcgctgccctgtgtcagaaaaatagcctgaaaaatttgaattccaggttcatcatcccttgtttggaagaggttctgatcactgtacgctccccgctcaatgctgaacagaagctgaacactctcgagtcgcttgtgaagtacagtgtgaggctgcggacgatggtcatcagaatctcacagatgaagaattgccatgaagctgctgatgagttctttgaggagatatgtaagttcaagtacatgaactacaggaaagtgcgaattgaataa

SEQ ID NO: 1454 - protein, 422 aa, Sorghum bicolor
MEWDGEVGMNSVPDGVVQHILSMLSNARDVAACACVCRRWRDCVPYLPALFFQRNAFDAARGAADDVIGRMVASVARLRELVIYCPFSMARLPAWLAARSATLRVLELRMDAAADKVAEGGHLDCIGLAASLEELRLWGVSLIAAPAWGRMERLRVLEVVGAPLRDSAVRDAIAACPNLTDLSLLGCDCSGTVAIDLQLLQRCRLDIVGAGNCSLLLTAPRVESLEIQGFSWITLRGGHSLRRLSIAKSSGRVHKVDTGNLPDLDHLSLRGVQWNWAAVSSVLQCASEVKHLVMKIEFCGDLDALQPFPEVDLVDFFDSHPKLRKFEIHGAMFAALCQKNSLKNLNSRFIIPCLEEVLITVRSPLNAEQKLNTLESLVKYSVRLRTMVIRISQMKNCHEAADEFFEEICKFKYMNYRKVRIE

SEQ ID NO: 1455 - DNA, 1101 bp, Sorghum bicolor
atggagttcaagaactgggggtcgtcgtcgcagcgccggccggcggtggtggtggacgaggggcaaccgttggcgagacaggggtcagtctattcgttgacgttcgacgaattccagagcgcgctcggcggggccgccaccggcggtggcggtggcggtagcggtggcatccccaaggatttcggctccatgaacatggacgagctgctccggagcatctggaccgcggaggagacccaggccatggcctccgcctctgccgcaggagcgggcgcggggatgccgctcacgccgctgcagcggcagggatcgtcgctcacactgccccgcacgctcagcgccaagacggtcgacgaggtgtggcgcaatctcgtgcgcgacgagccgccgcaggcgcaggtggcggacggcggcggacaccaccagcagcaccgccagtcgacgctcggggagatgactctggaggagttcttggtcagagctggcgtggtcagggaaaaccccgctccagctcctccagcgccacagcccttgaccatgatgccgccgcggccggtacctgttgcccctaaaagctccgcctttttcgggaatttaccgggcgccgacgacgccgcagctgcggcagcgctggggttcgcaccggtcggcatgggggatctggccctgataccgcccagggcggcggcaggcatgggaggcagcgccatggctgtgcaaacagcggtgaatcagcagcttgattctggcgggaaggggtacagcgacctgtcgtcgccaacggagccgctgcctttttcatttgaagggatgattcgggggagaaggcatggaggcggagtggagaaagtggtggagaggcggcagaggaggatgatcaagaacagggagtccgccgcgaggtcccgagcgcgcaaacaggcttatacaatggagttagaagctgaagttcagaaactcaaggagctgaatcaggaactggagaggaaacaggcagagattatggaaatgcagaagaacgagacaccagaaatgttgaaggatccattcggacggaagaaacggctgtgcttgcgaagaacactgactggcccttggtga

SEQ ID NO: 1456 - protein, 366 aa, Sorghum bicolor
MEFKNWGSSSQRRPAVVVDEGQPLARQGSVYSLTFDEFQSALGGAATGGGGGGSGGIPKDFGSMNMDELLRSIWTAEETQAMASASAAGAGAGMPLTPLQRQGSSLTLPRTLSAKTVDEVWRNLVRDEPPQAQVADGGGHHQQHRQSTLGEMTLEEFLVRAGVVRENPAPAPPAPQPLTMMPPRPVPVAPKSSAFFGNLPGADDAAAAAALGFAPVGMGDLALIPPRAAAGMGGSAMAVQTAVNQQLDSGGKGYSDLSSPTEPLPFSFEGMIRGRRHGGGVEKVVERRQRRMIKNRESAARSRARKQAYTMELEAEVQKLKELNQELERKQAEIMEMQKNETPEMLKDPFGRKKRLCLRRTLTGPW

SEQ ID NO: 1457 - DNA, 1509 bp, Sorghum bicolor
atggccttcttcttcatccttgcttgcaccctcatttttctagccatcgcctactacttccagtacgcacgctggcagaaggggagaggccgctccggcggcggccatgagaagcaggcttcttcttccttgaagtcgctgcctcctggctccatgggctggccttacctcggcgagaccctccagctctactcccaggaccccaacatcttcttcgcctccaaacagaagaggtacggcgagatcttcaagacgcacctcctgggttacccctgcgtgatgctggcgagcccggaggcggcgcggttcgtcctggtgacgcaggcgcacctgttcaagccgacctaccctcggagcaaggagcgcatgatcgggccgtcggcgctcttcttccaccagggcgactaccacctccgcatccgcaagctcgtccagggcgcgctcggccccgacgcgctccgcgcgctcgtccctgaggtcgaggccgccgtgcgctccactctcgcttcctgggacggccatgtcaggagcacgttccacgccatgaagacgctgtcgtttgatgtgggcatcgtgatgatcttcggcggcggccggctggacgagcggcgcaaggcggagctaaggaagaactactccatcgtggagaaggggtacaactccttccccaacagcctaccggggacgctctattacaaggcgatgcaggcgcggcggcggctgcagggcgtgctgagcgacatcatgcgcgagcggcgggagcgcggcgagccgggcaccgacctgctgggctgcctgatgcagtcccagggcgacgacggcgcgccgctcctgagcgacgagcaggtcgcggacaacatcatcggcgtgctgttcgcggcgcaggacacgacggccagcgtgctcacctggatcgtcaagtacctccacgaccaccccaagctcctggaggccgtccgggcggagcaggcggccgtccgcgaggccaccgacggcggtaggctgccgctgacgtgggcgcacacgaggagcatggcgctgacgcatagggtgattttggagagcttaaggatggcgagcatcatctccttcacattcagggaggccgtggccgacgtggagtacaaagggttccttatccccaaggggtggaaggtgatgccgctcttcaggagcatccatcacagcccggactacttccaggatccacacaagttcgacccttctagattccaggtggcgccgcggccgaacacgttcctgccatttgggaacggcgtgcacgcgtgccccgggaacgagctggccaagctcgagatgctggtcctcatccaccacctggtcaccgcctacaggtgggagattgttggatccagtgatgaggtcgagtacagcccattccctgtgcccaagcatggcttgcctgtcaaactatggagggagaacagtacggtggacagaaaggggcgtcagaccgatgacgatgatgtggaggatataatagtttga

SEQ ID NO: 1458 - protein, 502 aa, Sorghum bicolor
MAFFFILACTLIFLAIAYYFQYARWQKGRGRSGGGHEKQASSSLKSLPPGSMGWPYLGETLQLYSQDPNIFFASKQKRYGEIFKTHLLGYPCVMLASPEAARFVLVTQAHLFKPTYPRSKERMIGPSALFFHQGDYHLRIRKLVQGALGPDALRALVPEVEAAVRSTLASWDGHVRSTFHAMKTLSFDVGIVMIFGGGRLDERRKAELRKNYSIVEKGYNSFPNSLPGTLYYKAMQARRRLQGVLSDIMRERRERGEPGTDLLGCLMQSQGDDGAPLLSDEQVADNIIGVLFAAQDTTASVLTWIVKYLHDHPKLLEAVRAEQAAVREATDGGRLPLTWAHTRSMALTHRVILESLRMASIISFTFREAVADVEYKGFLIPKGWKVMPLFRSIHHSPDYFQDPHKFDPSRFQVAPRPNTFLPFGNGVHACPGNELAKLEMLVLIHHLVTAYRWEIVGSSDEVEYSPFPVPKHGLPVKLWRENSTVDRKGRQTDDDDVEDIIV

SEQ ID NO: 1459 - DNA, 300 bp, Sorghum bicolor
atggcgatcaagagcatgacggtggcaccgacgacgacgcggtcgctggacgcggacatgacggtggacgagttcaaggagtggctgcggcggttcgacacggaccgggacgggcgcatcagccgcgaggagctgcggcgcgccatgcgcgccatccgcgcccggttctcggggtggaggagcaagcaagggatcagctacgccgacacggacggcgatggctacatcgacgacagcgaggtggacggcctcatcgagttcgcgcagaagaacctcggcctcaagatcgtcgcctactaa

SEQ ID NO: 1460 - protein, 99 aa, Sorghum bicolor
MAIKSMTVAPTTTRSLDADMTVDEFKEWLRRFDTDRDGRISREELRRAMRAIRARFSGWRSKQGISYADTDGDGYIDDSEVDGLIEFAQKNLGLKIVAY

SEQ ID NO: 1461 - DNA, 954 bp, Sorghum bicolor
atggatccgagctccgacatcatcctcgacactccgtacttccgcatctacagcgaccggcgcatcgaccgcttgatgggcaccgagaccgtgccggccggctttgatcccaccaccggcgtcacctccaaagacgtcgtcatagacagcgacgccggcctctacgtccgcctctacctcccggacatggctgctaccggtaccgggtcccgccggtcaccgcccaacgacgacgacgacaagaagctcccggtgctagtctacttccacggcggcggcttcgtcacccagtcggcagcgtctccggtctaccagcggttcctcaacgccctggccgcgaaggccggccttctcatcgtctccgtgaactaccgcctcgcgccagagcacccgctgccggcaggctacgaggactccttccgcgcgttcacgtggacaacctccgctggcaacggcggggacggggacccctggctgtcacgccacggcgacctgcgccgcgtcttcctggccggcgacagcgccggcgggaacatcgaccacaacgtcgctatgatggccgacgacgctgccgcggatcgaggggagcctgtcgacggcgaggcgccggcgtctagggcgaggatggagaagctgtgggggttcgtgtgccccgatgcgacggacggcgtggacgacccgcgggtcaatcccttggtcgccgcggcggcgccgagcctgagggacctgccgtgcgagagggtgctcgtctgcgcggcggagctggactccctgctgccgagggacagggcgtactacgaggccatcaaggcaacaagagggtggcgcggcagggtggagtggttcgagtcccagggccaggaccacgtcttcttcctcttcaagcccgtctgcggtgaggccgtcgcgctcatggatcgactggccgcgttctttgctgggaaaactgaatga

SEQ ID NO: 1462 - protein, 317 aa, Sorghum bicolor
MDPSSDIILDTPYFRIYSDRRIDRLMGTETVPAGFDPTTGVTSKDVVIDSDAGLYVRLYLPDMAATGTGSRRSPPNDDDDKKLPVLVYFHGGGFVTQSAASPVYQRFLNALAAKAGLLIVSVNYRLAPEHPLPAGYEDSFRAFTWTTSAGNGGDGDPWLSRHGDLRRVFLAGDSAGGNIDHNVAMMADDAAADRGEPVDGEAPASRARMEKLWGFVCPDATDGVDDPRVNPLVAAAAPSLRDLPCERVLVCAAELDSLLPRDRAYYEAIKATRGWRGRVEWFESQGQDHVFFLFKPVCGEAVALMDRLAAFFAGKTE

SEQ ID NO: 1463 - DNA, 1275 bp, Sorghum bicolor
atggccactagcatcctgaaatcagagcactctggtactgaccagaacgctcagaaggcggccgacaagattacagtgcttcccggccagccgggcggcgccgtcggcttcgaccagtacagcgggtacgtgaccgtcgacgagaagaacggccgtgcgctcttctactacttcgtggaggcgacacacgatgccgcggcaaagccattactcatgtggcttaacggaggccctggttgctcatcagtaggctacggagcaatgatagaaattggcccgttccgcataaacagcgacaacaaaaccctgagccgaaacgagaacgcctggaacagcgaggccaacgtgctcttcctggagtcacctgccggtgttggcttctcctactccaacaaatcttcagactatgataagagtggtgaccaaaggaccgcggctgatgcattcgttttcctcatcaattggctcgagaggtaccctgagtacaaagcacgcgccttttacatctccggggagagctatgccggacactacgttccgcagctcgcagcagccatccttagtcacaatataaagagtaaaagcgatatcataaatcttcaggctatattggttggcaatccatacctggacgataacaagaacacaaaggggcaaattgactacttatggagccatggggtgatatcagatgaggtgtggaccaacattacaaagaactgcaagttcagtcctgtggatggcaacacgtgttctgatgctatggaatcatatgactctggatacattagtccgtacaacatatatgctcctgtttgcatcgacgaacccaatggaaactactaccccagcagcaatgttccgggaattgatccatgcagcaactactatatcgaggcttacatgaacaatcccttggtgcagaaggctttccatgctaaaacgacaaagtggtcaggctgcacagacttgcactggaaagatgctccagtgtccatgatgccgaccatcaaatggcttctgggacataggctaccggtgtggctatacaggtactccatcactgacctcttgctctcagtcatggagccatggcgcccgtggacagcaaccaaagaggttggaggctatgttcagcagtacacgggaggtcttgtgcttatttcagtgaggggagctggtcatcaagttccttatttccagcctgagagagcactagtactgctcagatctttcttgaaaggaacgctcccaccttatgtagtagagcagtaa

SEQ ID NO: 1464 - protein, 424 aa, Sorghum bicolor
MATSILKSEHSGTDQNAQKAADKITVLPGQPGGAVGFDQYSGYVTVDEKNGRALFYYFVEATHDAAAKPLLMWLNGGPGCSSVGYGAMIEIGPFRINSDNKTLSRNENAWNSEANVLFLESPAGVGFSYSNKSSDYDKSGDQRTAADAFVFLINWLERYPEYKARAFYISGESYAGHYVPQLAAAILSHNIKSKSDIINLQAILVGNPYLDDNKNTKGQIDYLWSHGVISDEVWTNITKNCKFSPVDGNTCSDAMESYDSGYISPYNIYAPVCIDEPNGNYYPSSNVPGIDPCSNYYIEAYMNNPLVQKAFHAKTTKWSGCTDLHWKDAPVSMMPTIKWLLGHRLPVWLYRYSITDLLLSVMEPWRPWTATKEVGGYVQQYTGGLVLISVRGAGHQVPYFQPERALVLLRSFLKGTLPPYVVEQ

SEQ ID NO: 1465 - DNA, 1017 bp, Sorghum bicolor
atggcactggaggccgcccttgtgctttcccagcagcagtcctcctcccagcaaggcagtcgctttgggtgcggtgccatggcagcaggagggccttggagtagtctgttgtttagtggaatagaggaggtggtggagatgggtggcgccgccggcgccgccggcagctggaacgcggccgcgtgctcgccgccgcagctcctgcaggagctgggtgacaacacggctgccggcgcgctgcctgcggcgtccgggaggtgtgcgagtggcggcgccggtcaggatgccccggcaccggcgcccggaagaaggaagcggcgcaggatgaggccggtgaagaacgaggaggaagtggagagccagcggatgatccacattgccgtggagcgcaaccgccgcaagcagatgaacgagtacctcgcagcgctccgctccctcatgccgccggcctactcgcaacggggcgatcaggcgtccatcgtcggcggcgcgatcaacttcgtcaaggagctggagcagctgctccagtcgctggaggcgcagaggcgttcctcgcagcgccctgccgacgacgtcgatcccgacgacgcagggccgttcgcggacttcttcaccttcccgcagtactcgatgtgcgctgtcgtcgcgggcgcggccccagagaacaagaacgccgaccaccgtgagggcgccggcggcgccgaggaggaggcgtccgggtcgaagccatcggccgtggccgacgtcgaggcgaccatggtggagagccacgccaaccttcgggtgctgtcccggcgccggccgaggcagctgctgcggctggtgctggggctccagggccaccgcctcaccgtgctccacctcaacatgagcagcgccggccacatggtgctctactcgtttagcctcaaggtggaggatgattgccagcttacctctgtggatgagattgcagctgcggctcatcagatcgtcgagaagatcaatgaagaacaaggctgcagcttattagaatag

SEQ ID NO: 1466 - protein, 338 aa, Sorghum bicolor
MALEAALVLSQQQSSSQQGSRFGCGAMAAGGPWSSLLFSGIEEVVEMGGAAGAAGSWNAAACSPPQLLQELGDNTAAGALPAASGRCASGGAGQDAPAPAPGRRKRRRMRPVKNEEEVESQRMIHIAVERNRRKQMNEYLAALRSLMPPAYSQRGDQASIVGGAINFVKELEQLLQSLEAQRRSSQRPADDVDPDDAGPFADFFTFPQYSMCAVVAGAAPENKNADHREGAGGAEEEASGSKPSAVADVEATMVESHANLRVLSRRRPRQLLRLVLGLQGHRLTVLHLNMSSAGHMVLYSFSLKVEDDCQLTSVDEIAAAAHQIVEKINEEQGCSLLE

SEQ ID NO: 1467 - DNA, 468 bp, Sorghum bicolor
atgatcgccatgccgcccactccgctattccaccacctctcgccttctacctttgaacaacctatccacgaagcacaggcggttgtcgctgccggcaacagtccagccggctccggcagtaccgatgatgcctacggcggcggcggccgcacggcaatggcggaggctgagcggaggcggcggaggatggtctccaacagggagtccgccaggagatcacgcatgcgcaagcagcggcagctcaccgagctgtgggcgcaggtcgtccacctccgcggggccaaccgccgcctcctcgacgagctgaaccgcgcaatgaggggctgcagtgatgtgtgctgcgagaacgcccggcttgagaaagagaagaccgatctcagtaccaagctcgagcggctcacccaggcgcagaacaccgccacgccaagctcctcctcagagccgcaacatgacaccgcgcgctactga

SEQ ID NO: 1468 - protein, 155 aa, Sorghum bicolor
MIAMPPTPLFHHLSPSTFEQPIHEAQAVVAAGNSPAGSGSTDDAYGGGGRTAMAEAERRRRRMVSNRESARRSRMRKQRQLTELWAQVVHLRGANRRLLDELNRAMRGCSDVCCENARLEKEKTDLSTKLERLTQAQNTATPSSSSEPQHDTARY

SEQ ID NO: 1469 - DNA, 1317 bp, Sorghum bicolor
atggacatgaacgagagcggcgagaaagggatggagggcaacgcgtcgtccggcgccgccggcatcccggtggagtggcagacccaattcagcgccgccgccttctcgtgcgcgccgccgcagcagcagcaggttccaatgatggactccgccttcgcgtccgccgccggcctgtgggcgtccacctcccaggccatggcgctctccgacgtcggcgccatgtcggccgcgcggggcggtggcggcttcttggcgccggtccccggtttcctccctcagggcctcggccatttccccgtcgactccggcttcatcgagcgcgccgcgcgggcgtcctgcttcggcggcggcggcggggtgatgggtgctaccgctggctacggcacagctgatcatcagaccatgaacaacgcgttcagtggctcctcagaggcgctgttggatcaccagaggaaggacggcaacgacaagggcgagccggagctcggccggaacggccacgacggggtgctgagctcggaggctgctgctggggactgctcgtccaaggggacctcggactccaagaagaggagaaggcctaacgaggtgatgggaggcgatcaggttcagtcggccaacctgcccgcggactcggcaaacgagagcgtgcacagcaaggacaaaggcgaggagagcagcccggcaacgaccaccggacccggaaagtcgaaagggaagggggcgaaagagacctccgagtctcagaaggaagactacattcatgtccgagctcggcgcggacaggcaaccaacagccacagcctagcagaaaggttgaggagggagaagattagcgagaggatgaagcttctgcaggaccttgttcctggctgcagcaaagtcactgggaaagcggtaatgcttgacgagatcatcaactatgttcagtccctgcaaagacaagttgagttcttatcgatgaagctcgcaacagtaaacccaaggcttgacctcaatatagaagggcttctatcgaaagatcttcttcgcttccctggtgttccttcttcttcccttggattttccccagaaatgatgcacccacaattacagctatcgcaaccaggcctgattcaggggggcgctgctggcatggccaatccggacgtattcaggagaatcatgcaggcacaattgagtgcaaaagacgggtctcagcagatgtcccacgcattgaatggagggtcattcagcgaggttgcgcagatggcgtacccgtcgctggggtcccaggacttgagcatcaggccgtcgcaggacgggtttcaaatgtga

SEQ ID NO: 1470 - protein, 438 aa, Sorghum bicolor
MDMNESGEKGMEGNASSGAAGIPVEWQTQFSAAAFSCAPPQQQQVPMMDSAFASAAGLWASTSQAMALSDVGAMSAARGGGGFLAPVPGFLPQGLGHFPVDSGFIERAARASCFGGGGGVMGATAGYGTADHQTMNNAFSGSSEALLDHQRKDGNDKGEPELGRNGHDGVLSSEAAAGDCSSKGTSDSKKRRRPNEVMGGDQVQSANLPADSANESVHSKDKGEESSPATTTGPGKSKGKGAKETSESQKEDYIHVRARRGQATNSHSLAERLRREKISERMKLLQDLVPGCSKVTGKAVMLDEIINYVQSLQRQVEFLSMKLATVNPRLDLNIEGLLSKDLLRFPGVPSSSLGFSPEMMHPQLQLSQPGLIQGGAAGMANPDVFRRIMQAQLSAKDGSQQMSHALNGGSFSEVAQMAYPSLGSQDLSIRPSQDGFQM

SEQ ID NO: 1471 - DNA, 1248 bp, Sorghum bicolor
atgcagacgtggatcttcgagctcatggtggtcaacctcgcggtggatgggaagccctgggctccaaaagttcagatggcccagccagcaaaccaccagccgagagagctagctagcaggcaccgtccgtacccatggctcgcgctaccgtcgtcttcgccatcgccgctctcctcttcgtcgccatggccgtggcgccgctggccgctgaggcgaaggagtccgccgacgcccccaccgccgatgcgccggccgatgccagcgggccggtgggtgcccctggcccccagggcgtcgacggcctgtcaggcaacgaggacgacgacgacgactccaccaactgaggccgaccggccgagcacgtcgtctgatatatcgtcggttctgaaaacgaatggcccggttgaatttggaacaggacatggaagaaaaaccgacgaccgttcgtacaacccaagaaggggcgcaatgccggcgcggcgggggcggcccaggaagggcgaccgccggatcgacgcggccatcgaccacttcaccgtcatgggctacgcggcgcgcgacgttaaggccgtcgtcactgatctcctcaaggtgtacggggggcctgatgcgtggcccttactggaggaaggtggctcctaccaggttgtgcaagagaggctcttcgagatcgaggagaaggagaaggagaagaaggaccagcagctgctgctggagtatcaccaacagcaggatggccagcaagtggaggatgagcttcctcagcaccaagaaccagcagcagatgaggaagcggaagaccctatgttcattgaaccacaagataccatatcaatttcaaatgaggcaccagcagagactaagtcagcagataaggaagtggaagaccctatgttcatcgaaccgcctgctcgtgaagctgcattggcacttaatgctgctaggactggcccaaggcgaccctgctatggatggcttaggactgatactggcggaggaccacaagcagagaaaggagcagcctccgaccctcccaagtccgaggatggcgagggacgcggaggatgcgaggaacctccgacgagtccaagccgaggaacctctgacatagacgcgtcgagggatcggcgaccaagcaagccgaggaacctccgacacacgaagtggcgaaggatcctcggtcgcgcgaaggatccgagccaccgaccagctgaagctctagacagaggatgcgtgtggggtttgtag

SEQ ID NO: 1472 - protein, 415 aa, Sorghum bicolor
MQTWIFELMVVNLAVDGKPWAPKVQMAQPANHQPRELASRHRPYPWLALPSSSPSPLSSSSPWPWRRWPLRRRSPPTPPPPMRRPMPAGRWVPLAPRASTACQATRTTTTTPPTEADRPSTSSDISSVLKTNGPVEFGTGHGRKTDDRSYNPRRGAMPARRGRPRKGDRRIDAAIDHFTVMGYAARDVKAVVTDLLKVYGGPDAWPLLEEGGSYQVVQERLFEIEEKEKEKKDQQLLLEYHQQQDGQQVEDELPQHQEPAADEEAEDPMFIEPQDTISISNEAPAETKSADKEVEDPMFIEPPAREAALALNAARTGPRRPCYGWLRTDTGGGPQAEKGAASDPPKSEDGEGRGGCEEPPTSPSRGTSDIDASRDRRPSKPRNLRHTKWRRILGRAKDPSHRPAEALDRGCVWGL

SEQ ID NO: 1473 - DNA, 1416 bp, Sorghum bicolor
atgtcagcgctaggtccgctgcgccgctggaagcgcttcttctcggtgttcggtcaaatcgacgccgccatcgaagccgcccacccgtccatctcccgcgacgagttccggtccctaaggggcagaatcgtcgagatgctgtgcgactccgaagacgacgacgagagagcggagcagctctgcttagctctcgacggcgcgatggcggagtccctcgtcacgctgctggaggtgcccgtgtcgtcgagggtgctggtgtcaggcgaccttcctaagtccgtctccgccctggggcagcacgagtcggcccggatccgcagcctcacgcgcggcgtcgtgcgcgggtggcggtcagccgtcgagagtgaactggagagcgccaaagcggctatggaggccctgaacaacctgtctcatctgatgccgcctgagaaagagagactcgcctccaacagtcatgtgcccatcgccgccggcaaagacgagacgcgaatcaaacacacgccggccaaatttccatcgaagaggactcccaacatcaccggcaaagacgagacgcaaatcaaagacacgccggccaaatttccatgcaagaggactcccgtcgctggcagcagttgcagtgaatcccgcgaggtgctggctacaaagcgtaagctccgagagggctaccaggaggtcgagaacgcccagagtcagcgcaagacccgcgtcatcgaggaacccaagatgttagaacagccgaagcagaagaaaatgcatcccatgatcacaccacgggagagtagccgagcaagatgtgggaacctaaccaccatacatgcatggcgcagagccagacacacacacggagtagaatacaagctcaagaacacggccagccggcgctcagaagaagttggggtcgtatccgttgctggaggtggcgaggatgtagtaggcgacgatgtggccgagcgagccccaggcgaggacgtcgacgaggttgaagcccacggggtcgttggacttgagcagggccgcgaactccttggcgcgctcgtcgccggcgtcgaatgcgtcttgccgttctgcgcgggcacctgcttcgccacgttctcccgctggaagttgaagaagacgaagcggcccaggaacagcgacacgcccgtgctcaggctgatcaccagcgacgcgctcagctccgcgcgcgccgccacggaccgccgcgccggcgccgcgcggaacgccacgcgcgccgcccggcggggggacggcgccaggcggagcccggccacggacggcggggacagcacggcggcggtcgatgtggccatggcgctgctggtgttcctcttcctcgagtactggaaggcgcggcggctgtgggtgtttgtgtttcctcttgatcttggcagctacgacgtgtctgcttga

SEQ ID NO: 1474 - protein, 471 aa, Sorghum bicolor
MSALGPLRRWKRFFSVFGQIDAAIEAAHPSISRDEFRSLRGRIVEMLCDSEDDDERAEQLCLALDGAMAESLVTLLEVPVSSRVLVSGDLPKSVSALGQHESARIRSLTRGVVRGWRSAVESELESAKAAMEALNNLSHLMPPEKERLASNSHVPIAAGKDETRIKHTPAKFPSKRTPNITGKDETQIKDTPAKFPCKRTPVAGSSCSESREVLATKRKLREGYQEVENAQSQRKTRVIEEPKMLEQPKQKKMHPMITPRESSRARCGNLTTIHAWRRARHTHGVEYKLKNTASRRSEEVGVVSVAGGGEDVVGDDVAERAPGEDVDEVEAHGVVGLEQGRELLGALVAGVECVLPFCAGTCFATFSRWKLKKTKRPRNSDTPVLRLITSDALSSARAATDRRAGAARNATRAARRGDGARRSPATDGGDSTAAVDVAMALLVFLFLEYWKARRLWVFVFPLDLGSYDVSA

SEQ ID NO: 1475 - DNA, 1335 bp, Sorghum bicolor
atgtacggcgcgccggtgcccaaggacctgaacctgccagcagcagccctgccgcagccgaccaccagggccggtgcgagaacgccaccgcaccagcagcagcagatgagctccccgggactgctgcggtacaggtcggcgccgagcacgctgctcggcgaggtcatgtgcggggatcaggacttccccgcggctgcggctgcggctggcggcgcaggggcagggcacggaccaccaccggaccacgccgccgccgcggacaacgtcctcgcgcgctttctcgccgggcaccaccactgctccgaggcccgggactgcaagcctccccgccccgccgcgtccgctcatcacttcatggacgaagccgccgccgccgccgcgtccatggccgcctcacagcagcagcagctcatgtaccagtcgtcgcagcagcagatggccgccatggaggggttgtaccgcaacgtcagctccggcggcacggagcacggtgcggccgttggcggcgccggtaacaacagcctgatccgccagagcagctcccccgccggcttcctcagccacctgaacatggacaacgggtacgggagcatgctccgggcgggcatggccggcggcgggttcaggacgaacggcgccgtcagcgacgcgcggctcaaggggcagctgagcttctcgtcccggcaggggtcggtgatgtcgcagatctcggaggtgggcagcgaggagctcgacggcggcagcagccccgagacggcggccggcagcaacggcagcggcgcgccgcgcggctacagcggcatcccagggtacacgatgggcgtctcgcccggcgcctggacggacgagccgtcgccgtcgccgacgtccggcgcgaagcgcccccgcgactttgctgggcccgtgccgcagaacgtgcatcagcagccgctggcgccgcagctcagtctgcccagcggcaacaacggcggcggcaagccggcggcggcctcggcggagatggcggcgatcgagaagttcctgcagttccaggacgccgtcccctgcaaaatccgcgccaagcgcgggtgcgccacccacccgcgcagcatcgccgagcgggtgaggaggacgaagatcagcgagcggatacggaagctgcaggaactcgtgcccaacatggaaaagcaaaccaacactgccgacatgctggatctggctgtggactacatcaaggatcttcagaagcaggtcaaggaacttgaatgcacgattcagttatcgggtcgccctgagccatccgaaatgcttccatcaagtagatttgccctatggttgacggcaggggtaacttaa

SEQ ID NO: 1476 - protein, 444 aa, Sorghum bicolor
MYGAPVPKDLNLPAAALPQPTTRAGARTPPHQQQQMSSPGLLRYRSAPSTLLGEVMCGDQDFPAAAAAAGGAGAGHGPPPDHAAAADNVLARFLAGHHHCSEARDCKPPRPAASAHHFMDEAAAAAASMAASQQQQLMYQSSQQQMAAMEGLYRNVSSGGTEHGAAVGGAGNNSLIRQSSSPAGFLSHLNMDNGYGSMLRAGMAGGGFRTNGAVSDARLKGQLSFSSRQGSVMSQISEVGSEELDGGSSPETAAGSNGSGAPRGYSGIPGYTMGVSPGAWTDEPSPSPTSGAKRPRDFAGPVPQNVHQQPLAPQLSLPSGNNGGGKPAAASAEMAAIEKFLQFQDAVPCKIRAKRGCATHPRSIAERVRRTKISERIRKLQELVPNMEKQTNTADMLDLAVDYIKDLQKQVKELECTIQLSGRPEPSEMLPSSRFALWLTAGVT

SEQ ID NO: 1477 - DNA, 1830 bp, Sorghum bicolor
atggatcaacttgccatgcttgcgacggagctgggtgactcgtcggactttgaggtggagggcatccagaacctcactgagaatgatgtcagcgacgaggagattgagcctgaggacctggcgcggcgaatgtggaaggacagagtcaggctgaggaggatcaaggagcgccagcagaagctcgccctgcagcaggcagagctggagaagttgaggcccaagccgatatccgaccaggccatgcgcaagaagatgtcaagggcgcatgacgggatcctcaagtacatgctcaagctgatgcaggtgtgcaatgcgcgtgggttcgtgtatgggatcatcccggacaaggggaagcctgtcagtggcgcttctgataatatcagagcttggtggaaggagaaggtgaagtttgataagaatgggcctgcagcaattgagaaatacgactctgagaacttagtaaccgcaaatgcccagagtggtggaagtaagaacccgcacagcttgatggatctccaagatgccactcttggttcactgctttcctcattgatgcagcattgtgatccaccgcagcgcaagtacccattggagaagggtgttccgcccccttggtggccttcagggaaggaggaatggtggattgccttgggccttccaagcggccaaattcctccatacaagaaaccacatgatcttaagaaggtttggaaggctggtgtgcttacaggtgtgatcaagcacatgtctcccaactttgataagataagaaatcatgtacggaaatcaaaatgtttgcaggataaaatgactgcaaaagaaagcctgatttggctgggagttttacagagagaagaaagccttgttcacagaattgacaatggtgtatcagagattactccgcgcagtatgccagaggacagaaatggggacacaaatagcagcagtaatgagtatgatgtgtatggttttgaggatgctcctgtttctacatcatctaaagatgatgaacaagatctgtctccagttacacaatctgctgttgagcatgtcccaaaaagaggaagggaaagggcttacaataaacaccctaatcagatcgttcctggtaaggcaaaagaaccaccaaagagaaaaaaagcacgccgcagctccactgttaccgagccagatgcacgcagagttgttgatgcaccagaaaactcaagaaatttgattcctgatatgaatagactggatcaagtagaaatccaaggcaggtctaaccagattgtcatttttgaccatggggacaccacaactgaagctttacaacacagaggagatgctcaagtacaggtccaccttcctggtgctgaggttaataacttcaatagtgccccaactgcaaaccctactcctataagcatatgtatgggtgaccagcctttaccttatcaaaataatgacagcacaaggtcgagatctgaaaatagttttccagtagatgctcatcctggtttaaataatctgcccagcagttatcagaacttacctccgaaacaatcactaccactttccatgatggatcatcatgtggttcccatgggtatcagggcacctactgatagcattccttatggtgatcatatactaggtggtggaagttcaacttctgttcctggagatatgcagcagctcatagattttcctttctatggtgaccaagataagtttgttggcagttcctttgagggattgcctctagactatatcagtatcagcagtccaatcccagatattgatgacttgttgcatgatgatgatttaatggaatacttggggacataa

SEQ ID NO: 1478 - protein, 609 aa, Sorghum bicolor
MDQLAMLATELGDSSDFEVEGIQNLTENDVSDEEIEPEDLARRMWKDRVRLRRIKERQQKLALQQAELEKLRPKPISDQAMRKKMSRAHDGILKYMLKLMQVCNARGFVYGIIPDKGKPVSGASDNIRAWWKEKVKFDKNGPAAIEKYDSENLVTANAQSGGSKNPHSLMDLQDATLGSLLSSLMQHCDPPQRKYPLEKGVPPPWWPSGKEEWWIALGLPSGQIPPYKKPHDLKKVWKAGVLTGVIKHMSPNFDKIRNHVRKSKCLQDKMTAKESLIWLGVLQREESLVHRIDNGVSEITPRSMPEDRNGDTNSSSNEYDVYGFEDAPVSTSSKDDEQDLSPVTQSAVEHVPKRGRERAYNKHPNQIVPGKAKEPPKRKKARRSSTVTEPDARRVVDAPENSRNLIPDMNRLDQVEIQGRSNQIVIFDHGDTTTEALQHRGDAQVQVHLPGAEVNNFNSAPTANPTPISICMGDQPLPYQNNDSTRSRSENSFPVDAHPGLNNLPSSYQNLPPKQSLPLSMMDHHVVPMGIRAPTDSIPYGDHILGGGSSTSVPGDMQQLIDFPFYGDQDKFVGSSFEGLPLDYISISSPIPDIDDLLHDDDLMEYLGT

SEQ ID NO: 1479 - DNA, 1056 bp, Sorghum bicolor
atggccggacgcactacggagggggctcgctgcagcggggagacgacggtgtgcgtgacgggcgccggcggctacatcgcctcgtggctcgtcaagctcctcctctcccgcggctacaccgtgcacgccaccgtccgcgacccgggtgatcccaagaacgcccacctggggcggctggaaggggcctcggagaacctccggctgttcaaggccaacgtgctcgaccagaacgcgctggctgccgcagtctccgggtgccggggggtcttccatcttgcctgtccggtgcccacggataaggttcttgatccggagtcagaagtactggctcctgctgtgcaaggtaccttgaacattcttcaggcttgctcaaataataatattcagaaagttattgtggtttcgtccaccgccgctgttcatttcaacccaaattggcctcaacacatacccaaagacgaggagtgctggtcggacataaacttttgcaaaatgaatgaggactggtatatggttgccaaggttattgctgaaaagacagccttggaatatgcagagaaaaatggactgaatgttgttacagtttgccctactatggctttaggaccgctcctacggcctatggtcaatgtcagccatgaattcctgctatacattattaaaggaggtcctactgtgatgaggaacattccctggcacatagttgatgtccgtgatgtggctgatgctttgcttctcgtatacgagaaagagaaatcagcaaggagatacatctgcgcgccaaattacatcagtgcgatagatctggtgaacatgctgaagaaggctcatcctaattacaattacgtaaactgcggcaatgatttggttcctaactctatagttacgccaataatgtcggagaaactgaagaatttgggctggaaaccaaggaagacgctacataaaacattgatggatagtgttgaatgctatgagaagatggggcttctgcaagatgttgagggatgcccttgccgtcttcctcacctttttcatatggctatagaaaaatga

SEQ ID NO: 1480 - protein, 351 aa, Sorghum bicolor
MAGRTTEGARCSGETTVCVTGAGGYIASWLVKLLLSRGYTVHATVRDPGDPKNAHLGRLEGASENLRLFKANVLDQNALAAAVSGCRGVFHLACPVPTDKVLDPESEVLAPAVQGTLNILQACSNNNIQKVIVVSSTAAVHFNPNWPQHIPKDEECWSDINFCKMNEDWYMVAKVIAEKTALEYAEKNGLNVVTVCPTMALGPLLRPMVNVSHEFLLYIIKGGPTVMRNIPWHIVDVRDVADALLLVYEKEKSARRYICAPNYISAIDLVNMLKKAHPNYNYVNCGNDLVPNSIVTPIMSEKLKNLGWKPRKTLHKTLMDSVECYEKMGLLQDVEGCPCRLPHLFHMAIEK

SEQ ID NO: 1481 - DNA, 372 bp, Sorghum bicolor
atggacactgttgctccacatgtactcatagttgatgacacctttgttgatcgccttgtggcatctcgagtcttaaagaattgtaacattcaagtgacaattgtggagggcccaaagcaagccttggaatttctagatgtggagaatgatgtaaatctaattctaactgattattgtatgcctggtatgacggggtatgatcttctgctggaggtgaaggaatcaccaaagctaaagcatatccctgtggtgatcatgtccagtgacaacatccctgaaaggatgcaaaagtgcttggatgcaggggccaaggagtatatcataaagcctatcaaagcagttgatgtgccccgtattttgagctacatttga

SEQ ID NO: 1482 - protein, 123 aa, Sorghum bicolor
MDTVAPHVLIVDDTFVDRLVASRVLKNCNIQVTIVEGPKQALEFLDVENDVNLILTDYCMPGMTGYDLLLEVKESPKLKHIPVVIMSSDNIPERMQKCLDAGAKEYIIKPIKAVDVPRILSYI

SEQ ID NO: 1483 - DNA, 1131 bp, Sorghum bicolor
atggaagcaggaggaggtggtggagggggagggggagagtcgaagaagaaggaggagagcttgccgccgggcttcaggttccacccaacggacgaggagctcatcacgtactacctgcggcagaagatcgccgacggcagcttcacggcgagggccatcgccgaggtcgacctcaacaagtgcgagccgtgggatctcccggagaaagcgaagctgggagaaaaagagtggtatttcttcagcctaagagaccgaaagtacccaacaggcgttcgaacaaaccgtgccactaacgccggatattggaagacaacggggaaagataaggaaatctacaccggtcagctaccggccacgccagagctagtagggatgaagaaaaccctggtgttctacaagggaagagctcctcggggcgagaagacaaactgggtcatgcatgagtatcgcctgcactccaaatcagtccccaaatctaacaaggatgagtgggtggtgtgccgggtgttcgccaagagcgccggcgccaagaagtacccgtccaacaacgcgcactcgcggtcgtcgcaccaccaccacccgtacgcgctggacatggtgccaccgctcctgcccacgctgctgcagcacgaccccttcgcgcgccaccacggccaccaccaccaccacccgtacatgaccccggccgacctggccgagctcgcgcgcttcgcccgcggcacgccggggctgcacccgcacatccagccgcaccccgggacgtcggcggcggcggcggcgtacatgaaccccgccgtggcagcagctgcgccaccgtcgttcacgctctctggcagtgggctcaacctgaacctcggcgcctcgccggccatgccatcgccgccgcaagcactccacgcgatgtcgatggcgatgggcggccagacgggtaaccatcatcaggtgatggcaggtgagcaccagcaccagcaccatcagcagcagatggcgacggcggcggggctcggcggctgcgtcatcgtgcccggagcggacggagggttcggcgcggacgcggccgggggccggtaccagagcttggacgtggagcagctggtggagaggtactggcctgccggctaccaggtctag

SEQ ID NO: 1484 - protein, 376 aa, Sorghum bicolor
MEAGGGGGGGGGESKKKEESLPPGFRFHPTDEELITYYLRQKIADGSFTARAIAEVDLNKCEPWDLPEKAKLGEKEWYFFSLRDRKYPTGVRTNRATNAGYWKTTGKDKEIYTGQLPATPELVGMKKTLVFYKGRAPRGEKTNWVMHEYRLHSKSVPKSNKDEWVVCRVFAKSAGAKKYPSNNAHSRSSHHHHPYALDMVPPLLPTLLQHDPFARHHGHHHHHPYMTPADLAELARFARGTPGLHPHIQPHPGTSAAAAAYMNPAVAAAAPPSFTLSGSGLNLNLGASPAMPSPPQALHAMSMAMGGQTGNHHQVMAGEHQHQHHQQQMATAAGLGGCVIVPGADGGFGADAAGGRYQSLDVEQLVERYWPAGYQV

SEQ ID NO: 1485 - DNA, 813 bp, Sorghum bicolor
atggtctgttataatgctctgcgatgtgcaaaagttgtactggagggcaaggcacctgagctcaatggaatgcacgccaatcccaactgcataaacccatatggatacttcccgctccatgaagctgctgaaaggttctcttgtgacatgatcaagttgcttttacgccatggcgcatcagccaatgtgcacactgttggcaatgatgtcatcgagaacctacttccactccatgttgcaattgagaatacttgcatgcataagtatctggaggacaatctttctcccagccagagtcatttggattatatctacaagcttatccatctgttatgtctacctgaaatgaagatcttcttggatacaactagattgcttgctgaaaaaacaaataatctacttgaagagctctggaactacattgagaatggaaagcttatccagtctgcgattctactactggctgctcaggagcacattcgcaggggttgttcctccaagaaaaatggtagcagtaaaaaagatgggttttacgttatcaataagcgtatactgtggctttcatttgccttgagatgggagaaaggttcaaatgaaatggcggagaagcttctgaacgaaagaagagcacttattgattgcacagggttgcttgttgatgtaatttcccaaaccggtcaacgtctttcttcatatattcagtcacattcagaggtaccccgtgtggaggtcttggaacatgtttcatctatcctcaaggaatatgggtttaatcctactggagaaatcatggacactataaacctgtactag

SEQ ID NO: 1486 - protein, 270 aa, Sorghum bicolor
MVCYNALRCAKVVLEGKAPELNGMHANPNCINPYGYFPLHEAAERFSCDMIKLLLRHGASANVHTVGNDVIENLLPLHVAIENTCMHKYLEDNLSPSQSHLDYIYKLIHLLCLPEMKIFLDTTRLLAEKTNNLLEELWNYIENGKLIQSAILLLAAQEHIRRGCSSKKNGSSKKDGFYVINKRILWLSFALRWEKGSNEMAEKLLNERRALIDCTGLLVDVISQTGQRLSSYIQSHSEVPRVEVLEHVSSILKEYGFNPTGEIMDTINLY

SEQ ID NO: 1487 - DNA, 867 bp, Sorghum bicolor
atggacagcgactacgttgccagcctgctcatgggctcatccgcccatgcgctcgacttcgccgcgctggacaccgggttcctcgacacgctctgcggcggcgccggcctctttggggtgcccggggtcgccgcggggactgggtgtggcagcggcggcggcggcgggtccccggaggggtcctcggtgtccgacccggcgtgggcgcgcgccagcgacggcggcaatgccaggaagcgcaaggcgccgcccacggggtccgccggcgggaaggagacctgcttgggcaaggctgcggaggccaaggttccggacgggaagaggtgcagagtgggcgctagcgacagtccggtgaagcccaaggtagaggaggcggcggcgagcgacgcctcggttgaagtcaaagggcagaagaagggcaaggggaagagcccgaagccggcagtcgaaccacccaaagactacgtccatgtccgggcacggcgaggtcaggcaactgacagccacagccttgcagagagggttagaagagagaagattagccagaggatgaagtttctacaggacctagtgccaggatgcaacaaggtggttggcaaggcactcatgctcgatgagatcataaactacgtgcaatcgctgcagcagcaagttgagttcctgtccatgaagcttgccactgtgaacccgcaacttaatttcagcaacctgtcgactctcctacacaaagatatgtaccaaccatgtggcccatcagctaattcggtctttccattggaaagtgccggtgcagcttttccattttgtgaccaaggggatcttttccagaactttggttcgggtgctaggaggatcagtgctctctaa

SEQ ID NO: 1488 - protein, 288 aa, Sorghum bicolor
MDSDYVASLLMGSSAHALDFAALDTGFLDTLCGGAGLFGVPGVAAGTGCGSGGGGGSPEGSSVSDPAWARASDGGNARKRKAPPTGSAGGKETCLGKAAEAKVPDGKRCRVGASDSPVKPKVEEAAASDASVEVKGQKKGKGKSPKPAVEPPKDYVHVRARRGQATDSHSLAERVRREKISQRMKFLQDLVPGCNKVVGKALMLDEIINYVQSLQQQVEFLSMKLATVNPQLNFSNLSTLLHKDMYQPCGPSANSVFPLESAGAAFPFCDQGDLFQNFGSGARRISAL

SEQ ID NO: 1489 - DNA, 2985 bp, Sorghum bicolor
atggagaccgacgagaagcggcacggcgggaaggaggcggtggcgctcagcgggggccacctttgccacgtctgcgggtaccagtacccgaacccgcaccccagcgccaagctccgccgctcccaccgcaagcactgcggcaaggcgcttccggcggaggcggtagcggaggcggtggcggaggttgaggaagccgttgtgggggtcggggttggcgtgggcgagcgggaggacggcgccggcgccggcaatgcggccgggcggatggtgctcggtggtgaaggaggacgacagcgagaggagattggcacgagcgaggccaatggaggagcggcggcgctgcgcggatctgcgggagaagttggcatttctatggaggacaagctgattgctgcagatggtggcatcttgcgctttttgttgttttgcccgtactgcattttgcgatacattgaaaagggtaaaaagccgcaaaaggagcatttcgtccaaagaatgttggatcattttacctttttattcaagttacctagagtctatgttgattttctctctattgttttgatagaacattcttctcctacctgtactggagctcaaggcattgccactgaattgagtgaagaccacctgattaattgcggcagcagtgaaaatgtttttcctgaagatactggagctcaaatcgacgccagtgaattaagtgaaaatggccttgttgactgcagcagcaattctattgagattgtaaacgaaggcagtggaactgaattactgattgcttgcactaatggaagtcaaaatattgtgggacatcaagttgagcgagaagacagctttgatgaataccaggatgcatctccgtttcttcatcaatctgattctgaagatggcgctgcaccaagttcagtattttctacagaaatgaataaattgaatgctatctcagcagggtcaagtgtaactacaaatgtaaattctctagaaacaaatggattcctcaaagatcaattttctggagaacccaatgtgacagatttatgtgttgactccatagttggacgtaatttggaggaaggagctcttagattgtctgaacatgaattaaacctgaagcttgggggtccatatgaacaagctgtgaatgttgactacacttgcgcagatatggttggtaaatctgatgaagcatctgttcatagtgagatgattggttgtttgaatgcttcatccattcaggaaacctgcctggtaattttggaaccagaatcagagtctacatgctcgagaaaggtggaaggttttatggaagatagaatgcatgttcttcacaccatgcctgaagcatcaccaagatcagaagtagtgggatcagataatgttcagttggaaacaataaccaaccctagcactaaccccatgcctggtgatctgaatgttgtttgcactgataatactgctacagattgttccatggagccccccagacagaactggagtgttgaggatgtaccagatggtaatcaacctgttgagaattctagcaagaaaactttgagatgtcctgctgctggttttcaggatgatcttcctgttaccaagataaatgatactcctgttactaatgtggatgatgtagaattcacctttgaggagaggccacagacagatactgtagaagaaaatctttccatacataagactaacgggttcactaaagaggaaatctgcaacaagcagtttgaccctgagatccctgcagaagatcaattttctgtgagtcagaaacatgacactttactaatggatcaagcatcttctgtcaagaatccatttaatctagacgatgacaggaatgacgacttatttgaacttcccactgagagctgctttttggaggtaccaaatgctgttgaatcaagacagcaagttgactctacatccgtaatggtggatgaaccaacagtctctaaccaaactaggatggctgaagttcaacaatgccataactcaactgaacgcatattatctgcatcaagtgccagtgaaaatgaagtagttggtccagaagacattcctgtcagcagtagttctgaactggtgaacaagagttgcttgactgaccatggcctgcaggaaaatgggcatacaagtggtgatatttttgtgccatctcaggcagcctccgtggagcttagcacaatgtctatgcaggatatcagtgcactcagtgaagttgaagaaattatgcaaactgaagatgctagtgcaaaggacatgactgcagtacgtagcattgattgtattgaaatgaaccaggctatcaacactacagaaaatgatacatatgccgctaatgttgaagaaaagaagctgattgaaggcaccgctgcagggatgaatgaggtgcgacagacagattatgttgaagaacagacacaagctagcgatacaaaggagttgagcgcagtacagaacataggaaattttgaagaaaataagctgactgaagataaagatgcaaaagagactaacgtacggtttaatgcaaatgatgttggacacaaaacacaaactccaaaggagatggctgcagcagaaagcacatgtagcgttgaagagaaacagcagctaaacatcatggttggccaagatggaagcaacaacaagctgaatgaagagattgcatcgacaggcgccaagctgaattcaggaagagttcgtgtcccgctgaaggtcctcctcgccgaggcaagcatggagaaccaagtgaaaaaacccagcaccaaggaacgagtgctgtcgtttcggcgccgggtgaccaaggacagcaacttgtcagtgaaatcagggtcacccaaatctggctctgacgaccatcattggagctccccagccaaactgcctcataaggacgttgacaagagttccaaagaaaagaagcagccgtggatgccgtttatctgctgccactccgtgcgctga

SEQ ID NO: 1490 - protein, 994 aa, Sorghum bicolor
METDEKRHGGKEAVALSGGHLCHVCGYQYPNPHPSAKLRRSHRKHCGKALPAEAVAEAVAEVEEAVVGVGVGVGEREDGAGAGNAAGRMVLGGEGGRQREEIGTSEANGGAAALRGSAGEVGISMEDKLIAADGGILRFLLFCPYCILRYIEKGKKPQKEHFVQRMLDHFTFLFKLPRVYVDFLSIVLIEHSSPTCTGAQGIATELSEDHLINCGSSENVFPEDTGAQIDASELSENGLVDCSSNSIEIVNEGSGTELLIACTNGSQNIVGHQVEREDSFDEYQDASPFLHQSDSEDGAAPSSVFSTEMNKLNAISAGSSVTTNVNSLETNGFLKDQFSGEPNVTDLCVDSIVGRNLEEGALRLSEHELNLKLGGPYEQAVNVDYTCADMVGKSDEASVHSEMIGCLNASSIQETCLVILEPESESTCSRKVEGFMEDRMHVLHTMPEASPRSEVVGSDNVQLETITNPSTNPMPGDLNVVCTDNTATDCSMEPPRQNWSVEDVPDGNQPVENSSKKTLRCPAAGFQDDLPVTKINDTPVTNVDDVEFTFEERPQTDTVEENLSIHKTNGFTKEEICNKQFDPEIPAEDQFSVSQKHDTLLMDQASSVKNPFNLDDDRNDDLFELPTESCFLEVPNAVESRQQVDSTSVMVDEPTVSNQTRMAEVQQCHNSTERILSASSASENEVVGPEDIPVSSSSELVNKSCLTDHGLQENGHTSGDIFVPSQAASVELSTMSMQDISALSEVEEIMQTEDASAKDMTAVRSIDCIEMNQAINTTENDTYAANVEEKKLIEGTAAGMNEVRQTDYVEEQTQASDTKELSAVQNIGNFEENKLTEDKDAKETNVRFNANDVGHKTQTPKEMAAAESTCSVEEKQQLNIMVGQDGSNNKLNEEIASTGAKLNSGRVRVPLKVLLAEASMENQVKKPSTKERVLSFRRRVTKDSNLSVKSGSPKSGSDDHHWSSPAKLPHKDVDKSSKEKKQPWMPFICCHSVR

SEQ ID NO: 1491 - DNA, 732 bp, Sorghum bicolor
atggggagggggcgggttgagctgaagcggatcgagaacaagatcaaccgccaggtcaccttcgccaagcgccgcaacgggctgctcaagaaggcgtacgagctctccgtgctctgcgacgccgaggtcgcgctcatcatcttctccaaccgcggcaagctctacgagttctgcagcggacagagcatcacaaaaacacttgagaggtacgaaaaaagcaattatggaggcccagatactgctgtacagaacaaggagaacgagttagtccagagcagtcgcaatgagtaccttaaactgaaagcaagggtggataatttacaaaggactcagaggaatttgcttggtgaagatctggggtcacttggtatcaaagagcttgagcagctcgagaagcaacttgattcatccttaaggcacataagatccacaaggacacaacatatgcttgatcagctcactgatcttcagaggagggagcaaatgctgtgtgaagcaaataagtgccttagaagaaagctggaggagaccagcaaccaggtgcatggccaagtgtgggagcacggtgccaacttactcggctacgagcggcactcccccccacagcaggccccatcacatgttggcaatggattgttctttcatcccctggaagctgcagcagagccaaccctgcagatcgggttcgctcctgaacatatgaataacttcatgccgacatggctaccctga

SEQ ID NO: 1492 - protein, 243 aa, Sorghum bicolor
MGRGRVELKRIENKINRQVTFAKRRNGLLKKAYELSVLCDAEVALIIFSNRGKLYEFCSGQSITKTLERYEKSNYGGPDTAVQNKENELVQSSRNEYLKLKARVDNLQRTQRNLLGEDLGSLGIKELEQLEKQLDSSLRHIRSTRTQHMLDQLTDLQRREQMLCEANKCLRRKLEETSNQVHGQVWEHGANLLGYERHSPPQQAPSHVGNGLFFHPLEAAAEPTLQIGFAPEHMNNFMPTWLP

SEQ ID NO: 1493 - DNA, 804 bp, Sorghum bicolor
atggagaggcctgcgcaggcgcccacgcagctgccgccggggttccggtttcaccccaccgacgtggagctggtagtgctgtacctccgccggcaggccctggctcgcccgctgccggccgccgtcatccccgtcgtccacgacgtcgccaggctcgatccatgggacctccctggggcaagcgaaggggagggctacttcttcagcctgctgcggcgagcgccggcgaccggccgtggcagccgcaggaggagagctggaagcgggtactggaaggccacggggaaggagaagccggtgttcctgcagtgcggcggcggcgttggcggcaaggggcagctgctcgtgggcgtcaagacggcgctcgccttccaccgcagtgagccgccggcgccgtcgtcgcggaccggctggatcatgcacgagtacaggctcgccgtgtcccgcggcgtggccgagcagagagagaagaatgcgagccagggttgcgttgctgcgccgggagagtgggtcgtgtgccgggtcttcctgaagaacggagcaagaagcaggccgaaccgggatgccaacagcaaagctctgggacaccgcgcctccgctgcgccgccgcagccgccaccgcagcaccgggaagatgtgggaggacgacggcagcagccgttgctactctcgtcgtcgcagtcgtcgtcctcgagctgtgtcaccggcgctaccgacttggcagaccaagacgacgaagtcagcggcggcggcggcggcataagcagagataccccagctgaccctcaaagagaggcctactag

SEQ ID NO: 1494 - protein, 267 aa, Sorghum bicolor
MERPAQAPTQLPPGFRFHPTDVELVVLYLRRQALARPLPAAVIPVVHDVARLDPWDLPGASEGEGYFFSLLRRAPATGRGSRRRRAGSGYWKATGKEKPVFLQCGGGVGGKGQLLVGVKTALAFHRSEPPAPSSRTGWIMHEYRLAVSRGVAEQREKNASQGCVAAPGEWVVCRVFLKNGARSRPNRDANSKALGHRASAAPPQPPPQHREDVGGRRQQPLLLSSSQSSSSSCVTGATDLADQDDEVSGGGGGISRDTPADPQREAY

SEQ ID NO: 1495 - DNA, 1128 bp, Sorghum bicolor
atgctgggcgccgcgaggaggcagcttggatccggtcccatgctgggacaggttttgcgaaggctccgcccagcggcggcggcggctgaggtggcgaggggctactccgccgcggcgaaggagatgaatgtccgtgatgcgttgaactctgcactggatgaagagatgtctgctgatccttcagtttttctgatgggagaagaggttggagagtatcaaggtgcatacaagatttctaagggcttgcttgacaaatatggtcctgatagggttcttgacacacctatcacagaggctggctttactggcattggtgttggtgcagcttatcatggtcttcggcctattatagaatttatgacatttaatttctcgatgcaggctattgatcatatcatcaattcagctgccaagtcaaactatatgtcagctggtcagatatctgttcctattgtttttagaggaccaaacggagctgctgctggagttggtgctcaacactcacagtgttatgcagcttggtatgcacatgtaccaggacttaaggttctcacaccatactcttcagaagatgcccgaggcttgctcaaagctgctattagggatcctgatcctgttatttttctggaaaatgaattgctttatggagaatctttcccagtttctgctgaagtgcttgattctagtttttgcctaccgattgggaaagctaagatagaacgtgaaggtaaagatgttaccattactacctactccaagatggttggctatgctctccaggctgcagagatactgtccaaggaaggaatcagtgctgaggtgatcaaccttcgatcgattagaccacttgacagggctgctattaatgcatctgtcaggaaaaccaaccgattggtgactgttgaagaagggttcccccaacatgggattggtgccgagatatgcatgtctgttgtagaagaaagcttcgagtaccttgatgcaccagttgagaggattgctggagctgatgtacctatgccttatgctgccaaccttgagagaatggctgttccacaggtcgatgacattgtgcgggccgcaaagcgggcctgctacagggcagtaccaatggcagcagctgcctga

SEQ ID NO: 1496 - protein, 375 aa, Sorghum bicolor
MLGAARRQLGSGPMLGQVLRRLRPAAAAAEVARGYSAAAKEMNVRDALNSALDEEMSADPSVFLMGEEVGEYQGAYKISKGLLDKYGPDRVLDTPITEAGFTGIGVGAAYHGLRPIIEFMTFNFSMQAIDHIINSAAKSNYMSAGQISVPIVFRGPNGAAAGVGAQHSQCYAAWYAHVPGLKVLTPYSSEDARGLLKAAIRDPDPVIFLENELLYGESFPVSAEVLDSSFCLPIGKAKIEREGKDVTITTYSKMVGYALQAAEILSKEGISAEVINLRSIRPLDRAAINASVRKTNRLVTVEEGFPQHGIGAEICMSVVEESFEYLDAPVERIAGADVPMPYAANLERMAVPQVDDIVRAAKRACYRAVPMAAAA

SEQ ID NO: 1497 - DNA, 351 bp, Sorghum bicolor
atggcgcctcccatctcagcatcacaaagcacaatcaccattctgaagatttttccaaaacctcctgcacctgataccagcagcaataacttcactgttggggccaaattcgacaacaggagggcacttttatgtggcttggtcgctgctgctgctggcaccgtgctgagccctgacatcgccggtgctgcttcgaagaggcggcctccaccaccagggccggcagaggagaagaaagacccgaatgttagcggtgtgcaggctaaggtgcttgccagcaggaagaggaaggaggccatgaaggaagctgtggccaagctgagggagagaggtaagccagtcgataagtga

SEQ ID NO: 1498 - protein, 116 aa, Sorghum bicolor
MAPPISASQSTITILKIFPKPPAPDTSSNNFTVGAKFDNRRALLCGLVAAAAGTVLSPDIAGAASKRRPPPPGPAEEKKDPNVSGVQAKVLASRKRKEAMKEAVAKLRERGKPVDK

SEQ ID NO: 1499 - DNA, 3408 bp, Sorghum bicolor
atggacaagcaatccagcacccggcatggcaccctagagaaattgaagagcttccgggggatagagaagcagagaagcttcaagttcttgtccatggagaagcagcagagcttcaaaaggaacaaggacagccctgggaagcggggtgacaccgagctccaccttgcggcgagagctggcagtgttgcacatgtccagaggatccttgcggagtgtgatccagagctggtggtggagttagctgctcgccagaatcaggacggtgagactgcgttgtatgtgtctgctgagaaggggcatgttgaggttgtgtgtgagattttgaaggcttctgatgtgcagtcagccggactcaaggccagtaacagcttcgatgcattccatattgcggcaaagcagggccatttggatgtcttgaaggagctgttacaggcctttccctcattagcaatgacaacaaattctgtaaatgccacagctttggacactgctgcaactcagggccacattgacattgttaatcttctgctagaaacagatgcaagccttgctaggattgcaagaaataatggcaagacagttttgcattcagcagcgagaatgggccatgtggaggtggtcactgcactgttaaataaggatccagggattggtttcagaacagataagaagggacaaacagctctacacatggcttcaaaaggccaaaatgcagaaattctgctcgagttgttgaagcctgatgtctcagttatccatgtagaagacggcaaggggaatagaccattgcatgttgcaactcgaaagggaaacaccattatggttcagaccctaatatcagttgaggggattgaaatcaatgcggttaatagagctggagagactgcttttgctattgcagagaaacaaggtaatgaagagctcattaacatcctgagagaggttggtggagaaactgcaaaagagcaagtaaatcctcctaatccagcaaagcagcttaagcagacagtcagcgatatcaggcatgatgttcaatcacagatcaagcaaacacgccagaccaaaatgcaattccaaaaaatcaagaagagaattcaaaagctccacattggtgggctaaacaacgccattaactccaacactgttgttgcagtgcttattgccaccgttgcctttgccgccattttccaactccctggtaattttctggaggatataactcaagcaccttatccagacatgaccttggggcaagcattgatagccagtgatccagcctttataatcttcttggtttttgacgctttggctctctttatctcgcttgctgttgtagtagtccagacatctctaattgttgttgagcagaaggccaagaagaagatggtctttgtgataaacaagttgatgtggcttgcatgcctctgcatctcggcagccttcatagcactaacctacgttgtcgtgggtcgagatgatgagtggctggcttggtgcacaatggcaatcggcactgttatcatggtggccactctcggttccatgtgctattgcattgttgctcacaggatggaagagaagagcatgaggaagatcaggaggacctccacaagccagtcattttccatatcaattgactcggaaacggagctgatgaacagtgagtacaagaagatttcgtccgggttctctcactccacttgcatcttcatctcgagaatctccgtccagggcggcggcgcagcggttgccatggctggcccgcgccgggaagagggagtagaagcaccgctcgccgttggagtagcgcaggcgccgcaacagctcctccaccccgggccgcagcgccaccgccgccgccgccgcctccctggtggaggagggattgaggaggagggaggcatccagcacgagtcgtacagaccgccccgtggccatggcttaggaaagggagatgccaattgccaacgcctgggttcggtttctggctttctgctcggcgttggcactaccgcactcgggggctgccgggctggagctggacgcctgaacctggagccgggcatgggaaaggggaagctcctgatcggtaggcccaggtgtcagtggcaggcgtggccccccacggacgcatgggtggcacctggcgggaggaaggcgaacagatgtgcagcgcagcagaccacgccacccatcgccgccgaccggcgggaacggcttgtcccggagaccctcctcgggcagtgcccggccaccctcgccaaaggagaaaccgcgctcgtcatcggccgacgaccgcgcggcgaaccggcagctctggctccgaggaggatggtcgtaggcgccggggaagcgctcgtgtccccatccacacgttggcggagcgccggcggcggaggagaggcgctcaaaagaaaagaaaagaaaagggcaagcaacaccgacacgatcacagacccggccgatctgctccgtgcctccgcctgctcgagctcgacgcggatcggcggatcgcgatcattctccccggcgttcccggcgtatagtaccgtcagaaaagactccccctcctcgcccggatctccaaattatgtcgactctggacgagccgccgcaacctacctcgccggcctattactaccctacctcgccggcggcctattaccctccctcgccgccggcctattactaccatacctcgccggtttactcaccacccttgtcctcgccaggctcgagcgcgcgttggtattccccacccccatcggccccgccggtttactgcgcggtcccgaagaattcaacgatgtttggggagacataactctggcggcggacaaggtacaaacaccggcatcgctcgagtactgctactgttgttcgacgacgctgcaagattgctgctgtcaggccagcgacgacgccgccctcgcgcccgcggacgcaaaagagaagtcacaatgccacccagccaagcgccgcccgcctcgccacgtcaggctgctcctcgccggcatagaagatgcgtgttggcttctcaggccgctcccaccattgaccttgccgctaacccgctcgcccgccggccacgcccccgctcctaccgtagacgcgccccagccacaagtggagttccaccgttgtcgcctgggtcgagcatgtgggagccccggcgaccccgccccgcggctgctcgcgctcctcccccggcaccgcttcggtccaggccaagtgtcatccagggtgctcggtgccaagagtggacgagacaccatcaatgccgaggacgatggtgcgggcgtcatggtgcaaccagacgggtatgtgaagaggtccaatttgtatttgtgttcccgcataacgaaggccatcatcgtcatgtcccttgttgaccccatcgccatctga

SEQ ID NO: 1500 - protein, 1135 aa, Sorghum bicolor
MDKQSSTRHGTLEKLKSFRGIEKQRSFKFLSMEKQQSFKRNKDSPGKRGDTELHLAARAGSVAHVQRILAECDPELVVELAARQNQDGETALYVSAEKGHVEVVCEILKASDVQSAGLKASNSFDAFHIAAKQGHLDVLKELLQAFPSLAMTTNSVNATALDTAATQGHIDIVNLLLETDASLARIARNNGKTVLHSAARMGHVEVVTALLNKDPGIGFRTDKKGQTALHMASKGQNAEILLELLKPDVSVIHVEDGKGNRPLHVATRKGNTIMVQTLISVEGIEINAVNRAGETAFAIAEKQGNEELINILREVGGETAKEQVNPPNPAKQLKQTVSDIRHDVQSQIKQTRQTKMQFQKIKKRIQKLHIGGLNNAINSNTVVAVLIATVAFAAIFQLPGNFLEDITQAPYPDMTLGQALIASDPAFIIFLVFDALALFISLAVVVVQTSLIVVEQKAKKKMVFVINKLMWLACLCISAAFIALTYVVVGRDDEWLAWCTMAIGTVIMVATLGSMCYCIVAHRMEEKSMRKIRRTSTSQSFSISIDSETELMNSEYKKISSGFSHSTCIFISRISVQGGGAAVAMAGPRREEGVEAPLAVGVAQAPQQLLHPGPQRHRRRRRLPGGGGIEEEGGIQHESYRPPRGHGLGKGDANCQRLGSVSGFLLGVGTTALGGCRAGAGRLNLEPGMGKGKLLIGRPRCQWQAWPPTDAWVAPGGRKANRCAAQQTTPPIAADRRERLVPETLLGQCPATLAKGETALVIGRRPRGEPAALAPRRMVVGAGEALVSPSTRWRSAGGGGEALKRKEKKRASNTDTITDPADLLRASACSSSTRIGGSRSFSPAFPAYSTVRKDSPSSPGSPNYVDSGRAAATYLAGLLLPYLAGGLLPSLAAGLLLPYLAGLLTTLVLARLERALVFPTPIGPAGLLRGPEEFNDVWGDITLAADKVQTPASLEYCYCCSTTLQDCCCQASDDAALAPADAKEKSQCHPAKRRPPRHVRLLLAGIEDACWLLRPLPPLTLPLTRSPAGHAPAPTVDAPQPQVEFHRCRLGRACGSPGDPAPRLLALLPRHRFGPGQVSSRVLGAKSGRDTINAEDDGAGVMVQPDGYVKRSNLYLCSRITKAIIVMSLVDPIAI

SEQ ID NO: 1501 - DNA, 426 bp, Sorghum bicolor
atggcgggctacggcggcggcgacgacggcgtggacctcaccgagctgacgctggggctacccggcgtcaatgcgcgcaaggcgagacgagcgaggaagaacggccagcagccgccgtcgtcgtccgccatgatgcaagcgttcgtgaaggtgagcatggacgggacgccgtacctgaggaaggtggacgtggcggcgtacgacgactacggcgagctcgtggaggcgctcaatgagctcttctgctgctgctccatcgggctgatggatgggtacggcgactgggagcacgccgtggtgtacgaggacggcgacggcgactggatgctcgtcggcgacgtgccgtgggagatgttcgtgtcctcgtgcaagaggatgagagtgatgcgatcgtgcgaggcgagagggttgagctccaacgcctga

SEQ ID NO: 1502 - protein, 141 aa, Sorghum bicolor
MAGYGGGDDGVDLTELTLGLPGVNARKARRARKNGQQPPSSSAMMQAFVKVSMDGTPYLRKVDVAAYDDYGELVEALNELFCCCSIGLMDGYGDWEHAVVYEDGDGDWMLVGDVPWEMFVSSCKRMRVMRSCEARGLSSNA

SEQ ID NO: 1503 - DNA, 2709 bp, Sorghum bicolor
atggcggccaataatagtgacccaatcccggatcagctgggggaaggaggggcgggcgtgaagcacgaaacaggggaggaggtgggggaggagacgtcttcttccgcggcgcaggcgaccgcgacgacgatgctgccccggtcgagctcgcggccgcagctggacctcagcggcgccgcgatccacgggacgctggaggaccgcaaccctaccatcctgcttcccaaccaatccgacgacatctcccacctcgcccttgacatcggcggatctcttataaaactggtatacttctcgcgacatgctgagctttccactgaagataagcgcaagatatccacaaagagaaaacttgggatgtttaatggtggcaggagaagctacccgattcttggagggaggctccactttgtcaaattcgagactgggaagctaaatgaatgtttggatttcatttcttccaaacaactacatcgtggtggaattgattcaccttcgtggcgctcgggagctcagcctgatgacattgtaattaaggcaacaggtggtggagcatacaagtatgcagatgtcttcaaggaaagattgggagtcagccttgaaaaggaagatgaaatggactgtcttgtggctggagcaaactttttgcttaaggctatacgtcatgaagcttttacacacatggatggtcagaagcgatatgttcagattgatcagaatgacttgtttcccttccttcttgttaatatcggatctggtgttagtataatcaaggttgacgggcatggggaatttcagcgagtaagtgggacaaatgttggtggtggtacgtactggggattggggaagctaatgacaaagtgcaagagttttgatgagttgctagagttgagccagcgtggagacaacagcaccatggacatgcttataggagacatatatggtggtctggactactccaagattggtctttcagcatctacaatcgcctctagttttggaaagataatttcagaaaacaaagagctatcagattatagacctgaggatatatcgctctccttgttacggatgatttcatacaacattggccagatttcctatctaaacgcacttcgttatggactcaagaggatattttttggtggattcttcatccgtgggcatgcctacaccatggatacaatttcttttgcagtgcatttctggtcaaaaggagaggcacaagctatgtttctgcgccatgagggcttcctaggagctcttggagcatttatgagttatgagaagcatggtcttgatgacttaagggcacatcatttggttgaacgcttcccaatgggtgctccatatgttggtggaaagattcacgggccacctcttggagatctcaatgagaagatatcatggatggagaagtttgtgcagaagggtactcagattactgcccctgtacctatgggggttccagctacgacaggtatgggaggctttgaaaggccgacttctaagggtgacattttgcggtcagatgcaagtgcagcgctcaatgttggtgttctccatctcgtacccacattggatgtgtttccattgttagaggatccaaagacgtatgaaccaaacacaattgatcttgaccaggatgagttcaagtactggttcaagattttgtcagatcatttgccggaccttgtggacaaggcagttgctagtgaaggcgggactgatgatgccaagaggcggggagatgcatttgcgcatgccttttctgctcatctggcaagattgatggaggagccagctgcttatggaaagtttggtttggtcaacctgttggagttgagagaagaatgtctgagagaatttcagtttgttgatgcatatattagcatcaagcaaagggaaaatgaagcttcactggctgttttaccagatcttctgatggaacttgacagtatgaatgaggaagctaggctgcttgctctaattgaaggtgtccttgctgcaaatatatttgattggggatctcgagcttgtgtagaactttatcacaagggaactataatagaaatctatcgcatgagtcgcaagaagatgcaacgtccttggcggattgatgactttgatatgttcaaaaagagaatgctgactgatagaaaggaccaaccatacaaaagagcactgctttttgttgataactcaggtgctgatgtggtccttggaatgcttcctttagctcgggagcttttacgccgtggaacagaggtagttcttgttgcaaattcgttgccagctttgaatgatgttactgctaatgaacttccagaaattatagctgaagcctcaaagcactgtagtatccttcggaaagctgcagaagctggtgggttgatagttgatgcaatggctggcatccaagatgatctcaaggatgagccagtgtcagtgccactaatggttgttgagaatggatgcggcagtccatgtattgatttccggcaggttagctcagagcttgctgctgctgcaaaggatgcagatttgttaattttggagggcatgggacggtcactgcataccaacctcaatgcccattttaagtgtgatgctctaaagcttgctatggtcaagaataagcgattggcagagaagctcttcaatggaaatatatacgactgcatttgtaaatttgaaccagttttttaa

SEQ ID NO: 1504 - protein, 902 aa, Sorghum bicolor
MAANNSDPIPDQLGEGGAGVKHETGEEVGEETSSSAAQATATTMLPRSSSRPQLDLSGAAIHGTLEDRNPTILLPNQSDDISHLALDIGGSLIKLVYFSRHAELSTEDKRKISTKRKLGMFNGGRRSYPILGGRLHFVKFETGKLNECLDFISSKQLHRGGIDSPSWRSGAQPDDIVIKATGGGAYKYADVFKERLGVSLEKEDEMDCLVAGANFLLKAIRHEAFTHMDGQKRYVQIDQNDLFPFLLVNIGSGVSIIKVDGHGEFQRVSGTNVGGGTYWGLGKLMTKCKSFDELLELSQRGDNSTMDMLIGDIYGGLDYSKIGLSASTIASSFGKIISENKELSDYRPEDISLSLLRMISYNIGQISYLNALRYGLKRIFFGGFFIRGHAYTMDTISFAVHFWSKGEAQAMFLRHEGFLGALGAFMSYEKHGLDDLRAHHLVERFPMGAPYVGGKIHGPPLGDLNEKISWMEKFVQKGTQITAPVPMGVPATTGMGGFERPTSKGDILRSDASAALNVGVLHLVPTLDVFPLLEDPKTYEPNTIDLDQDEFKYWFKILSDHLPDLVDKAVASEGGTDDAKRRGDAFAHAFSAHLARLMEEPAAYGKFGLVNLLELREECLREFQFVDAYISIKQRENEASLAVLPDLLMELDSMNEEARLLALIEGVLAANIFDWGSRACVELYHKGTIIEIYRMSRKKMQRPWRIDDFDMFKKRMLTDRKDQPYKRALLFVDNSGADVVLGMLPLARELLRRGTEVVLVANSLPALNDVTANELPEIIAEASKHCSILRKAAEAGGLIVDAMAGIQDDLKDEPVSVPLMVVENGCGSPCIDFRQVSSELAAAAKDADLLILEGMGRSLHTNLNAHFKCDALKLAMVKNKRLAEKLFNGNIYDCICKFEPVF

SEQ ID NO: 1505 - DNA, 915 bp, Sorghum bicolor
atggccgcggcgccgtcgtccctcgcgtcctcccacctctcccgcctcgccgacctccgccgcgccgcggcggtggccactcccgccgtcccacagcagcttcgcatcggctgctcgcgccgccgcgcccagcgcgtcgtcgccatggctggatccggcaagttcttcgtcggaggcaactggaagtgcaatggaacaaaggactccattagcaagcttgtttctgaattgaatgctgctaccctcgaaactgatgtagatgttgtggtggcacctccattcatctatatcgatcaggtcaagaattcactaactggtcgcattgaggtttctgctcagaatgtgtggattggaaaaggaggagcctacaccggagagatcagtgcagaacaattggtggacattggtgttcagtgggttattcttggacactctgagcgtaggcatattattggtgaagatgatgagtttattgggaagaaggctgcatatgcattgagccaaaatgttaagcttattgcctgcataggagagctcctggaagagagggaagcagggaaaacttttgatgtatgttttacgcagatgaaggcttttgcagatagtatttcaaactgggccgatgttgtaattgcatatgagcctgtttgggctattggaactggaaaagttgctactcctgagcaggcccaggaagttcatgccgctgtacgcgattggttgaagaccaacgtatcacctgaagttgcctctagcactcgaataatctatggaggttctgtgaatgcagccaattgtgcagagctagcaaagaaagaagatattgatggttttcttgttggcggtgcctccttgaaggcaccggatttcgccaccattgtcaactcagtgactgccaagaaagttactgcgtga

SEQ ID NO: 1506 - protein, 304 aa, Sorghum bicolor
MAAAPSSLASSHLSRLADLRRAAAVATPAVPQQLRIGCSRRRAQRVVAMAGSGKFFVGGNWKCNGTKDSISKLVSELNAATLETDVDVVVAPPFIYIDQVKNSLTGRIEVSAQNVWIGKGGAYTGEISAEQLVDIGVQWVILGHSERRHIIGEDDEFIGKKAAYALSQNVKLIACIGELLEEREAGKTFDVCFTQMKAFADSISNWADVVIAYEPVWAIGTGKVATPEQAQEVHAAVRDWLKTNVSPEVASSTRIIYGGSVNAANCAELAKKEDIDGFLVGGASLKAPDFATIVNSVTAKKVTA

SEQ ID NO: 1507 - DNA, 408 bp, Sorghum bicolor
atggcttccctcaccggatccgctctctcctttgcgaggcccgtcaaggcaatcagcattaagtcttcctctttctctggtttaaggaaggataatgtagccttccgcctgcagccagtgccacaaagattcgcagtctgctgtcctgctaaaaaggagaccgtggatgaggtttgtaagattgtcaagaagcagcttgcacttgctgagggcactgatgtttgtggctcctctaagtttcaagaacttggtgctgattcattggacactgttgagattgttatgggccttgaggaggctttcaagatcactgtggaggagtcaagcgcacagtcaatcgcaactgtggaagatgctgctaatctcattgacgaacttgttgcggcagaagcagcaaaagcaaaataa

SEQ ID NO: 1508 - protein, 135 aa, Sorghum bicolor
MASLTGSALSFARPVKAISIKSSSFSGLRKDNVAFRLQPVPQRFAVCCPAKKETVDEVCKIVKKQLALAEGTDVCGSSKFQELGADSLDTVEIVMGLEEAFKITVEESSAQSIATVEDAANLIDELVAAEAAKAK

SEQ ID NO: 1509 - DNA, 1572 bp, Sorghum bicolor
atggcggcgtgggtgcgggccgcgttgctggccgccgccgccgtggccgcgtatacggcagcggcggcggtgccagcggaggcgctgagcctggacgtccaccaccggtactcggccaccgtgcgggagtgggcggggcaccaccgcgcgccgccggccgggacggcggagtactacgcggcgctggcccggcacgacctgcgtcggcggtcgctcgcggccgggcccgccgcaggaggaggaggaggaggggaggtggccttcgccgacggcaacgacacgtaccggctcaacgaactgggattcttgcattacgcggtggtggcgctggggacgccgaacgtgacgttcctggtggcgctcgacaccggcagcgacctcttctgggtgccctgcgactgcatcaattgtgcgcccctcgtctcccccaactacagggatttaaagttcgacacatacagccctcagaagtcgagtactagcaggaaggtcccatgcagtagcaatttgtgtgatctgcagagcgcatgccgatcagcaagtagcagctgcccttacagcatcgaatacttgtctgataacacgtcgtccaccggtgtgctagttgaggatgtcttgtacctgataacggagtatgggcaaccaaaaattgttacggcccccataacgtttggttgtgggcggattcagacgggttcatttctaggcagtgctgcacccaatggtctacttgggcttggtatggacagtatatcagtccctagtttactagcaagtgaaggagttgctgccaattccttctccatgtgctttggagatgatggtcgtggtagaatcaattttggggacactggaagctcagatcagcaggaaaccccgttaaacatttataaacaaaatccatattacaacataagcataactggtgccatggtgggaagtaaatcctttaacaccaattttaatgctattgttgactctggcacctctttcacagctttgtctgatccgatgtactctgaaatcactagcagcttcaattcacaagtacaagataagccaacccaacttgactcttctctgccctttgaattttgctactccataagtccaaagggttctgtcaatcctccaaacataagtttaatggcgaaaggtggaagcatattccctgtcaatgatccaataattaccattacggatgatgcatctaatccgatggcatattgcttggctgttatgaagagcgaaggtgttaacttaataggggagaatttcatgtctgggcttaaggttgtgtttgatcgagagaggaaggtcttgggttggaaaaaatttaattgttacagcgtggacaactcaagcaaccttccagtgaacccaaatccttctggtgttcccccgaaacctgccttgggaccgaacagttacactcctgaagctaccaagggtacctcgcccaatggcacccaagtcaatgtattgcagccttctgcaggtttttcgctgaagctgcattgcaacagaaacgtctttgtcgccgctgctctgctattgctcgtgatcctttga

SEQ ID NO: 1510 - protein, 523 aa, Sorghum bicolor
MAAWVRAALLAAAAVAAYTAAAAVPAEALSLDVHHRYSATVREWAGHHRAPPAGTAEYYAALARHDLRRRSLAAGPAAGGGGGGEVAFADGNDTYRLNELGFLHYAVVALGTPNVTFLVALDTGSDLFWVPCDCINCAPLVSPNYRDLKFDTYSPQKSSTSRKVPCSSNLCDLQSACRSASSSCPYSIEYLSDNTSSTGVLVEDVLYLITEYGQPKIVTAPITFGCGRIQTGSFLGSAAPNGLLGLGMDSISVPSLLASEGVAANSFSMCFGDDGRGRINFGDTGSSDQQETPLNIYKQNPYYNISITGAMVGSKSFNTNFNAIVDSGTSFTALSDPMYSEITSSFNSQVQDKPTQLDSSLPFEFCYSISPKGSVNPPNISLMAKGGSIFPVNDPIITITDDASNPMAYCLAVMKSEGVNLIGENFMSGLKVVFDRERKVLGWKKFNCYSVDNSSNLPVNPNPSGVPPKPALGPNSYTPEATKGTSPNGTQVNVLQPSAGFSLKLHCNRNVFVAAALLLLVIL

SEQ ID NO: 1511 - DNA, 1785 bp, Sorghum bicolor
atggcggtggaggaggccgcggagagctgcggcagtcacgccgcggccgccgccgcgtccggcggccgcgcggcggggcccgcgacgtcctcgtcatcggccgccgcggcggcggcgctggcgcggaagcagcagcagcagcagcgccacaagctcgaggtgtacacggaggttctccggcgcctccaggacgccggcccgcccgacgcgcgggcgcccgggttcgacgacgagctctggaaccacttcaaccgcctcccagcccgctacgccatggatgtgaacgtggagagggcggaggacgtgctcacgcacaagcgacttctggagcaggccaaggatccggctcagcgcccggctttcgcggtgcgggccgtgcaggtatctccaattcttgatgggaatcagactgatgctgattcgaacactgcaggggaggaagtcgcttcaagactgaacaggcagcaaagcatacatcctcctgctttcggttcttctacaaatcttgaagcccttgctcttgaagctagcaagtctcatcaagatcatgatagcacttctgataatggtcgatctctgtacaggcccatgcatgaaatcaccttttcaaccattgacaagccaaaacttctcagtgagctgacatctctgctcggtgagcttggtctaaacattcaagaagcacatgcattttcaacaaatgatggctactcacttgatgtctttgttgttgtcggttggcatgacgaggaaacagaggatttagtagaagcagtgcagaaggaaattggcaggattgaagagacacaagcatggtcttcatctcattcatggtctactccagttgaaaacatacagattgctgagaattcagcagctgaccatgttgagataccaacagatggtgctagtgaatgggaaattgatgtaaaactgctcaagtttgggaataaagtagcatcaggatcatatggtgacctttaccggggtacatattgcagtcaagatgttgctattaaagtgctgaaacctgagagaataaatgcagacatgcagcgcgaatttgctcaggaagtatatattatgaggaaggtccgtcacaagaatgttgtgcaatttattggtgcttccactaaacccccaaatctttgtataatcacagaatttatgtccagtggaagtgtgtatgattacctccataaacataaaggtgttttcaaacttcctgctttagttggagttgcaatggatgtgtcaaaaggcatgaactacttacaccagaataatattattcaccgtgatttgaaaactgcaaaccttctgatggatgaaaatgggactgttaaagttgctgattttggtgttgcacgtgttaaagctcaatctggagttatgactgcagaaactggtacttaccgttggatggccccagaggtcatagagcacaaaccctatgatcacaaggctgatgtttttagttttggaattttgttgtgggaactactcacagggaagattccttatgagtacctgactccactacaagcagctgttggtgtggtgcagaagggattacggcctacaattccaaaacatactcatgcaaggctttctgagcttcttcagaaatgttggcagcaggaccctgcccaaagaccagacttctccgaaattttagaaacccttcagagaatagcagaggaggtcggagatgagcacgaggggaagcacaaggacagaacactgggtggtttcttttcagctttcagggggcggagccattga

SEQ ID NO: 1512 - protein, 594 aa, Sorghum bicolor
MAVEEAAESCGSHAAAAAASGGRAAGPATSSSSAAAAAALARKQQQQQRHKLEVYTEVLRRLQDAGPPDARAPGFDDELWNHFNRLPARYAMDVNVERAEDVLTHKRLLEQAKDPAQRPAFAVRAVQVSPILDGNQTDADSNTAGEEVASRLNRQQSIHPPAFGSSTNLEALALEASKSHQDHDSTSDNGRSLYRPMHEITFSTIDKPKLLSELTSLLGELGLNIQEAHAFSTNDGYSLDVFVVVGWHDEETEDLVEAVQKEIGRIEETQAWSSSHSWSTPVENIQIAENSAADHVEIPTDGASEWEIDVKLLKFGNKVASGSYGDLYRGTYCSQDVAIKVLKPERINADMQREFAQEVYIMRKVRHKNVVQFIGASTKPPNLCIITEFMSSGSVYDYLHKHKGVFKLPALVGVAMDVSKGMNYLHQNNIIHRDLKTANLLMDENGTVKVADFGVARVKAQSGVMTAETGTYRWMAPEVIEHKPYDHKADVFSFGILLWELLTGKIPYEYLTPLQAAVGVVQKGLRPTIPKHTHARLSELLQKCWQQDPAQRPDFSEILETLQRIAEEVGDEHEGKHKDRTLGGFFSAFRGRSH

SEQ ID NO: 1513 - DNA, 591 bp, Sorghum bicolor
atggcgacagaggcgtccaggcgattcaggttccaggttgagatgcactgccgctgcattggctgcgtcaggaaggtggagaaggccatggcgtccattgggaggttcagtggagctgaaacttctgtgggggatgtcaacagcgggattgtcacggtggttggaaaggtgaacccaacagagatttgccactggttgaagaggaagacgaagaaaaatgtcaaagttgtgtaccctgatactacaaccgaggatcacaaacagaaaatgatattggttctaggaagcagctcacaaggtgggcaccctacaccctctgctccaccattacaagatggcatgccctgggctttggtaccatcaggagttcagccagaccatgacagcctacaattcattgaggagaagatcaggggcctcgagaagatcagggatgttctgaagatcaagaaactgcaaaacgagctgattgcagccaagagtgagctcaaacagtcaatgagagtgatcaatggcagtaagaaagttctactggatagtgctttgaatcagctcaaagcatacaagaacctagaggcacttagtcagtaa

SEQ ID NO: 1514 - protein, 196 aa, Sorghum bicolor
MATEASRRFRFQVEMHCRCIGCVRKVEKAMASIGRFSGAETSVGDVNSGIVTVVGKVNPTEICHWLKRKTKKNVKVVYPDTTTEDHKQKMILVLGSSSQGGHPTPSAPPLQDGMPWALVPSGVQPDHDSLQFIEEKIRGLEKIRDVLKIKKLQNELIAAKSELKQSMRVINGSKKVLLDSALNQLKAYKNLEALSQ

SEQ ID NO: 1515 - DNA, 2487 bp, Sorghum bicolor
atggagtggtcacgttccacctgcatcacagtcacagccgccgccgtgctcctcctcctcttgccgcgcttctgctcaccggccggcgacaagttaacccaaggggagtcgctgacgcccggcgagaccatcgtgtccgacggcggcgccttcgtgctgggcttcttcgccccctccaacgccacgccgggcaggcagtacgtcggcatatggtacaacaacatccccgtgcagacggtggtgtgggtcgccaaccgggacgcgccggtcaccgtcgacgagcgttccggcaataactcctcgtcgtctgcgccgccgccgccgtcgcttgcgctggccaacgacaccaccaccaccaacatcgtcttgtccgacgccgcgggccgcgtcgtttggaccacgaacgtcgtcactgccgccacgaccaccacgagctcaggtggttcgacgacggccgtgctcctcaactccggcaacctcgtcctccggtccccgaacggcaccacgctgtggcagagcttcgaccacccgacggacacgttcatcccggacatgaaggtcgggctgcgctaccggacgcacgacggcgcgcgcatcgtgtcgtggaggggccccggcgacccgtcgccggggaccttctcgtacggcatggacccgagcacgtcgctgcagatgctggtgtggaacgggacgcgcgcctactggcgcagctcggcctggacggggtacatgaccgtcagcaggtaccacgccaccaccggcacggtcatctacgtggccgtcgtcgacggcgaggaggagatatacatgaccttctacgtcaacgacggcgcgccgcccacgcggtacgtggtcaccggcgacggcaggttccagctcctgagctggaaccgcaacgcgtccgcgtggaccacgctcgagtcctggccgtcgcgctcctgcagcccctacggcagctgcggcgcctacggctactgcgacaacacgctgcccgtggccacgtgcaagtgcctcgacggcttcgagccggcgagccaggcggagtggagcggcggcgtgttctccgcaggctgccgccggagccaagcgctggcaccctgcggcgagggggatgcgttcttggcgatgcccaacatgaaggtgccggacaagttcgtgctcctggggaacatgagctccggcgacgagtgcgcggcggagtgccgccggaactgctcctgcgtggcgtacgcgtacgccaacctgcgcagcagcagcgccaagggcgacatcgcgcggtgtctggtgtggaccggtgaactcgtcgacacgcagatgatcggcgtgctctggggcatcactgctgagacgctccacctccgcgttccagcaggaatcacagataagaaaagaagcaatgaaagtgagaagaagttggttcccggtagtagcgtgcgaacatcaagtgagcttgcagaacgaacccctaaccctaatgaagatctcgaattcccttccatgcaattcagtgatatcgtcgcggcgacgaataacttctcgagagcatgtatgatcgggcgtggaggttttgggaaagtttacaaggggacattattaggtggtcgcgaggtcgctgtcaagaggctcagcaaggattctgaacaaggaatagaggaattcaagaacgaagctaccttgatctccaaactgcagcaccggaacctggtccggcttctcggttgctgcacacagggagccgagagggtgctggtgtatgagtacttggccaataaaggcctagatgcaatccttttcgacagcgaaaggaaatcactgctggattggccaacaagattggggataatcaagggggtggctagggggctcctgtatcttcatcaagattcaagactgacagtgatacacagggacctcaaagcgagcaatgttctgttggatgcagagatgagacctaagatagcggacttcggtatggccaagatcttcggcgacaaccagcagaaggcgaacactaggcgggttgttgggacatatggctacatagctcctgaataccaaaccgagggcgtcttctctgtcaagtctgacgtctatagctttggcgttttggtcctggagattgtaagtggcatcagaataagctctaccgataacatcaacggatctccgggccttgtagcatatgcatggaagctatggaacgaagggaacgcatgggacttggtggactcgtccgtcgcggagagctgtgccctcgacgaagccttgctgtgcgtccacgtggggctcctgtgcgtccaggacgacgcgaacggcaggccgctcatgtcgtccgtggtgtccatcctggagaacgggagcgtgtctctgccggcgccggaacagccggcgtacttcgcggagaggaattgtaataagtcactagaaggagacgatgtgcagacctccaggaactccatgaccatgactgtccttcagggacggtag

SEQ ID NO: 1516 - protein, 828 aa, Sorghum bicolor
MEWSRSTCITVTAAAVLLLLLPRFCSPAGDKLTQGESLTPGETIVSDGGAFVLGFFAPSNATPGRQYVGIWYNNIPVQTVVWVANRDAPVTVDERSGNNSSSSAPPPPSLALANDTTTTNIVLSDAAGRVVWTTNVVTAATTTTSSGGSTTAVLLNSGNLVLRSPNGTTLWQSFDHPTDTFIPDMKVGLRYRTHDGARIVSWRGPGDPSPGTFSYGMDPSTSLQMLVWNGTRAYWRSSAWTGYMTVSRYHATTGTVIYVAVVDGEEEIYMTFYVNDGAPPTRYVVTGDGRFQLLSWNRNASAWTTLESWPSRSCSPYGSCGAYGYCDNTLPVATCKCLDGFEPASQAEWSGGVFSAGCRRSQALAPCGEGDAFLAMPNMKVPDKFVLLGNMSSGDECAAECRRNCSCVAYAYANLRSSSAKGDIARCLVWTGELVDTQMIGVLWGITAETLHLRVPAGITDKKRSNESEKKLVPGSSVRTSSELAERTPNPNEDLEFPSMQFSDIVAATNNFSRACMIGRGGFGKVYKGTLLGGREVAVKRLSKDSEQGIEEFKNEATLISKLQHRNLVRLLGCCTQGAERVLVYEYLANKGLDAILFDSERKSLLDWPTRLGIIKGVARGLLYLHQDSRLTVIHRDLKASNVLLDAEMRPKIADFGMAKIFGDNQQKANTRRVVGTYGYIAPEYQTEGVFSVKSDVYSFGVLVLEIVSGIRISSTDNINGSPGLVAYAWKLWNEGNAWDLVDSSVAESCALDEALLCVHVGLLCVQDDANGRPLMSSVVSILENGSVSLPAPEQPAYFAERNCNKSLEGDDVQTSRNSMTMTVLQGR

SEQ ID NO: 1517 - DNA, 3462 bp, Sorghum bicolor
atggccgatgacgacgacttcgcctcgccgccgccagccccgcgcgcgcgggcggaaggaggaggcggaggcgtgtaccaggtgggcggcgttccggtggagttcccctacaagccctacgggacgcagctggcgttcatggggcgggtcatcgccacgctcgaccgtgcgcggcggcagggacgctcccacgcgctcctcgaatcgcccacaggcaccggcaagtcgctctccctcctctgctccgcgctcgcctggcagcggcactacccgctccgcacccctcccgcccccgcccccgccccctcccccgatccattcctccacggcggaggattcgtccccgatgatacccagccgcaggcgacgccagtcgttccggagaaggctgccaagaagaagaacgccccgacaatatattatgcgacgaggacgcacgcgcagataagccaggttgtccgggagtaccgcaagacgtcgtaccgagtgcgcatggccatcttggcctcaaggaagcactactgtgtcaatatgtttgcttgcgcgagcgacaacattgatgagcaatggaatgctcagaaactaagtcggcatccatcccttcagattggtggctgctatgaagttcacgatattgaggatcttgtcagagttggacagaaagcaaagggatgcccatattttgctgcacagcacatggcagaagcagcacaattggttttctgcccatataactacctgattagtccggttgtcaggagagcaatggacattgatatcagcagttccatcattattcttgatgaggcacacaacatagaagacatagcacgtgatgctggcagcattgacatcgatgaagaatcacttcacttgttgcagggagaacttcaaaacttggccactgatgaggctgttgcaatgatataccagcccttgcacgatattattcagggtcttattggttggattgctgagcgggagggcaatcttcataatcatgagttcggacatcccgcttcatattggactggtgaaaaggcaatgaatgaacttcagcgggctggtatttctccaatgtatttcccggtattgcaagaatgtgcaacaaaggcgattaaagctgcttcagatactgaatcagatggatcacacttgagtggtggtcgtgctatgacattagagagtctattctcttcattgagttacttttttggtcagaaagggcgtaattcatgtgattatcagcttgctttgcagcgttttgttaaaaaggaaggcaatgatgaaatttcttcaagatgcacaatgagtttgtggtgtctcaatcctgctgttgtttttcaagaaattgcagatcgaacactttcagtaattctgacttctggaacactttcaccaatgggttcctttacatctgaacttggtgtccagtttgaggcttgcatggaagctcctcatgtaattaatgctgattctcaggtttttgcagctgtgctatcatctggtccaacaaggcaaatattgaatgctagctataaaactgcggacaatttatctttccaggatgaacttggagcttcactagaggaaatatgcagaattgtgcctggtggtgctctagtgttttttcctagctacaagttgttggacaaattgcaagtgcgctggtctcagacaggtcaatgggcacggcttaatgctcaaaaacatgtgtttgttgatactaacattgattcaacatggatcagaaatgatgttcaagtaaagctgaaaaagagatataatgattcatacaaatcatcaaagcatttgttaagtgggagtgaatggtactgtcatcaggcatttcgtgctttaaatcaagctgcaggtcgttgcattcgtcataaatctgattatggaggcataattctgattgatgagcgatatcaggaaggcagaaatgttgcctacatttccaaatggcttaggaatgcaatcaagaagtacgatagcttccaggagacaatggctgagttgcagaagttctttcagaacgctgaggaaaaaataaaaatcaaagattgtggcatcttccccaaggttaagttggatagcgaagcacctcaatctctcagtgatgataaaagaaagttgtcgtggccagaattgagttcctcaaaccactcagtatcacaatgtaatcagaaggtaaagactgaatgtcttagtcagagagttccaaacactgatggtgtagtggtagaccaaaaagttatgggtgtagccaatactggagcaaattatgaagtcaaaacagaagttataaatttggaggataatgattttaaacctcggtgtcttcacatgcacaggtatgtagaggtcactatcttaaatccactagaagacaggtcacggcaacctactcttgttgaggaaacttctgcagcgactccagtggctagtcccagcaactattctgaggtaaacacctcagtacggatcaacaatggagatcagattgtaaacacacccatttctctattttcaacaaatagaaatatttcttctctgtccacaccggcagctactcctgaaagaaccaccgacaaagactgtcatgagtctttgatcaacagaagtgtaaattcccactgcgagaaaaagagaaggttgagctccccaatgagctgttgtacttacacaatacgttctagttctccaggcaaatcattctgccacactggttctgctgtgcctggggatgtgaatagaaatgctgaattgtgttgtaaaaatataggattgtccagttgtgaaaatgtcaagcttgaaagaaattacaagccagaagaggtttcagcaaagaagatgcagaagaaacgtataagttgcattagatgcaaaacagctcttgggttagaagaagatgggtttcttgttacttgtacacaatcttcttcgtcgaaattatacttggcatatcttttgagacatgggctgtcagctgctggcttcccggaggatgatttttcggcatcaacaccagcagaggtacaagtagtggagtgcgaagcttcttcactcaaccaaaatatatttggcaaattcggaaaccagggccctgtttggtctgctaaggatggatgtgtgtacagtgcaatgacttgtactttctgctcttctgaaaacacatgtgccatggtccttggcgtgcaagttcttgcaactgataagctcaatcagcaattggtggaaaaggtgctcttgttcagtgatcgtttggatgtccagtctgagccatcaaatggacagatttcaagaactcggagagatgctagtaactccatctccccacaacccgtgatgatcgaccttgagtcttttgcatataaaccattaaagatggaccctgtggcgctgaactcaagaaggtctaagttctgcttgtgttcactttcccagaatttcaagtga

SEQ ID NO: 1518 - protein, 1153 aa, Sorghum bicolor
MADDDDFASPPPAPRARAEGGGGGVYQVGGVPVEFPYKPYGTQLAFMGRVIATLDRARRQGRSHALLESPTGTGKSLSLLCSALAWQRHYPLRTPPAPAPAPSPDPFLHGGGFVPDDTQPQATPVVPEKAAKKKNAPTIYYATRTHAQISQVVREYRKTSYRVRMAILASRKHYCVNMFACASDNIDEQWNAQKLSRHPSLQIGGCYEVHDIEDLVRVGQKAKGCPYFAAQHMAEAAQLVFCPYNYLISPVVRRAMDIDISSSIIILDEAHNIEDIARDAGSIDIDEESLHLLQGELQNLATDEAVAMIYQPLHDIIQGLIGWIAEREGNLHNHEFGHPASYWTGEKAMNELQRAGISPMYFPVLQECATKAIKAASDTESDGSHLSGGRAMTLESLFSSLSYFFGQKGRNSCDYQLALQRFVKKEGNDEISSRCTMSLWCLNPAVVFQEIADRTLSVILTSGTLSPMGSFTSELGVQFEACMEAPHVINADSQVFAAVLSSGPTRQILNASYKTADNLSFQDELGASLEEICRIVPGGALVFFPSYKLLDKLQVRWSQTGQWARLNAQKHVFVDTNIDSTWIRNDVQVKLKKRYNDSYKSSKHLLSGSEWYCHQAFRALNQAAGRCIRHKSDYGGIILIDERYQEGRNVAYISKWLRNAIKKYDSFQETMAELQKFFQNAEEKIKIKDCGIFPKVKLDSEAPQSLSDDKRKLSWPELSSSNHSVSQCNQKVKTECLSQRVPNTDGVVVDQKVMGVANTGANYEVKTEVINLEDNDFKPRCLHMHRYVEVTILNPLEDRSRQPTLVEETSAATPVASPSNYSEVNTSVRINNGDQIVNTPISLFSTNRNISSLSTPAATPERTTDKDCHESLINRSVNSHCEKKRRLSSPMSCCTYTIRSSSPGKSFCHTGSAVPGDVNRNAELCCKNIGLSSCENVKLERNYKPEEVSAKKMQKKRISCIRCKTALGLEEDGFLVTCTQSSSSKLYLAYLLRHGLSAAGFPEDDFSASTPAEVQVVECEASSLNQNIFGKFGNQGPVWSAKDGCVYSAMTCTFCSSENTCAMVLGVQVLATDKLNQQLVEKVLLFSDRLDVQSEPSNGQISRTRRDASNSISPQPVMIDLESFAYKPLKMDPVALNSRRSKFCLCSLSQNFK

SEQ ID NO: 1519 - DNA, 2361 bp, Sorghum bicolor
atgagttccacaagagcaacaagaaattcaggctgcttttcttttgttatggaaccatccattcaaaatgtctgtttctctggaaggatcactaattcgttctgcctgaatgacaatgttgccagtattgattacaagttagggtataagcaaatgcattctcctggaaatggcagttgtatgtggttagatgatggctcttcccagttagatgatgacatttcaagtgttaacccaacttgttggaaaaggcaaaggacagaaggtatattccatgagtatgcatattctggtaatcttggaatgctggaagatgtgccaactgaagttttttttgctcacaaacaagagtctgagctgattggtccagaagttgaaataccagaatcttgcttcagggttctcaataggccaaatggaacgacacctgattttgtgcaaaataaaaccagcttaaaggcacaaacctcaggctgggatggattatatgacaagtttgataaattaaatggggatcgcttattcaatgaaactacagaaacaatcactgatatttcttacccaaagatgttacagttcagtaatggattttatcatgatgatggtagcacttccaggggctcctgtagagttttgagaaagttcagcgccagtaagaagttggggactgcagctggatgtgttgaagggttagaggctgatgctaaccagatgaatttccctgatattcatgctctgtggaacagtgacttgatagataggtcctccatcaaggatactttaaatcattttcctcatccatccttgttggctgatacaccttgcagtcatccaaggaccttgcacacactttacaggaaatcagataaatgctttcgttcttggaactgtgataatgttgacagcaatgttagatttgatgtggacagatttagcaatgattcatctacaatatttgaaggaattaaacatttcaataactttgacaatgaaatacatccgcttaattacttcaataataagtgtggttcaaccgaccagcttggttctgaagaagacctgataacttggaaatcaaaatttgacatgaggttgtcagtcaatatttctcctgagagaagtgataatggtcgcaatttgaatgttccttcttcgaatatggcaaatggcagcctgcttactcaaaatctgctgaatcaacacaactctggactaaatcagagacccaggacttccaagggtagatttaggagtcaatctgctccaccattttatagagggaaactgaaattctctagattaaatgtgccactgagcaaaccaagcacagatagcgataaagatatctgcatcaataaccccgaagaaaatccacctgcacctgcacctgcacctgtggatatctcatgtatgagttcaacacagcctgttcctgagactgatagcagtggatttctggacctaaatttcagttcgctaattcctgaatgtgttgacaagaactgctttgaggaggcaagggttttgttgcagctggacaagaaatttattcctgtcatatctggggaaactatcctccttgtcgatcagggctttgacaacattgttacagattctagcatattatctattcctgttatttttgttggaataatcatgttgtggaaatactatttagtgcctgctgcatttgatcagcatgcagctgatgaaaggatacgtttagaggacctccgtagcaaggttttatcagaagaaggacatggagttagttacttggactctgaggaagaattgtctctccctgagactgggtttcaactgttccagaagtatgctgagcagattcagaaatgggggtggatcatcagcagcgggagcaattcgtctgaatcattcaaaaagaacatgaacgttctgaagagacaagtccgtcttgttactcttgttgctgttccatgtattttgggtgtcaaattgactgggaaagatctcatggagtttatttggcagcttgatgagactgatggatcgtcagatatccccccagcagttctccgtattcttaacttcaaagcttgcagaggagcgatcatgtttggcgactccttactaccatctgagtgctgtctgattattgaagaactgaaagcaacatctctatgcttccagtgtgctcatgggcgcccaaccactgcgcccatcttgaacgtcacagccctccacgaggagctggcgaggctccaaacgctgagtggaacgcaagcagagacctggcacggcttggggcaccatgaacccagccttgagcgtgctcagatgcgcctcgaacgagtgagaaagctacgccgttgcctgtag

SEQ ID NO: 1520 - protein, 786 aa, Sorghum bicolor
MSSTRATRNSGCFSFVMEPSIQNVCFSGRITNSFCLNDNVASIDYKLGYKQMHSPGNGSCMWLDDGSSQLDDDISSVNPTCWKRQRTEGIFHEYAYSGNLGMLEDVPTEVFFAHKQESELIGPEVEIPESCFRVLNRPNGTTPDFVQNKTSLKAQTSGWDGLYDKFDKLNGDRLFNETTETITDISYPKMLQFSNGFYHDDGSTSRGSCRVLRKFSASKKLGTAAGCVEGLEADANQMNFPDIHALWNSDLIDRSSIKDTLNHFPHPSLLADTPCSHPRTLHTLYRKSDKCFRSWNCDNVDSNVRFDVDRFSNDSSTIFEGIKHFNNFDNEIHPLNYFNNKCGSTDQLGSEEDLITWKSKFDMRLSVNISPERSDNGRNLNVPSSNMANGSLLTQNLLNQHNSGLNQRPRTSKGRFRSQSAPPFYRGKLKFSRLNVPLSKPSTDSDKDICINNPEENPPAPAPAPVDISCMSSTQPVPETDSSGFLDLNFSSLIPECVDKNCFEEARVLLQLDKKFIPVISGETILLVDQGFDNIVTDSSILSIPVIFVGIIMLWKYYLVPAAFDQHAADERIRLEDLRSKVLSEEGHGVSYLDSEEELSLPETGFQLFQKYAEQIQKWGWIISSGSNSSESFKKNMNVLKRQVRLVTLVAVPCILGVKLTGKDLMEFIWQLDETDGSSDIPPAVLRILNFKACRGAIMFGDSLLPSECCLIIEELKATSLCFQCAHGRPTTAPILNVTALHEELARLQTLSGTQAETWHGLGHHEPSLERAQMRLERVRKLRRCL

SEQ ID NO: 1521 - DNA, 2079 bp, Sorghum bicolor
atgggcaagccgtcgctgaagaagaagagggcctccggcggcggcggcaagtccggggaccatgggggcaagtcggcgtcgctggagcggtccggctccaaggtcctcgacggcgacgagaccctctttacggacatggcgcaggagcacaaggaggagggcaacaagctcttccagcgccgggactacgaccgcgcgctgctcaactacgacaaggccatcaagctgctgccccgggcgcaccccgatgtcgcctacctccacagcaacatcgccgcctgctacatgcagatgagcccgcccgactactaccgcgccatcaacgagtgcaacgtcgcgctcgagacgtcgcccaagtacaccaaggcgctgctcaagcgggcgcgctgcttcgaggcgctgggcaggctcgacctcgcctgcagggacgtcaacaaggtgctcgttctggagcccaacaacctcactgcgctggatgtggccgacagggtgaagaaatccatggaggagaaggggattgtgttggacgacaaggagatcatgcccacgccggaggaggtagtggccgctgcgcccaagcagaagccgcgcaagaaaaggggaggacggaagtttgctgccaaggctgcggctgctgctgtggaggaggtcgatgaacagaagattgcggaagctgtcaaagaggaggaagtggaggagcagccaaggcaggtgaaacttgtgtttggggaggacataaggtgggctcaggtgccggcgagctgcagcatggcacagctgcgcgaggccgtccggagcaagtttcctgggctcaaggctgttcttgtcaagtacaaggacaaggagggtgatcttgtgacaatcaccaaccaggatgagctgaaatgggctgaggacttggctgaggctgggagctcacttcggctgtatgttaccgaggccaatccagagcatgaaccttatgttgatgacaccaatagtgggccattggagagaaatgtaaacagtgcttcggataatgggagtatcagaagcaatcggcaggatgaggacaggagcacggtgacttgtattgatgattggattgtgcaattcgctcggcttttcaagaaccatgttgggattagctctgatgagtacctggacctccatgaggttagtatgaagctctacactgaggcaattgaggacactattactactgaagaagcccaggaggtgtttaatcttgctgagggaaacttccaggagatggcagcacttgcatttttccactggggtaatgttcacatgtcccgagccaggaagaggttgctgctatcaggggactccccaagagaattggtgcttgagcaggtgaaggaagcatatgaatgggcaagggacgaatacaataaggctggaaagagatatgaagatgccgtgaaggccaaaccagacttttttgaaggtttccttgcacttgcacatcagcagtttgaacaagcaaaactgtcatggtactatgcaattggtagtaacgcagatttggacagctgttcttccgaaatcctggagctcttcaataaagccgaggataacattgagaagggtatagagatgtgggagttaatggaagaacagcgtctgaagaatcgatctaaacctagccaggagaatgttgtgctagagaagatgggcttggaggagtatatcaaggatgtgtccactgatgacgcggctgaacaggcttccaatttgaggtctcagataaacattttatggggtatgctcctctatgagcgttcagttgtggaatttaaattaggtcttccaatgtgggaggattgtctgatggcagctattgaaaagtttaaacttgggggagcttctgctacagatattgctgtgctggtgaaaaaccactgcgccaatgaaactgcccaagatggtttgggcttcaagattgatgaaattgttcaagcctggaatgaaatgtatgacattaaacggtggctgcgtggtgttccatcctttcgtcttgagccattatttaggcgaagggttccacaattgcatactgcacttgaacatatatag

SEQ ID NO: 1522 - protein, 692 aa, Sorghum bicolor
MGKPSLKKKRASGGGGKSGDHGGKSASLERSGSKVLDGDETLFTDMAQEHKEEGNKLFQRRDYDRALLNYDKAIKLLPRAHPDVAYLHSNIAACYMQMSPPDYYRAINECNVALETSPKYTKALLKRARCFEALGRLDLACRDVNKVLVLEPNNLTALDVADRVKKSMEEKGIVLDDKEIMPTPEEVVAAAPKQKPRKKRGGRKFAAKAAAAAVEEVDEQKIAEAVKEEEVEEQPRQVKLVFGEDIRWAQVPASCSMAQLREAVRSKFPGLKAVLVKYKDKEGDLVTITNQDELKWAEDLAEAGSSLRLYVTEANPEHEPYVDDTNSGPLERNVNSASDNGSIRSNRQDEDRSTVTCIDDWIVQFARLFKNHVGISSDEYLDLHEVSMKLYTEAIEDTITTEEAQEVFNLAEGNFQEMAALAFFHWGNVHMSRARKRLLLSGDSPRELVLEQVKEAYEWARDEYNKAGKRYEDAVKAKPDFFEGFLALAHQQFEQAKLSWYYAIGSNADLDSCSSEILELFNKAEDNIEKGIEMWELMEEQRLKNRSKPSQENVVLEKMGLEEYIKDVSTDDAAEQASNLRSQINILWGMLLYERSVVEFKLGLPMWEDCLMAAIEKFKLGGASATDIAVLVKNHCANETAQDGLGFKIDEIVQAWNEMYDIKRWLRGVPSFRLEPLFRRRVPQLHTALEHI

SEQ ID NO: 1523 - DNA, 1287 bp, Sorghum bicolor
atggcgctccgccgcatcaccccgcggaggagacccgttctccccgtcccccgtgccttcttctcctcgagccccccgttccctccgcccccgcctccggcgaacggcgaccccgacgccgcccattccccgtcctcctctccgccccccaaccccggcgcgccgcggaacccgtcgccctcgctcttccgggacatcaaagatcgcctccgcttgtctcccacgtcgcgcggcgctccttcttcgaaaccgtccgttcaagatgtccgccggttgctcggggagttccgcccaaccggcagcccgccgatccctccgtccccctccgctcccggagccgacccctccttcatggacctgctcaagaagaacagcgtcgcccagggcgccaacgctgggcagagggtgaccgacctcggtgccatccgagagagtctgaagcgctccccgccgcggacgccgcgtcgtccgccgacgccgtatttgactccgcagagcaacatcttcaacccggagctacagaggaacttgaaggctgtaggtgcggggaaggaagagaaggactctaccattgcccttttgaggcactacagccacgaagagcttggaaagaggctagctgagctccggccagcggttgcggccaaagacggtaaggagtggttctcgctcaaggagctgcaggggcggattgccaaactggcggagttggagaagcaggagaaccaggtttcggggtatcgtacagaaatcaagaattgccttgagctcctgaacaataaacaagaaaaaccgactctgtcagtaaacataccttcactgctgaaccttggcggtcagctgacactagactacatgaatcggcctccgcaggaggagttgttagagaagtacttccatccagatcatatgtcatctgaagagaagatgaaattggagctccaaagggtgagggatgagttcaagatgtctgagaatgactgtgggtctgcacgagttcaaattgcccaactgactctgaaaatcaagcatctgtcagctgttctccacaagaaggataaacattctagaaaagggcttcaggagatggtccaaaagaggaagaaatacctgaaatacttgcgaagaactgactgggactcgtactgtcttgttctgtcaaagctggggctccgcgacgtgcctgagtacaaagctcctgactacaagagcaaagcaaccaccaaggctaaatctaagaagagcaagagcaagagcaagggcaagaagagaaaggtgaaggcatag

SEQ ID NO: 1524 - protein, 428 aa, Sorghum bicolor
MALRRITPRRRPVLPVPRAFFSSSPPFPPPPPPANGDPDAAHSPSSSPPPNPGAPRNPSPSLFRDIKDRLRLSPTSRGAPSSKPSVQDVRRLLGEFRPTGSPPIPPSPSAPGADPSFMDLLKKNSVAQGANAGQRVTDLGAIRESLKRSPPRTPRRPPTPYLTPQSNIFNPELQRNLKAVGAGKEEKDSTIALLRHYSHEELGKRLAELRPAVAAKDGKEWFSLKELQGRIAKLAELEKQENQVSGYRTEIKNCLELLNNKQEKPTLSVNIPSLLNLGGQLTLDYMNRPPQEELLEKYFHPDHMSSEEKMKLELQRVRDEFKMSENDCGSARVQIAQLTLKIKHLSAVLHKKDKHSRKGLQEMVQKRKKYLKYLRRTDWDSYCLVLSKLGLRDVPEYKAPDYKSKATTKAKSKKSKSKSKGKKRKVKA

SEQ ID NO: 1525 - DNA, 2514 bp, Sorghum bicolor
atgaagtccagtgcggttactacaaagggcaaggccgtatttgagctcaagcacaagctggtccaagctgttaacaagattggcgacagagacacttaccagattggattggatgagctcgagaagatggcggataccctgccccctgaaatgattggccccttcttgtcatgtgtcattgacactgatgctgagcagaagagtgcggtgcggaaggagtgcatcaaggtgattggcacactggcacgactacatggaaacctattggcaccacacatggcgaaaatggtgtccagtgtggttaagcgcctgaaggacaccgattcagttgttagagatgcatgtgttgacacttgcggtacccttgcaatgtgcgccagaagttatggggatggtggtgcagcgttggtgacattggtgcgccccttgtttgaatcattgggtgaacagaatagatatattcaggctggggcagcactgtgcctggccaaggttatagatgagagcaattacttccctgggcctgtgctcccgcagatgcttgcccgtgttgttaagctgctcaagaatccccatttcatggcgaagcctgctgcgattgacttgataagaagcattattcaggctgaaggcgcttctacagagcaggcgttatcatcagctctaacaagtattatggatgccctgaagagtactgactggaatacaaggaaggctgcctcactagctctttcaagtattgcggtcagttctgggtatttggttacctctttcagaacttcctgccttcgctcccttgagcgcagtaaatttgacaaggtaaaaccagtacgtgatgccattatacatgcaattcagctgtggaaagctattccagggtctcatactcctgaaccatcagaagctggatcatcaacaaaagagaacttctttggagaccatcatgatgctaaaagtatacatgatggaggatcaagagatacttcttttaggagaacagatcatgggccttctgtatctgttattagtggtagttctatcagttcagcaaagcggaggtctcctttgtctatcaacaaagttgccctaaacaatgctgcaaatttgcagcgaatgaagtctggtgattggcgtgttgaggtgtcagttccaaagcagaatatgataccactggttcacaatgatgagaagggatccagtaaagtctgcatcctaaaagatgcaaagagaaatgcatatgaaagcattgatgtagacagtaagtttgactatgacattatggatgataaacaagaatgctcctctgtgtcagaagtagcaagcaggagttgtgagacaaagcatgtcactactgctcaggaatgcactgaagattgtgattcaacacaagttatggaacaatgtcccaggggtcgagaaagtaagagcatagactcgacaattacagatgttactgctcatggcacacatagttgttgtctgaatgctatgaatgaactggcccttgttaggaagcaacttcaagagatggagaggaagcaaacaattttttttgatttgttgcaggattttatggccagctcagcggagaacatgtctgtgctaaatttgaaggtgcacaacttggagaatgctgtagacaaaactgtatatacaattactcagagcgaaagccggtatcatcttcctggctccaaatattttaagaaccaaagcgtctcttctttgcctaggctttctacttctacacctagatcatctgtggatgttaactacaagccaccaccaatctcacagttgaaacatgagaagaagtggatgcgtgatctaccaactcggggctcaaatatgtgttctaaagagggagctgaatttccaaaggatcatgttcgcagtaaaattaggaagtttgagcctgtgagctcagagagtaacttgggaagatatgttccaagctcagcaagaagtagagcatcaggggttaaagggacttatccagtttcatttaccagttcctgtgaacaatctggactgcgaaatgcattgtgtgcctctaatcagcctggtgagtttcaagatactgatggcatggagcctgcatacatggaagccctgaactgtggtgattatgatggtctgattgacctaatggatagaactggaccagttcttgagaagttatcgtgtgagacagcaaatgagcttttgagggttatagctgaccagtttcttaacaaaaagttctttgacttggcactgccttggcttgaacagatagcagatttaagcacgatttataagccaagtcaactatttgcatctgtgagagcacaaaaggagttcctttgtgcattggaggaagctgcaacaggtgtatccacggaaccagccttgaggattgcacttgcacagctcgcatttaaactgaccaaagcttttgaggttggcccatgcaggaaaatttcaaccagagtgtgcagagaaaatgaaactatcctggccactgcaatgtga

SEQ ID NO: 1526 - protein, 837 aa, Sorghum bicolor
MKSSAVTTKGKAVFELKHKLVQAVNKIGDRDTYQIGLDELEKMADTLPPEMIGPFLSCVIDTDAEQKSAVRKECIKVIGTLARLHGNLLAPHMAKMVSSVVKRLKDTDSVVRDACVDTCGTLAMCARSYGDGGAALVTLVRPLFESLGEQNRYIQAGAALCLAKVIDESNYFPGPVLPQMLARVVKLLKNPHFMAKPAAIDLIRSIIQAEGASTEQALSSALTSIMDALKSTDWNTRKAASLALSSIAVSSGYLVTSFRTSCLRSLERSKFDKVKPVRDAIIHAIQLWKAIPGSHTPEPSEAGSSTKENFFGDHHDAKSIHDGGSRDTSFRRTDHGPSVSVISGSSISSAKRRSPLSINKVALNNAANLQRMKSGDWRVEVSVPKQNMIPLVHNDEKGSSKVCILKDAKRNAYESIDVDSKFDYDIMDDKQECSSVSEVASRSCETKHVTTAQECTEDCDSTQVMEQCPRGRESKSIDSTITDVTAHGTHSCCLNAMNELALVRKQLQEMERKQTIFFDLLQDFMASSAENMSVLNLKVHNLENAVDKTVYTITQSESRYHLPGSKYFKNQSVSSLPRLSTSTPRSSVDVNYKPPPISQLKHEKKWMRDLPTRGSNMCSKEGAEFPKDHVRSKIRKFEPVSSESNLGRYVPSSARSRASGVKGTYPVSFTSSCEQSGLRNALCASNQPGEFQDTDGMEPAYMEALNCGDYDGLIDLMDRTGPVLEKLSCETANELLRVIADQFLNKKFFDLALPWLEQIADLSTIYKPSQLFASVRAQKEFLCALEEAATGVSTEPALRIALAQLAFKLTKAFEVGPCRKISTRVCRENETILATAM

SEQ ID NO: 1527 - DNA, 1050 bp, Sorghum bicolor
atggccgctgctcccatggtggtgccgcgcatgaagctgggctcgcaggggctggaggtctcggcgcagggcctcggctgcatgggcatgtccgcctactacggcccgcccaagccggagccggacatgatcgcgctcgtccaccacgccgtcgccgccggcgtcacactcctcgacacctcggacgtgtacgggccccacaccaacgagctcctcctcggcaaggcgctgcaggcagcaggcggggtgagggagaaggcgcaggtggcctccaagttcggcatcctcacggacgccgacggcaactggggcgtccgcggcgacccggcgtacgtgcgcgcctcgtgcgagggcagcctccagcgcctcggcgtcgactgcatcgacctctactaccagcatcgcattgacagcaaggtgcccatcgaggtcacggtaggtgaactgaagaaactagtcgcagagggcaagataaaatacattggtctgtccgaagcatcggcgtcgacgatcaggagagcgcacgcagttcatcccatcaccgctgtccaactggagtggtctctctggtcaagagatgttgaaactgacataatcccgacttgcagggagcttggcattggaatagtggcatatagtccactgggcagagggttcttgtcaagtggtcctaagctggtcgacaccttgtctgatcaagatttccgcaaggacctgcctagattccagccggaaaacatggagaagaacgccgtgatctttgagaaagtgaatgcaatggcggcgaggaaggggtgcacgccgtcgcagctggcgctggcctgggttcaccaccagggacccgacgtctgccccatacccgggacaacgaaggttgagaatttcaacagcaacgtggcggcgctttcggtgaagctgacacctgaagacatggctgagctcgagtcctacgcgtcggcggatgtccagggtgatcgctacaatgagtccttcctcgccgcttggaaggattctgagacacctcccctctcgtcctggaaggctgagtaa

SEQ ID NO: 1528 - protein, 349 aa, Sorghum bicolor
MAAAPMVVPRMKLGSQGLEVSAQGLGCMGMSAYYGPPKPEPDMIALVHHAVAAGVTLLDTSDVYGPHTNELLLGKALQAAGGVREKAQVASKFGILTDADGNWGVRGDPAYVRASCEGSLQRLGVDCIDLYYQHRIDSKVPIEVTVGELKKLVAEGKIKYIGLSEASASTIRRAHAVHPITAVQLEWSLWSRDVETDIIPTCRELGIGIVAYSPLGRGFLSSGPKLVDTLSDQDFRKDLPRFQPENMEKNAVIFEKVNAMAARKGCTPSQLALAWVHHQGPDVCPIPGTTKVENFNSNVAALSVKLTPEDMAELESYASADVQGDRYNESFLAAWKDSETPPLSSWKAE

SEQ ID NO: 1529 - DNA, 420 bp, Sorghum bicolor
atggcgaactctgcgtccggcctggcggtgaacgacgagtgcaaggtgaagttcagggagctgaaggcgcggcggagcttccggttcatcgtcttcaggatcgacgacaaggacatggagatcaaggtggaccgcctcggcgagccaaaccagggctacggcgacttcaccgacagcctccccgccgacgagtgccgctacgcaatctacgacctcgacttcaccaccgtcgagaactgccagaagagcaagatcttcttcttctcctggtcccctgacactgcacgtacccggagcaagatgctgtacgccagctccaaggacaggttcaggagggagctggacggcatccagtgcgagatccaggccaccgaccccagcgagatgagcctcgacatcgtcaggagccggaccaactga

SEQ ID NO: 1530 - protein, 139 aa, Sorghum bicolor
MANSASGLAVNDECKVKFRELKARRSFRFIVFRIDDKDMEIKVDRLGEPNQGYGDFTDSLPADECRYAIYDLDFTTVENCQKSKIFFFSWSPDTARTRSKMLYASSKDRFRRELDGIQCEIQATDPSEMSLDIVRSRTN

SEQ ID NO: 1531 - DNA, 822 bp, Sorghum bicolor
atggacgccgacgacggtagccgtgccaccccgccactggacgccacggccgccgccttcaagtctcaagtcatggagctgcaggacctcgtcctcgcacgcagcatgttcccggccacggcgctgcccgaactcggcaacgtggacgcgctggtgactgcgatggagacgcaggtgcaaaacatccgcctccgtcttcaggaggagcttggtgccatccccaaggccaagaagctagtccagcgtctcttgaagcaggaagagaagctgcagcacatgcttgcgaacttaccttccggaatgcgcaaggatgcttttgctactcagcttgaacagagcacatcaaagatgctgcctcattttgactcttattttactgaagctaatgaatgtgatgtgaagattaaggatgagccagttgcagctcctaggaagggaagagcacctgcacctcgttggtatatctcaaccgaggagcttgattcgctctcatcgtacatgaggggaagactgactttggaaaaggttaatatcgcaataaatgaagtggcttcatatgcagaggccaatgctcatcttgttacatgccctaagagaaagttgtcagaagacacatgggataaagctttggaactaagggacattgcagcaaaagaagcagtaaagggcaaccatttcttcctggaagcagatatcaaaggacctggtctaaaacttgaccatactggcaaagctattcttactgtccttcgccatcttgggcgcttccaggaagttcggattgggcaccatcgggtctttatactctcaaagcaggcctga

SEQ ID NO: 1532 - protein, 273 aa, Sorghum bicolor
MDADDGSRATPPLDATAAAFKSQVMELQDLVLARSMFPATALPELGNVDALVTAMETQVQNIRLRLQEELGAIPKAKKLVQRLLKQEEKLQHMLANLPSGMRKDAFATQLEQSTSKMLPHFDSYFTEANECDVKIKDEPVAAPRKGRAPAPRWYISTEELDSLSSYMRGRLTLEKVNIAINEVASYAEANAHLVTCPKRKLSEDTWDKALELRDIAAKEAVKGNHFFLEADIKGPGLKLDHTGKAILTVLRHLGRFQEVRIGHHRVFILSKQA

SEQ ID NO: 1533 - DNA, 453 bp, Sorghum bicolor
atggcggagcagaccttcatcatgatcaagcccgacggcgtccagcggggcctgatcggggacatcatcagtcggttcgagaagaaagggttctatctcaaggggatgaagtttatgaatgtggagaggtccttcgcccagcagcactatgctgacctttctgacaagcccttcttccctgggttggtggagtacatcatttctggccctgttgtggcaatggtgtgggaggggaaggacgttgtattgactggccgcaggatcattggggccaccaggccttgggaggcagcccctggtaccattcgtggggactatgctgtggaagttggcaggaatgtcatccatggaagtgactccgtggagaacggaaagaaggagatcgctctctggttccctgaaggtgtggccgagtggaagagcaaccttcatccctggatctacgagtcttga

SEQ ID NO: 1534 - protein, 150 aa, Sorghum bicolor
MAEQTFIMIKPDGVQRGLIGDIISRFEKKGFYLKGMKFMNVERSFAQQHYADLSDKPFFPGLVEYIISGPVVAMVWEGKDVVLTGRRIIGATRPWEAAPGTIRGDYAVEVGRNVIHGSDSVENGKKEIALWFPEGVAEWKSNLHPWIYES

SEQ ID NO: 1535 - DNA, 2385 bp, Sorghum bicolor
atggcctcttcggtggccgccatgccccacgagtccgcctcatggagggacccctcccgtcccaccccgtccaggggcttcttcaacatcctcgtctccacctcctccccggacgccgccgccgccgggggctccgcctcctcctcctcctccgccagcgagcccacgcccaggcgccgccgccaaatcctcgaccgatgggccgccgcggccgccgccgtcacggccagcgccgcgccggagcccgccgaccagccccgccgcgccagggacgcagagctgtccgagctcgcctccgccacgcgccccgtcaccgcgcgcgccgccgtcttccgggagccgtccccggcgccctccgacgcctcctccacggccgccaacgccgccttcgccgccgcgggcgcaaccagcgcgccctccgagctcccgcccgcggggccccgggcctcgtcgctcatccagcgctggcgcgagatcgaggccatcggccccgtcacgccgcgccccggcaccgctgccgccgacccgggagcggcctccgcctccgactccgacaccggctccccgcgcggccgcgtcggatgcatcgtcaagaagctcagcggggcgtcctcgctgcccgaggaggagctcgacgaggtcgccaagtccgagctctcgttctcgcagtccgcgcccccgtcgcccgcccgcatgcgcgacgcctcctcgcagtgcgcgtacccgtacccgtacccgacgggcgcgatcaactgcccccgcccgccgcacctcgtcgtccggacggtgcgcggccgccgcgccatggaggagctcgtcgccgccatggcgcaccgacggaggcgcgaggtcgccgcgctcgccgagaggcacgccgtgtcccgcttcgcgcacaagggcaggatccagctacatggacagtacttcactttcacgtttcacagatctgttaggttgtcatttttggaccagaagaaaaaagggagtcaattaagaagatgcaaacttgacattgtattttgcaaaaacacggatgaaatggagtccatgcttcgtctgagattgttacgccagagaggtacagttgaggatgaactgtggagtcaactaaaaccggtgaggccacaccaaccaaaacatgtgggcgagctgagcaagtgcaggcctgacgaacacttttgtaatgatagagttccagctgaggaaaagtcaactgatgtatccgctgaaggccttgttgatggttcaggaaatctacagtgtgatgagcagatgaaaaccaagggggatacgtctcagaaagattgtaaaaacttttgtgttcatagtcagaactattctgaagcatcaaactttgcaaggtatggtgagcatagtactatcgatgagaatcagtttgtggaagatatctccccaagcaccacaagcacgttgcatgaactagaaaccccatcatctagaggagataatctacgcgaagaagacaaccaaagcataaatggttcctgggaagagagaggattatggataagtagcctaggttggcctgcaccaatagacactatgagtccggatagctggcatcaggatacaatgggtgatattgagaatcataataatcagattcaattcaatgatcgcccctggatagactccccaaactcatggagatcactatgtgttgtcacgcaatctgactatcgtgctttgtcacgcaatgctgacatttgcaaccttctcgagagcaaaaaggtctcaaagtctcttgagagtgacttcagcaataaaatgaaccagctgttgcttacagctctgcaaaaacaaaggcaacaacagatgatggatgattttggaggatactatgatgaacgcatgtactggagacaaaatgatgaaattcatgatgctgataaggaggcatctgctccatgttcattagctcctgtctcacatcttggagctcatcagcaagagagctggcagcattcttcatttggaagtcaacatcacgataatcaaaatttacttgaaatggaagtcagggtaaggggtgaaatgtcccagattcatcatgaaatatatgaactgcggaagttggtggaaagttgtattgcatcccaagtaaagatgcagcactccattaaagaagaggtgtgcagtgcacttcgtgaggcaggtttgatgccaagccaacccgacacaacagcagcaaaaaggggtgattgctgcatctgccatcgaatgcaagttgactctctactttacaggtgtgggcatgtgtgcacctgttttgactgtgccgatcagctgaaaatgagcggcaggagttgcccaatctgtcaatctcctattgatgatgttgttcgggcgcagctgaatttttga

SEQ ID NO: 1536 - protein, 794 aa, Sorghum bicolor
MASSVAAMPHESASWRDPSRPTPSRGFFNILVSTSSPDAAAAGGSASSSSSASEPTPRRRRQILDRWAAAAAAVTASAAPEPADQPRRARDAELSELASATRPVTARAAVFREPSPAPSDASSTAANAAFAAAGATSAPSELPPAGPRASSLIQRWREIEAIGPVTPRPGTAAADPGAASASDSDTGSPRGRVGCIVKKLSGASSLPEEELDEVAKSELSFSQSAPPSPARMRDASSQCAYPYPYPTGAINCPRPPHLVVRTVRGRRAMEELVAAMAHRRRREVAALAERHAVSRFAHKGRIQLHGQYFTFTFHRSVRLSFLDQKKKGSQLRRCKLDIVFCKNTDEMESMLRLRLLRQRGTVEDELWSQLKPVRPHQPKHVGELSKCRPDEHFCNDRVPAEEKSTDVSAEGLVDGSGNLQCDEQMKTKGDTSQKDCKNFCVHSQNYSEASNFARYGEHSTIDENQFVEDISPSTTSTLHELETPSSRGDNLREEDNQSINGSWEERGLWISSLGWPAPIDTMSPDSWHQDTMGDIENHNNQIQFNDRPWIDSPNSWRSLCVVTQSDYRALSRNADICNLLESKKVSKSLESDFSNKMNQLLLTALQKQRQQQMMDDFGGYYDERMYWRQNDEIHDADKEASAPCSLAPVSHLGAHQQESWQHSSFGSQHHDNQNLLEMEVRVRGEMSQIHHEIYELRKLVESCIASQVKMQHSIKEEVCSALREAGLMPSQPDTTAAKRGDCCICHRMQVDSLLYRCGHVCTCFDCADQLKMSGRSCPICQSPIDDVVRAQLNF

SEQ ID NO: 1537 - DNA, 1920 bp, Sorghum bicolor
atgcggtggagatcccctgccgtgctgcacctgctgcggctgtggctgctcgccgcctccgcgtcgtcggctgcccttggtgttcttgcgtctgatcttagcaaagaaccttttaccatccgtataagctgtggaagtttcgatgatatccggacggcgcctacaaacacattgtggtacagagactttggttatactggaggcaggtttgcaaatgccactcgtccaagctttatcattcctcccctgaaaacgcttcgatatttcccgctatctgatggccctgaaaattgctacaacatcaacaatgttcccaacggccactatcaagttaggcttttctttgcgttactggacaaccctaatcttgacagcgagccgattttcgatgtttctgttgagggtactctgttcagttctttgcttttgggctggagcagcgacgatgagaagacatttgcagaagctttggtttttgtccaggactcaagcttatcagtttgcttccatagcacaggtcatggtgatccgtcaattctttctattgaagttctacaaatagatgacaatgcctataactttggcccaccatggggaaagggggcagtgcttagaacagccaaaaggttgaaatgtggctctggaaagcctgcctttgatgaagatcttaatgggattcgctggggtggggacagattttggttaggattgcaaactttatcatccagttctgatgatcaatcgatatcaactgagaatgttatagcagagacattgctcgcaccaaatttttaccctcaaagcatatatcaatcagctatcgtgggcactgataggcaaccgagtttgtcttttgaaatggatgttactccgaataagaactattcagtatggcttcattttgcagagattgataatggggtaactgcagaagaacaaagagtatttgatgtactcatcaatggagacactgcttttaaggatgtagatataattcgcatgacaggagagcgttttactgcacttgtcctgaataaaactgttgctgtcagtggaacaacgctaaaagtcatcttgcaacctgtgaaaggaacccgtgctattattaatgccattgaggtgtttgagataatcccagctgaaaagaagactttgcctcaggaagtgagtgcattgcgaacgttgaagggttcacttggtcttcctcttcgacttggctggaatggtgatccctgtgttcctcagcagcatccatggagtggagttgattgccagtttgataacaccaaagggaattggatcattgatggattaggtcttgacaaccaaggtttaaaaggggtcatacctagtgacatatctaagctgcaacatctgcaaaacataaacttgagtggcaatagcataaagggtaacattccaatctccctgggtaccatctctgcactgcaagtactggatctgtcatacaatgagcttaatggatctattccagagagcctaggcgagctggcattgttacagatactgaatctgaatggcaatcgtctttctggtcgtgttccagccagtttgggaggaaggcctctgcacagagctagatttaacttcacggacaatgctggattatgtggaattcctgggttacgtgagtgtggccctcatctatccgtggctgcgaagattggcatggcttttggtgtgcttttagccattctgttcctagttgtattcgctgcgtgctggtggaagagacggcaaaacattctccgtgctaaaagattagctgcagcaagggaagctccttatgcaaaatcaaggacccagttcacccgggacgtgcaaatgaccaagcatcaacgcacacatgaaagtgttcggagcagcaacaatgaaagctcaccgcatctgctttcctag

SEQ ID NO: 1538 - protein, 639 aa, Sorghum bicolor
MRWRSPAVLHLLRLWLLAASASSAALGVLASDLSKEPFTIRISCGSFDDIRTAPTNTLWYRDFGYTGGRFANATRPSFIIPPLKTLRYFPLSDGPENCYNINNVPNGHYQVRLFFALLDNPNLDSEPIFDVSVEGTLFSSLLLGWSSDDEKTFAEALVFVQDSSLSVCFHSTGHGDPSILSIEVLQIDDNAYNFGPPWGKGAVLRTAKRLKCGSGKPAFDEDLNGIRWGGDRFWLGLQTLSSSSDDQSISTENVIAETLLAPNFYPQSIYQSAIVGTDRQPSLSFEMDVTPNKNYSVWLHFAEIDNGVTAEEQRVFDVLINGDTAFKDVDIIRMTGERFTALVLNKTVAVSGTTLKVILQPVKGTRAIINAIEVFEIIPAEKKTLPQEVSALRTLKGSLGLPLRLGWNGDPCVPQQHPWSGVDCQFDNTKGNWIIDGLGLDNQGLKGVIPSDISKLQHLQNINLSGNSIKGNIPISLGTISALQVLDLSYNELNGSIPESLGELALLQILNLNGNRLSGRVPASLGGRPLHRARFNFTDNAGLCGIPGLRECGPHLSVAAKIGMAFGVLLAILFLVVFAACWWKRRQNILRAKRLAAAREAPYAKSRTQFTRDVQMTKHQRTHESVRSSNNESSPHLLS

SEQ ID NO: 1539 - DNA, 2337 bp, Sorghum bicolor
atggcgctggacacggggacggtggcggcggcggcggggatcgacgaggcgtacgagttctccgcgcccaggttcttcgacttcatcaccgaggagacggaggatgacgtacgcgccgccgagagctggttcgaggctgcccgcagccacgccccctcgccgttcaaccacaggatcaaggaaacgagggcggaggccaaggtcgcggtcctctgcgatttcgcggaagccgaggagccggctccggaggaggtgcccgtggaggcggtagcaggaagcgtcaccgttcacggagcagaggctattgatggtgctccgtgtcctgaggcaatgtcggaatcgccgccggctgatgaaatgtcggggtcacctccgactcaagaagagaaagatgaaccgtcccaatctctcgagttcttctcggcgacggaccagactcaacaagagaaagatgaatcgccccaatctttcgagttcttctcggcgacggaccagtctgtaaaaccagcagatggtggtgctgccagcacgcctaagatgcagacgcgtcctccttcccctcctatcaaagttgcctctgcgatttcgacatgtgacagttcttcagtgaatactggggggcgcacgccgaagacggaggcaaacatgggcagagcaggtcctatggctgcttcaacgactgccaagaggagcgtgagcaagggtgctcgtgatttggggactggaaaggcagccagtgctggtgctgaaatttcacaagaaaaccaagcggtgaaaaggcagaagcttgatgatggaagagccagacagatactgaatgtcaagactaaggtgctgcctcataagggaagagctcagttagctggaagcaatgaggtgaggaggtcccgtgaggatatgagctctgtgaaggaagcacttccatatgtatcagctgctgaattggttaagaagtttgaatcagggactagaaagctgagcattactcacagcagatctcgttctcatgaggatgctgcattacagggaaggcctaagctgcttatgttaactagaccgaaggatcctgagtttcaaacttcccacagagtacgagcagtcaaggtgaagagctctgcagagctagaggaggaaatgttggcaaagatccccaagttcagggcacggccattcaacaaaaagattgctgaggccccgtcgttccctccacttccaaggaaagccccacaggtccccgaattcaatgaattccatcttaaaacaatggagagagcaactcgatatgcagacacctgttcagaagtttcttgtgcagatactgtccggagtcaaaataagccactgaaattgaaggaaccaaagccaccacaacttcatacagcaatgagagttcggccaccaagtgtgaagagttctcaggaacttgaactggaggagctggagaaggcccccaagttcaagtttgggcctcatgtcttgcagattcttgagagcaagggagaaattggtttgcctcctaatccaaagtctcaggtcacagctcccaaggagttccatttctctaccgatgttcgcttgggccctccatcagttgctgacttatttgacaagctgtctcttcactctgaatgttcttcgaacagcaacaggcaagatgtgcccagatgcaccataccaaaccctttcaatttacaaacagaggaaagaggtcatttgaaagagaggcagctagaagcacagctcttgcaaaagaagatggaggaggaaaaggccagggttcacagagctaatccttatccatacaccacagactatccgatcatgccaccgaaacctgaaccgaagccctgtacaagaccagaaggctttcaactagagagtttggtgagacatgaactagagcagcaaaggctgatggaagaacggcagagaacggagagggaagaggctcagaggagaatcgtcaaagctcaacctgtactgaaagaggatcccatcccacttccggagaaagagcggaagcctctcactgaagttcaacaatttgtgttgcatgttgatgagagggcagtacagagatcagaatttgatagcatgataaaagagaaagaaaagaattacaaaagattgagagaggagaacgaattcgcgcaaaagattgaggaggagaaggcactgaagcagttgaggagaaccatggtgccacatgcccggccgctccccaagtttgacagaccattccgaccacagaaatcgacgaagcaggtgaccagaccaaagtctccgcagcttcaggtggatgagcgaggggcaaggaggcacgctctcatcagatga

SEQ ID NO: 1540 - protein, 778 aa, Sorghum bicolor
MALDTGTVAAAAGIDEAYEFSAPRFFDFITEETEDDVRAAESWFEAARSHAPSPFNHRIKETRAEAKVAVLCDFAEAEEPAPEEVPVEAVAGSVTVHGAEAIDGAPCPEAMSESPPADEMSGSPPTQEEKDEPSQSLEFFSATDQTQQEKDESPQSFEFFSATDQSVKPADGGAASTPKMQTRPPSPPIKVASAISTCDSSSVNTGGRTPKTEANMGRAGPMAASTTAKRSVSKGARDLGTGKAASAGAEISQENQAVKRQKLDDGRARQILNVKTKVLPHKGRAQLAGSNEVRRSREDMSSVKEALPYVSAAELVKKFESGTRKLSITHSRSRSHEDAALQGRPKLLMLTRPKDPEFQTSHRVRAVKVKSSAELEEEMLAKIPKFRARPFNKKIAEAPSFPPLPRKAPQVPEFNEFHLKTMERATRYADTCSEVSCADTVRSQNKPLKLKEPKPPQLHTAMRVRPPSVKSSQELELEELEKAPKFKFGPHVLQILESKGEIGLPPNPKSQVTAPKEFHFSTDVRLGPPSVADLFDKLSLHSECSSNSNRQDVPRCTIPNPFNLQTEERGHLKERQLEAQLLQKKMEEEKARVHRANPYPYTTDYPIMPPKPEPKPCTRPEGFQLESLVRHELEQQRLMEERQRTEREEAQRRIVKAQPVLKEDPIPLPEKERKPLTEVQQFVLHVDERAVQRSEFDSMIKEKEKNYKRLREENEFAQKIEEEKALKQLRRTMVPHARPLPKFDRPFRPQKSTKQVTRPKSPQLQVDERGARRHALIR

SEQ ID NO: 1541 - DNA, 2382 bp, Sorghum bicolor
atggaggcagtgaagcgcgtctgctcgctgtcccagccaccgctggccaccttcttcttcctcgccgtggctgccttcgcggccagagacaccatcctcccaggcgagggcatctccgggaaccagactcttgtttcccggaacggcgtgttcgagctggggttcttctccccggggacggacatataccacttcttgggcgtgcggatcctgaacatgccgacgaacgccggcaccccgaaattctggttcggggaccgggtctacatctccgacctccccagcgcggcgctgcagctcttcggcgatcgcctgtacatcaccgagaacggcactaacctctggtggtcaagcgtggcgggcgccggcggcggccccgcggcgccgacggcatccgtcgtcgcggtcctcctcgacagcggcaacctcgtggtgcgggaccaggccaactcgtcgcgggtcctgtggcagagcttcgactaccccggcgacgcgctgctccccggcgcgaggctcgggctcgacggggacaccgggaacaacgtctcgctgacgtacaccaacaccaactcgtggcacaacagcagcctcagcgtcgatccggaccgccgcaggaggaacgggttcgtgctcgccaccgacggctgggacgtcctccgggggaccttcccggaatggatggtgtcttctcaaggaaacggcagctcgctggtgctgctcaataatcgtccgggcgcaggcatggcggagcacttgcagctccatctggggcaagtgagcctacggagctggtcgagttctgctggctgctgggtggccagttggaccttcccttccgactgcaaatccagcgccttcttctgcggccgtttcggcgcctgcacgagcaacggcacgtgtggctgcgtcgacggattcgagcctgcaaacccatcagagtggcagcgtggatactttgtgaacggttgctcgaggtctctgccactgagctgcacggcagacaatggcggccgcctgacggcggaacacgatgactcgtttgtccttctagacaacctgcaagggctcccttacagctcccagaacgccacggcagagggtgacgaaggttgcagacaagcctgtctgagcaaatgctactgcgtcgcgtacgcgtatgacgacgacgacgactctgggtgcaagctatggttcaactacctgtacaacgtgagcttcgctgctacacctccgtacagcaaggtttatgttcgtttgggttcgaagctcatggctcaaaaagcttcgaaaacagtagggatcgtgttcatggttgtcggactgacagcagcagtttgtgtgatactgatactggcgcttctatggagatacaggggaggttttttgtctactactgcttgcagaaagttccaagaagtggaaggaggctctcttgctgtctacacatatgcacaggtcaggagagcaacgaggaatttctccgacgagcacaagctcggcgagggaggtttcggctgtgttttcaggggaacaatgccgggaccaaccgtcgtcgccgtgaagcgtctgaaaggctttgggcaagcagacaagcagttcagagctgaagtgcagacgctcggagtgattcggcacacgaacatcgtccctctcttgggattctgcgtcacagggagcaggaggctgcttgtgtaccagtacatggacaatggctccttgggtgcacacctcttcccggaaaacaaaccatgtctactgaactgggatcttcggtaccggattgcgcatggcatcgccaagggcctagcctacctccacgaggaatgcgaagactgcatcatacactgtgatatcaagccagaaaacatactcctcgacgcggaattccgcgtgaagatcgcggacttcggcatggcaaagcttcttggacgggagttcagctctgcactgaccacgatccgaggaaccatgggatatcttgcgccggagtgggtgtctggacagcctatcaccaagaaagcagatgtctatagctttggcatcgtgctgctggagataatctcggggagaaggactatcaggagactgaaatttgggagccatcggtatttccctcattatgctgctgcccagctgaatgaaggaaatgtgatgagcttgctggatcgtaggctgggaggaaatgccagtgtcgaggagcttgatgtcacctgtagagttgcctgttggtgcatccaggacgaggaggatgacaggccatcgatggcccaagttgttcgtatgctggaaggtgttttagacactggaattcctccggttccgtcttccttcatgaaccttattgagggtgagagcagcagtacatcttcggaagaaggctaa

SEQ ID NO: 1542 - protein, 793 aa, Sorghum bicolor
MEAVKRVCSLSQPPLATFFFLAVAAFAARDTILPGEGISGNQTLVSRNGVFELGFFSPGTDIYHFLGVRILNMPTNAGTPKFWFGDRVYISDLPSAALQLFGDRLYITENGTNLWWSSVAGAGGGPAAPTASVVAVLLDSGNLVVRDQANSSRVLWQSFDYPGDALLPGARLGLDGDTGNNVSLTYTNTNSWHNSSLSVDPDRRRRNGFVLATDGWDVLRGTFPEWMVSSQGNGSSLVLLNNRPGAGMAEHLQLHLGQVSLRSWSSSAGCWVASWTFPSDCKSSAFFCGRFGACTSNGTCGCVDGFEPANPSEWQRGYFVNGCSRSLPLSCTADNGGRLTAEHDDSFVLLDNLQGLPYSSQNATAEGDEGCRQACLSKCYCVAYAYDDDDDSGCKLWFNYLYNVSFAATPPYSKVYVRLGSKLMAQKASKTVGIVFMVVGLTAAVCVILILALLWRYRGGFLSTTACRKFQEVEGGSLAVYTYAQVRRATRNFSDEHKLGEGGFGCVFRGTMPGPTVVAVKRLKGFGQADKQFRAEVQTLGVIRHTNIVPLLGFCVTGSRRLLVYQYMDNGSLGAHLFPENKPCLLNWDLRYRIAHGIAKGLAYLHEECEDCIIHCDIKPENILLDAEFRVKIADFGMAKLLGREFSSALTTIRGTMGYLAPEWVSGQPITKKADVYSFGIVLLEIISGRRTIRRLKFGSHRYFPHYAAAQLNEGNVMSLLDRRLGGNASVEELDVTCRVACWCIQDEEDDRPSMAQVVRMLEGVLDTGIPPVPSSFMNLIEGESSSTSSEEG

SEQ ID NO: 1543 - DNA, 3840 bp, Sorghum bicolor
atgtcgtggggcctgggctggaagcgcagctccgagatcttccacctcacgctcgactacggggactacgatgacaacgacgacaatcagccctcgtccccgccccatccggcgtcctcttccccttccgcctcggcatcgtcgacccctgtatccttctcctcgcccaccgccggatgcacacgcaacggcgacctcggcttccgcatcgagctcgactggtcggcgggggacgacgaggatcaggtcgcgctccgcctccagtcccagctcatggtcgcgctgcccccgccccacgatgccgtctccattgacctgaccccgatggacgacgacggggaggaggaaggggtgcggatcgagatgcgcgtggtcaggaggcgggaggcgctgcgatccgtgcgtgtgtcgcgggcccccgggtctgcgctgggcagcggcgatggcgcgggggtgctcgcgcgcctcatcagatccaacctcgctcctgcgcctgctgtggatggccccacagccgccgcgggcgtgcccgtgctggcggatcactggcgcccagtcgccatgctcagcctctgcaactgcggaatgtcgtgccaagacattaaagaaatggaccatgctacaaaagggtcattctatggtggacaaatgaatcttgctgtgagcccattacttaaattgcacagacctgtgcttccagttgagttaactcgccttccacttctcgagaagctatatcttgacaacaataaattgtcagttttgccccctgaagttggtgctttgaagaatatgatagtgctgtcagttaacaacaacatgctagtttctgtccctgtagaactgcggcaatgtgttatgctggaggaattatcattagaacataacaagcttgtccggccactattggatttcaggtcaatgcccaagctccgaattttgcgcttgtttggaaatcctctagagtttcttccagaaattttgccactgcataacctcaggcatctcacacttgcaaatattagaattgaagcagtggaaagtcttaaatctgtcactgtacaaatagagactgagaatagttcctacttcattgcggccaggcacaaacttagtgcctttttctctcttgttttccgtttctcttcctgtcaccatcctttgctagcttctgctttggccaaaataatggaagatcgtagcaaccatattgcaattagcaaagaagagaatgctgtcaggcagcttataagcatgataagcagtgataatcgtcatgtggtacacactacacaccccaactatctttctgtagttgagcaagcatgtcttgctatttcatcactggcatctgatatttcttcagcaatgcagctgattaagtgtgacattatgaagcctattgaagctgtactaaaatcatctgatgaagaagaactagtatcagtattgcaagtggtgcaacgtctatctctgtttgcagttggcaatttggctttctgcttggagactcgtcgcaccctcatgcattctgaaagcttgcgtgaccttttaatccgcttaactatttcacaagagcgtcgtgtcagcaaggcagctgcacgtgctttggcaatcttaggggagaatgagaacttgcgtcgagcaataagaggaaggccagttgcaaagaagggtctacgcattctatcaatggatggtggtggcatgaaaggccttgcaactgttcaaatgcttaaacagatagagcaaggaactgggaaacgcatacatgaaatgtttgacctcatatgtggtacatccactggtggcatgcttgcaatggctcttgggatcaagcagatgactttggatcagtgtgaagaaatatacacaaaacttggaaaacttgtatttgctgaacctatcccaaaggatgaagctgctacgtggaaggagaagattgatcaacttttcaaaagttcatcacaaagtttcagagtggttgtacatgggtccaagcacagtgcagatcaatttgagaggttactgaaggaaatgtgtgccgatgaagatggtgaccttctaattgaatctgctgtaaaaggcattccgaaggtttttgctgtatccactttagtcagtgtcatgcctgctcaaccgtatatattccggaactatcagtatcctcctggcactctggaggtatcaccaggaatggcagaaagtccatcaattggtgcaatcggtacggctgtttctggtgcgccagtgggtattaaacgtggtgccttcatggggagctgcaagcatcgcgtgtgggaagcgataagagcatcgtctgcagcaccatattatctggatgatttctctgtagatgcaaatcgttggcaagatggagctattgttgccaacaatcctacaatctttgccattagagaagcacaacttctgtggccagatacacgaatagattgtctagtctcaataggatgtggctcagttccaactaagagtcgacgaggtggatggcgctacttggacacagggcaagtgttaatagaaagtgcatgctcagtggagagagttgaagaaactttggatacactgataccgatgcttcctgaaatgcaatatttccgctttaatccagtggatgaacggtgcggtatggagttagatgaaactgatcctgctatctggcttaagttggaagctgcaactgatgagtacattcagaagaactttatggctttcaaggatctttgtgagcttctggtcccaaggtaccaagaggaagaaaagtcatcagatatttacaaatccctttcattttcaagactgacatcgttaaatcaaggtttcagcgaaagtaatcctaccttaggatggaggcgtgtggttttacttgtagaggcttcatttagtcctgattttgggaagaaaataaatcatgcacgttcccttgaatctttctgctcccagaatggtattaggttagctctaatgaatagcgcttctgggtttgggaagccagccactgcacttcctaccccaatatcttctcccttgtttactggaagtttcccatctagtccacttctatatagtccagagggcactcaacggatcggtcgaattgacctagttcctccacttagtttggatggccacccaactacaaagtcctcaccaccaacatcaccattgaagtcaagacagccatctgcacatgttcggtcgttgtatgataaactgcagaatatgcctcaagttggtgtgatacacttggctcttcaaaatgattcaactggttcagtattgagttggcagaatgatgtattcgtggtcgctgaacccggggaacttgcagacaggaggacagtgcctgctgttcacatggcacctgaagatgttcgatggatggttggagcatggagggagaggattattgtatgcagtggtaagtatggccttgctcatggcctggtcaaggcattcatggattgtggtgccaaagcagtcatctcatcgtccatcgagcctccggattcgcagacaatagtctaccatgggatggatgtcaatggaagcctagagaatggtaagtttgtcatcggggatgaagaagccgacgaatcggagcctgaacctgttagccctataagtgactgggaggacagtgatgtggaaaaaggcggcaaccatgacgtggatgatgaggagtacctggctcagttcatgtgcctgatgtatgacaaattgttccgtgagggtgtgactgtggatacggctctgcagcaagcactccgctcacatcccaagttgaagtacagctgccacttacccaacgttttgtag

SEQ ID NO: 1544 - protein, 1279 aa, Sorghum bicolor
MSWGLGWKRSSEIFHLTLDYGDYDDNDDNQPSSPPHPASSSPSASASSTPVSFSSPTAGCTRNGDLGFRIELDWSAGDDEDQVALRLQSQLMVALPPPHDAVSIDLTPMDDDGEEEGVRIEMRVVRRREALRSVRVSRAPGSALGSGDGAGVLARLIRSNLAPAPAVDGPTAAAGVPVLADHWRPVAMLSLCNCGMSCQDIKEMDHATKGSFYGGQMNLAVSPLLKLHRPVLPVELTRLPLLEKLYLDNNKLSVLPPEVGALKNMIVLSVNNNMLVSVPVELRQCVMLEELSLEHNKLVRPLLDFRSMPKLRILRLFGNPLEFLPEILPLHNLRHLTLANIRIEAVESLKSVTVQIETENSSYFIAARHKLSAFFSLVFRFSSCHHPLLASALAKIMEDRSNHIAISKEENAVRQLISMISSDNRHVVHTTHPNYLSVVEQACLAISSLASDISSAMQLIKCDIMKPIEAVLKSSDEEELVSVLQVVQRLSLFAVGNLAFCLETRRTLMHSESLRDLLIRLTISQERRVSKAAARALAILGENENLRRAIRGRPVAKKGLRILSMDGGGMKGLATVQMLKQIEQGTGKRIHEMFDLICGTSTGGMLAMALGIKQMTLDQCEEIYTKLGKLVFAEPIPKDEAATWKEKIDQLFKSSSQSFRVVVHGSKHSADQFERLLKEMCADEDGDLLIESAVKGIPKVFAVSTLVSVMPAQPYIFRNYQYPPGTLEVSPGMAESPSIGAIGTAVSGAPVGIKRGAFMGSCKHRVWEAIRASSAAPYYLDDFSVDANRWQDGAIVANNPTIFAIREAQLLWPDTRIDCLVSIGCGSVPTKSRRGGWRYLDTGQVLIESACSVERVEETLDTLIPMLPEMQYFRFNPVDERCGMELDETDPAIWLKLEAATDEYIQKNFMAFKDLCELLVPRYQEEEKSSDIYKSLSFSRLTSLNQGFSESNPTLGWRRVVLLVEASFSPDFGKKINHARSLESFCSQNGIRLALMNSASGFGKPATALPTPISSPLFTGSFPSSPLLYSPEGTQRIGRIDLVPPLSLDGHPTTKSSPPTSPLKSRQPSAHVRSLYDKLQNMPQVGVIHLALQNDSTGSVLSWQNDVFVVAEPGELADRRTVPAVHMAPEDVRWMVGAWRERIIVCSGKYGLAHGLVKAFMDCGAKAVISSSIEPPDSQTIVYHGMDVNGSLENGKFVIGDEEADESEPEPVSPISDWEDSDVEKGGNHDVDDEEYLAQFMCLMYDKLFREGVTVDTALQQALRSHPKLKYSCHLPNVL

SEQ ID NO: 1545 - DNA, 348 bp, Sorghum bicolor
atgtctgatctcgacgttcagatcccaactgccttcgatccctttgctgaggccaatgctggggactctggtgcggcagcaggatcaaaggactacgttcatgtacgcatccagcagcgtaatggtcgcaagagtctgactactgtccagggattgaagaaggagttcagctacagcaagatcctcaaagatctcaagaaagagttttgctgcaatggtacagtggtccaggacccagaacttggacaggtcattcaactccagggtgatcagaggaagaacgtctctaatttccttgtccaggccggcattgtgaagaaggaacacatcaagattcatggtttctga

SEQ ID NO: 1546 - protein, 115 aa, Sorghum bicolor
MSDLDVQIPTAFDPFAEANAGDSGAAAGSKDYVHVRIQQRNGRKSLTTVQGLKKEFSYSKILKDLKKEFCCNGTVVQDPELGQVIQLQGDQRKNVSNFLVQAGIVKKEHIKIHGF

SEQ ID NO: 1547 - DNA, 189 bp, Sorghum bicolor
cacacaaaaacaattatattgatcaaagataagagtattgtgattttacagtgccggcactctgctgtacatacctctcgctccctcaaacagcaactcatctcaaaaaaaaacaaaaaaggaacacagcaaggcagagttgatacagaaaaatttcaagcctcggaatcaaacctgtgtgacccttga

SEQ ID NO: 1548 - protein, 62 aa, Sorghum bicolor
HTKTIILIKDKSIVILQCRHSAVHTSRSLKQQLISKKNKKGTQQGRVDTEKFQASESNLCDP

SEQ ID NO: 1549 - DNA, 1971 bp, Sorghum bicolor
atggctcatcacgctctatctctacctctagccaccatcctcgcggtggcggtggcactactactagcccgccgcgctgcgggttacccgtggtatgtgtgcggctcaagcagcaacttcgtggctaacagcacataccaggctcatctcgacttggtcaccgccacccttcccaagaacgcctcctcgtccccggacctcttcgccaccgccgtcgtcggaaccatcccggagcagctctgggccatggggctctgccgcggcgacgtcaacgcctcgacatgcttcaactgcctcacccagggcttccaagaggtacccgacgattgcccctacgacagggacgctagcatctactacgacttctgtacggtgcgctactccgacgtccacactctacgcaacgacgacgacactggcccgatgataaacacgtacgtcgaaaccaacgacggaaatgtcacggcggcggacgcggcccggttcaagagactcctggccgacctcatcgacgccaccgtcgaatacgccgccaacagctcccggcggttcgccaccggggaggccgacttcaacggccaggagacgaccatccccaaggtgtacagcgtggctcagtgcacgccggaccagacgccggcggagtgccacaggtgcctcgagaggatggtggaggctaccctggaggcgttcaacggcagcatcggaggcagggtgcttggggttgattgcacctaccggtatgagaccgcgcccttctacaacggacaggccatggtgcggctggcacaaccaagctctagtagagcgccggcgccagcgccggctctgcagccgacggccgccggagaagggggacgaaagcaccgtgtgtcttgggtggttcttgcagttgtgctaccaactctagccgccatgaaccttgttgcctgcctctatttgcggcggcgccggcgactactaattggacaggccaaacaccaaaagccgcccatgtattacactgaagcagaggacaccgaaatggtggactccatgatgatggacgtctccaccctacgagccgctactggggatttcaatgagagcaacaagctcggcgaaggcggctttggtgccgtgtacaagggtgtcctcccagatggcgaggaaatagcggtgaagcgtctgtctagcagctcatcgcagggagtggaggagctaaagaacgagctcgctctagtggccaagctgaagcataggaacctcgtcaggctcatcggcgtctgcctagagcagcaagagcggttgctcgtgtacgagttcgtccccaaccggagtctcgatctgatactcttcggcactgataatcgtgagcagcagcttagctgggagcagaggtacaagatcataaacggcatcgctcgaggcttgcagtacctccatgaggactcccagctcaaggtggtgcaccgtgatctcaaggccagcaacatcctgctagatgagagcatgaaccccaagatctcagacttcggcatggccaggatctttggccaagaacagacgcaggccgtcaccagccgcgtcgtcggcacctatgggtacatggcaccggaatacatgatgcgggggaactactccgtgaagtcggacgcgtttagcttcggtgtcatggtgctggaaatcgtaacgggtcggaagaacagtaacgaaggctgcaatctcttgaccacagtatggatgcactgggaggccagaaagatggcagagttggtcgaaccgagcatgggcaacagtttcccggagggcgatgtgctgaggtgcgtccacatcggcctgctgtgcgtccaggcagaccctgcggcccggccggtgatgtcgtctgtcgtgatgatgctcggcagcgatacggtcaccctccaggttccatccaagccgggattcttcgccaggaacaacagcgccaacacagccgcgtcgacagtgtga

SEQ ID NO: 1550 - protein, 656 aa, Sorghum bicolor
MAHHALSLPLATILAVAVALLLARRAAGYPWYVCGSSSNFVANSTYQAHLDLVTATLPKNASSSPDLFATAVVGTIPEQLWAMGLCRGDVNASTCFNCLTQGFQEVPDDCPYDRDASIYYDFCTVRYSDVHTLRNDDDTGPMINTYVETNDGNVTAADAARFKRLLADLIDATVEYAANSSRRFATGEADFNGQETTIPKVYSVAQCTPDQTPAECHRCLERMVEATLEAFNGSIGGRVLGVDCTYRYETAPFYNGQAMVRLAQPSSSRAPAPAPALQPTAAGEGGRKHRVSWVVLAVVLPTLAAMNLVACLYLRRRRRLLIGQAKHQKPPMYYTEAEDTEMVDSMMMDVSTLRAATGDFNESNKLGEGGFGAVYKGVLPDGEEIAVKRLSSSSSQGVEELKNELALVAKLKHRNLVRLIGVCLEQQERLLVYEFVPNRSLDLILFGTDNREQQLSWEQRYKIINGIARGLQYLHEDSQLKVVHRDLKASNILLDESMNPKISDFGMARIFGQEQTQAVTSRVVGTYGYMAPEYMMRGNYSVKSDAFSFGVMVLEIVTGRKNSNEGCNLLTTVWMHWEARKMAELVEPSMGNSFPEGDVLRCVHIGLLCVQADPAARPVMSSVVMMLGSDTVTLQVPSKPGFFARNNSANTAASTV

SEQ ID NO: 1551 - DNA, 657 bp, Sorghum bicolor
atggcacaagccatggcgtcgatgaccggcctctcgcagggcgtcctgcccagcaggcgcgccgccaacagggccagggcggccgccgtcgtcgtcagggcgtccgccgagggcgaggccgccgcggcgcagccgggccgccgcgccgtgctcgggctggtggccaccggcgtcgtcggcggcgccttgtcgcaggcggtgcacgccgcgaccgtcaattccatcaagatcggagccccgccgccgccctccggtggactccccgggactgaaaactctgaccaggcgagggacttcggcctccccttgaaggatcgattctacctgcagccgctgccaccggcggaggcggcggcgagggtgaagacgtcggcgcaggacatcatcaacctgaagccgctcatcgacaagaaggcgtggccgtacgtccagaacgacctccgcctcagggcctcctacctgcgctatgacctcaagaccgtcatcgcttcaaagcccaaggaggagaagaagagcctcaaggagctcaccggcaagctcttcagcaccatcgacgatcttgaccatgccgcgaagatcaagagcaccccagaggccgagaaatactttgcagcaaccaaagatgtgctcggcgatgttctcgccaagataggctag

SEQ ID NO: 1552 - protein, 218 aa, Sorghum bicolor
MAQAMASMTGLSQGVLPSRRAANRARAAAVVVRASAEGEAAAAQPGRRAVLGLVATGVVGGALSQAVHAATVNSIKIGAPPPPSGGLPGTENSDQARDFGLPLKDRFYLQPLPPAEAAARVKTSAQDIINLKPLIDKKAWPYVQNDLRLRASYLRYDLKTVIASKPKEEKKSLKELTGKLFSTIDDLDHAAKIKSTPEAEKYFAATKDVLGDVLAKIG

SEQ ID NO: 1553 - DNA, 2571 bp, Sorghum bicolor
atggcttcaccggcgccggcagacggtgacaatggtggcctcactgacccacttctagtgaccgcaaccggccatggtgccaccccgaggaaggctggcctcggtgccaagggcaagtactgggtggccgccgacaaggccgagaggatggctgcgaaggaggccggcggtgaggacggccgcgcgctgctgttccggaagtataaggtcaaaggcggccttctgcacccctacaggttgctgatcatcatccgattaatcgctgtcctcgtcttcttcgcatggcgcatcaggcacaacaaatctgatatcatgtggttttggacaatgtccatagtcggtgacgtctggttcggcttctcgtggctcctcaaccagctcccaaagttcaaccccgtcaagaccatcccagaccttgcagccctcaagcagcagtttgccttctctgaaggcacctctaggctccccggcattgacgttttcgtgaccactgccgatcccattgatgagcccatactctacaccatgaattgtgtcctctccatcctcgctgttgactatccagtcgacaggcttgcctgctatctctcagatgatagcggggcactcatcctctacgaggcattggtcgaggtcggaaaatttgcgcctctgtgggttccattttgccgcaagtactccattgagccaagggcgccagaaagctattttgagcatgtggcgccaccacaagctggaagggtgacgcaggagttcttgaatgattataggagggtgcaaatggagtatgatgagttcaaggtgcgcctggacatcctccctgatgccatccgcaagagatctgatgtttatagtagcatgagagctgcagaaggagatcaaaaggcaacttggatggcaaatggaacacagtggcctggcacatggattgatccaacagaaaaccatagaaaaggacaccacgctcctattgccaaggttgtgctgcaccatccaagcagtggacaacatcttggttcacaacccatcactgaaagcaatctcagcattaccaccactgacgagcgcctcccaatgcttgtttatgtctctcgtgagaagaacccaagttatgaccacaacaagaaggcaggtgccctgaatgcacaactgcgggcctctgctctcctctctaatgcccaactcgtcatcaactttgactgcgaccactacatcaacaattctcaagccctaagctcggctgtgtgcttcatgctagatcaacgagatggtgataacaccgctttcgttcagttcccacagcgctttgacaatgttgaccccacagaccgctatggtaaccacaatcgtgtcttctttgatgggaccatgcttgcccttaatggtttgcaaggaccctcatacctcggcactggttgcatgttccgtcgcttagcactctatggtattgacccaccccattgtagagcagaaaacatcacagccgaagctagtaggtttggtaactccacaatctttctagattcagtgtcaaaagccctgaaaaatgacaggtcaatcacaccaccaccaattgatgacacattccttgctgagttagagagggttgtgacatgttcttatgaccaaggttctgactggggcaagggtgtagggtacatctatgacatagccactgaagatatagtaacaggatttcacattcacgggcaggggtggcgctctatgtattgcacaatggagcatgatgcgttttgtggtgttgcaccgatcaacctaacagaacgcctccatcaaattgtgcgttggtctggtgggtctttagagatgttcttctcccacaacaacccattcattggtggtcgccggattcaacctcttcaacgtgtctcctacctcaacatgacagtctacccagtcacatcagtattcatcctgatctatgctctaagcccagtgatgtggcttatccctgacgaagtatacatccagagaccattcactaggtatgtcgtgtaccttatcataatcgtcgtgatgattcacatgattggctggcttgagataaagtgggcgggggtcacatggctggactattggcgcaatgagcagttctttatgatcggctcgacgagtgcatatccaatggcagtgttgcacatggtagtgaacctcctcacaaagaagggcatacacttcagggtcacttccaagcaaacagccgcagatgacaatgacaagtttgcggacttgtatgattttcgatgggtgccaatgctcatcccaacaatggcagttctggtctgcaatgttggtgccattggtgtagccctgggcaaaatagtggtaaacattgaaacatggacagcggcgaagaagatgcatgctgcattgggtctgctgttcaacatatggatcatgtttctcctctacccatttgcactagcaatcatggggcggtgggcgaagaggccaatcatccttgtaatcttgctgccagttgtccttgtacttgttgccattttgtatgtaggtctccatatcttacttgctggtgtaattccactctag

SEQ ID NO: 1554 - protein, 856 aa, Sorghum bicolor
MASPAPADGDNGGLTDPLLVTATGHGATPRKAGLGAKGKYWVAADKAERMAAKEAGGEDGRALLFRKYKVKGGLLHPYRLLIIIRLIAVLVFFAWRIRHNKSDIMWFWTMSIVGDVWFGFSWLLNQLPKFNPVKTIPDLAALKQQFAFSEGTSRLPGIDVFVTTADPIDEPILYTMNCVLSILAVDYPVDRLACYLSDDSGALILYEALVEVGKFAPLWVPFCRKYSIEPRAPESYFEHVAPPQAGRVTQEFLNDYRRVQMEYDEFKVRLDILPDAIRKRSDVYSSMRAAEGDQKATWMANGTQWPGTWIDPTENHRKGHHAPIAKVVLHHPSSGQHLGSQPITESNLSITTTDERLPMLVYVSREKNPSYDHNKKAGALNAQLRASALLSNAQLVINFDCDHYINNSQALSSAVCFMLDQRDGDNTAFVQFPQRFDNVDPTDRYGNHNRVFFDGTMLALNGLQGPSYLGTGCMFRRLALYGIDPPHCRAENITAEASRFGNSTIFLDSVSKALKNDRSITPPPIDDTFLAELERVVTCSYDQGSDWGKGVGYIYDIATEDIVTGFHIHGQGWRSMYCTMEHDAFCGVAPINLTERLHQIVRWSGGSLEMFFSHNNPFIGGRRIQPLQRVSYLNMTVYPVTSVFILIYALSPVMWLIPDEVYIQRPFTRYVVYLIIIVVMIHMIGWLEIKWAGVTWLDYWRNEQFFMIGSTSAYPMAVLHMVVNLLTKKGIHFRVTSKQTAADDNDKFADLYDFRWVPMLIPTMAVLVCNVGAIGVALGKIVVNIETWTAAKKMHAALGLLFNIWIMFLLYPFALAIMGRWAKRPIILVILLPVVLVLVAILYVGLHILLAGVIPL

SEQ ID NO: 1555 - DNA, 2475 bp, Sorghum bicolor
atggctcctgccttcttccttctaccgctcctactcggccagatccttctctgtgccgccgtcgacagcatcaactcctccacacccttgtccggcgcgcagaagattgtgtctaagggcaacaagttcaccttgggcttctacaccccaccccaaggtaccaccacctcctccaatcccagcaactactacatcgccatatggtacagcaacatacaactgcagacgacggtgtggatggccaaccccgatgtgccggtggctgacccaaccactgccgccttgaccatcggcagtgacggcaatctcgtcctccaatcccagaatcgcctgctgtggtcgacgaacgtaagtattagctccaattccaccgtcgctgttctccaggacatcggtagcctcgacctcatagatgccaccaattcatccatggtttactggcgaagcatagatcatcccacaaacacttggcttcctgggggcaagcttggactgaacaagaccactggtgtgagccagcggcttgttccatggagtaacactgccaaccccttacctgggccgttctcactggagttggatccaagaggcacgacacaatacttcattcagtggaatgattccataacatactggaccagtggtccttggaatggaaacatctttagccttgtgccagagatgacctctggttacaactataacttccagttcatcaataatgtcaccgagagctacttcatctactcaatgaaggacaacaacatcatctcgaggttcatcatcgatgtggatgggcagatcaagcagctgacatgggtgcctgcctcccagtcatggatcttgttctggtcccagccaaggacacagtgtgaggtgtacgcactttgcggggcctatggtagctgcaacctcaatgcactgccattctgcaactgcatcagggggttcagccagaaggttcagagtgattgggacctccaggattacagtggcgggtgccaaaggagagtaccactgcagtgccagaccaattcgagctctgcacaggctcagcctgataagttctataccatggaaagtgtgaggctacctgataatgctcagactactgtggcggcgagctctcaagactgtcaagtgacttgtctgaacaattgctcttgtaatgcatatacttataacagtagtggctgctttgtttggcatggggatctgattaaccttcaggatcaatacagcggaaatggaggaggcacactcttcctcaggcttgcagcttctgaactgccagactccaaaaagagcaacacagtgaccattggtgcagttgttggtggagttgctgcagttttaatattgctttctattgtgtcctacttcttgtttcagaaataccgccgagaaagaactctcaggatatccaagactgctgggggcacaatgatcgcctttaggtatagtgatctgcagcatgtcactaacaacttctcggagaggctgggtggaggtgcctttggctcagtgttcaaagggaagctcccagattcagcagccattgctgtgaagaggctcgatggagttcagcaaggggagaagcaatttcgtgctgaggtgagcaccattggcacaatacagcatgttaatttggtccgcctccttggattttgctcagaaggatcacggaggctgcttgtgtatgagttcatgccaaagggctccctggacctgcagctattctctggtgagacaacaacactgagctgggctaccaggtaccaaatagcacttggaacagcaaggggcttaaattacctgcatgaaaaatgtagggattgcattatacactgtgatgtcaagccagaaaacatactcttggatgagtcctttgtgcctaaagtggctgattttggtctagcgaagctcttgggcagagagttcagccgtgtattgacaacaatgagaggaacaaggggctaccttgcacctgaatggatcagtggtgtggcaataacagcaaaggcagatgtctttagctatggcatgatgctcttcgaactcatatcaggcaagagaaatgctggtcacggagaacagcatggatccacctttttcccaaccttggctgcaagcaagcttcatgaaggagatgtgcggaccttgttggaccccaagctgaatggagatgcaaatgttgatgaactcacaagagcttgtaaggttgcctgttggtgcatccaagatgacgaaactgctagacctacgactggtcagattgttcaaatcctcgagggattccttgacgttaacatgcctcctgttccaaggtcattgaaagttcttggcgaaagccctgatgttataaacttcttttcagatatatcttcaagtcagacttcccagacacagaacagcacgacaacttcccagacgcgcagtgctacttcaggcagttcacacccccaaagtccataa

SEQ ID NO: 1556 - protein, 824 aa, Sorghum bicolor
MAPAFFLLPLLLGQILLCAAVDSINSSTPLSGAQKIVSKGNKFTLGFYTPPQGTTTSSNPSNYYIAIWYSNIQLQTTVWMANPDVPVADPTTAALTIGSDGNLVLQSQNRLLWSTNVSISSNSTVAVLQDIGSLDLIDATNSSMVYWRSIDHPTNTWLPGGKLGLNKTTGVSQRLVPWSNTANPLPGPFSLELDPRGTTQYFIQWNDSITYWTSGPWNGNIFSLVPEMTSGYNYNFQFINNVTESYFIYSMKDNNIISRFIIDVDGQIKQLTWVPASQSWILFWSQPRTQCEVYALCGAYGSCNLNALPFCNCIRGFSQKVQSDWDLQDYSGGCQRRVPLQCQTNSSSAQAQPDKFYTMESVRLPDNAQTTVAASSQDCQVTCLNNCSCNAYTYNSSGCFVWHGDLINLQDQYSGNGGGTLFLRLAASELPDSKKSNTVTIGAVVGGVAAVLILLSIVSYFLFQKYRRERTLRISKTAGGTMIAFRYSDLQHVTNNFSERLGGGAFGSVFKGKLPDSAAIAVKRLDGVQQGEKQFRAEVSTIGTIQHVNLVRLLGFCSEGSRRLLVYEFMPKGSLDLQLFSGETTTLSWATRYQIALGTARGLNYLHEKCRDCIIHCDVKPENILLDESFVPKVADFGLAKLLGREFSRVLTTMRGTRGYLAPEWISGVAITAKADVFSYGMMLFELISGKRNAGHGEQHGSTFFPTLAASKLHEGDVRTLLDPKLNGDANVDELTRACKVACWCIQDDETARPTTGQIVQILEGFLDVNMPPVPRSLKVLGESPDVINFFSDISSSQTSQTQNSTTTSQTRSATSGSSHPQSP

SEQ ID NO: 1557 - DNA, 867 bp, Sorghum bicolor
atggcttcgtcagtggccgccgcggcgagcacattcctgggcacccgcctgtcggacccggcgccgcagaacgggcgcatcgtggcccggttcggcttcggaaagccgaaaaaggctgctgcccccaagaaggtgtccaagatctcctctgaccggccgctgtggttccccggcgccgtggcgcccgactacctcgacggcacgctggtcggcgactacggcttcgaccccttcgggctcgggaagcccgtggagtacctgcagttcgatttggactcgctggaccagaacctggccaagaatgagcccggcgtcgtcatcggcacccgcttcgagtcctccgacgtcaaatccaccccgttgcagccctacagcgaggtgttcggcctccagcggttccgcgagtgcgagctcatccacggccgctgggccatgctcgccaccctcggcgccctctccgtcgagtggctcaccggcgtcacctggcaggacgccggcaaggtggagctggtggacgggtcctcgtacctgggccagccgctgccgttctccatctcgacgctcatctggatcgaggtgctggtgatcggctacatcgagttccagcgcaacgccgagctcgacccggagaagaggctgtaccccggcggctcctacttcgacccgctcggcctggcggccgacccggagaagaaggagcggctgcagctggcggagatcaagcacgcgcgcctcgccatggtcgccttcctcggattcgccgtgcaggccgccgccaccggcaaggggccgctcaacaactgggccacccacctgagcgacccgctccacaccaccatcttcgacacgttcggagcatcctcttaa

SEQ ID NO: 1558 - protein, 288 aa, Sorghum bicolor
MASSVAAAASTFLGTRLSDPAPQNGRIVARFGFGKPKKAAAPKKVSKISSDRPLWFPGAVAPDYLDGTLVGDYGFDPFGLGKPVEYLQFDLDSLDQNLAKNEPGVVIGTRFESSDVKSTPLQPYSEVFGLQRFRECELIHGRWAMLATLGALSVEWLTGVTWQDAGKVELVDGSSYLGQPLPFSISTLIWIEVLVIGYIEFQRNAELDPEKRLYPGGSYFDPLGLAADPEKKERLQLAEIKHARLAMVAFLGFAVQAAATGKGPLNNWATHLSDPLHTTIFDTFGASS

SEQ ID NO: 1559 - DNA, 918 bp, Sorghum bicolor
atggcggggcgctacgacagcaaccccttcgaggaggaggacgtgaaccctttctcggaacaagcacgcggcaaggctggtgggcagtccaacttcggtggtggcgcgttttacatgcctaacccaagaaacgtgcctcctgcatccaattcacgcctttcaccacttcctcctgaaccggcagacttcagtgctacagtggatataccccttgactcgtcaaaagacctgaagagaagagagaaggagctgcaagctagggaagctgaattgaacaagagggagaaggagctaaaacggagagaggaggctgcagcaagagctggcattgtcattgaggagaaaaactggcctccttttctgccactcatccatcatgatatcaccaatgagataccgagtcaccttcaaagaatgcaatatgttgcatttgcgtcctttcttggattgatttgctgcctcttctggaatgtcatagcagttactacagcttggatcaagggggaaggtgttaagatctggttattggcaataatctacttcatatctggtgttcctggtgcatatgttttgtggtatcgtcctctgtataatgcaatgaggactgatagtgcattgaagtttggattgttcttcttgctttacttgttccacattcttttctgcgtattttctgctgtggctcctcctgttgtatttgagggaaaatcattagcgggaattttgccagcgattgatcttatcagcgtgaatgctttggttgggatattctactttgttggatttggattgttctgtctggaatcgttgctcagcatctgggtcatccagcaagtgtacatgtacttccgtggaagtggaaaggctgcagagatgaagcgtgatgcgacaaggggtgcaatgagagccgcattttaa

SEQ ID NO: 1560 - protein, 305 aa, Sorghum bicolor
MAGRYDSNPFEEEDVNPFSEQARGKAGGQSNFGGGAFYMPNPRNVPPASNSRLSPLPPEPADFSATVDIPLDSSKDLKRREKELQAREAELNKREKELKRREEAAARAGIVIEEKNWPPFLPLIHHDITNEIPSHLQRMQYVAFASFLGLICCLFWNVIAVTTAWIKGEGVKIWLLAIIYFISGVPGAYVLWYRPLYNAMRTDSALKFGLFFLLYLFHILFCVFSAVAPPVVFEGKSLAGILPAIDLISVNALVGIFYFVGFGLFCLESLLSIWVIQQVYMYFRGSGKAAEMKRDATRGAMRAAF

SEQ ID NO: 1561 - DNA, 2226 bp, Sorghum bicolor
ggtatcaggaaaatttgctctgatttgttggagttgaaggatgctattgaaaatctgtctggaaataggcaatcaaaggtcctggcttttctcagaatttctgaggaggttgttgaagcagaacaagagttaattgagctacaaaagcatgtttcttcccaaggaattcttgtgcaggatctaatgagtggtgtgtcccgtgagcttgataattggcacaaatctagcaaggaagaagaagcaacaaaaaaggatcctgaaactgaacttgatgaaattttgtctcatggtacccaggatcccaaagctatttttctagataagttagacgttttgcttgcagagcacaaaatggaggaggcggttcttgctttggaagctgaagagaagaaatatttggttgcagatgaatctggtaaagaatcaaatgcagagaatacagcctttaaggcagcactgattaaaaggaaagcaattcttgaagatcagcttgttaggtattgtggacagccatctttatctatgaccgaactaaggaagtgtttgtctggtttaattaagataggcaaaagttctttagcccatcaagtacttctgaaagcttatggttcacaactgcagaaaaatgttgaggcatttcttcctaactgttcaatctacacgcagacttactctgcaactttgtcgcagcttgttttctcagctattgcaaaagcagcaaaagaaactaatacactacttggagatagccccatgaatacaaaccggattatccaatgggctgagtatgaaattgaaacctttgcacgtttggttaaagaaaattctcctttgcctgagagtgtttctgcccttcgctctgcctgtatatgcatcgaaactagtctccatcattgctcttgtctagaatcccaaggtctgaaattctcaaaattaattatggtactattgcgcccttatatcgaagaagttcttgatttgaattttagaagggtgaggagaaagattgtggatggggcaaggaatgatgatattctgcttctcacccctcaagaaggatcaccgctctctggtgcagtttcaccaaatgttatgcttacaagcagtggaaagaagttcatgtccattgtcaatgatgttttggatcaaattcttccaatgaccatagttcactttggtggagcaattctgaataaatttctccagctttttgatagatatgtagaaacactgatcaaagtcttgcctggcccttctgaagatgataatctactggagtcaaaagagcctgttgaatttaaagctgaaagtgatgcgcaacaacttacactaattggaaccgcatacactgtagcagatgagttattgccagctgctgtatccaagttctttgacatgcaagctgagaagaaaggagctggtggatcaagcgaaggcctcggccctgggtccatatatgccattgaatacaaagagtggaaacgtaatttgcagcattcgttggacaaactgagggatcacttttgtcgacagtatgtcttatcttttatttacttggaagggaagtcacgattggatgctaaaatgtacttgggacagaaagacgatgatcttttatttgatcctgatcccttgccttcactgcccttccaggcactgtttggaagattgcaacaggtagctagtgtcgctggtgatgttctactgggaaaggataagatacagaaggtcttactctcaaggctaactgaaacagttatcatgtggctctccaatgagcaagagttctgggatatatttgaggaccggtctgtccaactccagccttcgggtctgcagcagcttattcttgatatgcacttcattgttgagattgctgtctgtggaaggtttccacataggccagttcagcagcttgtatccacaatcataaccagagcagttgcatctttctcagcaaggggtgttgatccacaaagtgttcttcctgaggatgagtggtttgtcgacaccgccaaggctgcaattcacaagctcatgctggggaattctgggtctgagtccgagcccgagcctgaggcggaagaacatattgctttgcatggtgagatctctgattctgaagagagctcaactccgtcgacagtaggatcagaagactcgttcgcttccgcaaagaatgatgatctggaaagccccgtttacttcactgatcctgagagttaa

SEQ ID NO: 1562 - protein, 741 aa, Sorghum bicolor
GIRKICSDLLELKDAIENLSGNRQSKVLAFLRISEEVVEAEQELIELQKHVSSQGILVQDLMSGVSRELDNWHKSSKEEEATKKDPETELDEILSHGTQDPKAIFLDKLDVLLAEHKMEEAVLALEAEEKKYLVADESGKESNAENTAFKAALIKRKAILEDQLVRYCGQPSLSMTELRKCLSGLIKIGKSSLAHQVLLKAYGSQLQKNVEAFLPNCSIYTQTYSATLSQLVFSAIAKAAKETNTLLGDSPMNTNRIIQWAEYEIETFARLVKENSPLPESVSALRSACICIETSLHHCSCLESQGLKFSKLIMVLLRPYIEEVLDLNFRRVRRKIVDGARNDDILLLTPQEGSPLSGAVSPNVMLTSSGKKFMSIVNDVLDQILPMTIVHFGGAILNKFLQLFDRYVETLIKVLPGPSEDDNLLESKEPVEFKAESDAQQLTLIGTAYTVADELLPAAVSKFFDMQAEKKGAGGSSEGLGPGSIYAIEYKEWKRNLQHSLDKLRDHFCRQYVLSFIYLEGKSRLDAKMYLGQKDDDLLFDPDPLPSLPFQALFGRLQQVASVAGDVLLGKDKIQKVLLSRLTETVIMWLSNEQEFWDIFEDRSVQLQPSGLQQLILDMHFIVEIAVCGRFPHRPVQQLVSTIITRAVASFSARGVDPQSVLPEDEWFVDTAKAAIHKLMLGNSGSESEPEPEAEEHIALHGEISDSEESSTPSTVGSEDSFASAKNDDLESPVYFTDPES

SEQ ID NO: 1563 - DNA, 498 bp, Sorghum bicolor
atgcaggtgccagtccgcctccgcccgctcgtcccgagcgccgtcggaggaggaggtgcgttttcggcggttcttgcgcagtccgtgcgtgagcggagggggaggacatgtcggaaggtaatcagcttctcgtcggcgggaaagggtggcgacgaggcggcgcggcgcgagacgccggaggagacgcggaagcggctggaggagctggacgcgctgctggaggggctggtcgagcccaagatgcggccaccgacgccacctcctcctccggatccgtacttggaccgagccatgataacagggcggggatcaaccgatgaactgccagagatctctccaacatatctggcattctcgactcttggacttgtcatcctcaccatcttcaccaacgtcatgttcaatctgtacgtcaaaccttctgtggacggcttcgatccacctgaaaggattcagagagcgcctctagtcaatccagcagatagaccatccgagtag

SEQ ID NO: 1564 - protein, 165 aa, Sorghum bicolor
MQVPVRLRPLVPSAVGGGGAFSAVLAQSVRERRGRTCRKVISFSSAGKGGDEAARRETPEETRKRLEELDALLEGLVEPKMRPPTPPPPPDPYLDRAMITGRGSTDELPEISPTYLAFSTLGLVILTIFTNVMFNLYVKPSVDGFDPPERIQRAPLVNPADRPSE

SEQ ID NO: 1565 - DNA, 3486 bp, Sorghum bicolor
atggcgacgtcgggatcgggaggcaacgagcccggcggacggccctggacggcgaccagcacgtgggtccccggtcccgccggcggggccgtggaggacgctgtctcgttcgagacctccgacgacgacgcggaggcgtcaccggcgggcgtcgtgctctgccacccgccggccgactcggaccgcgacatgactccctgcccctgcgaggtcactgttagtttcaggggaaagtatgagattcacagggtatatgtgcgaagcacagctcggatatatgaactataccactctcctgatccaaagggtgccagcaaggattatctatgcaccgtgcgttgtggacttgctgttaaagaaccgcagccctgtggtgaagaaagtatgtctcagtggactggcagtgcttcaaacagcgacaagcgtgaacatgaggcaaaaagtgtaagtagtggtagtgatgaagataattgggttgatgtcaagattccagaatctcctgctggaaataaaacactagaatctcaagaaaggaatgccattcgaacctgccaagaaaatactctggcacactatgaagctactgctgagatgactgatgttaacccttgtgtgtctcttactatacggtttctatcacttcagtcgaaggcatcagtgcacattgaggaaatctacatatttgctgatcatgttgagtccaccagtgatgtttcagtaagaggtcctggaaacatgggaggcagttctttgctggcaatgcttgttcctggccttatgcaaatgtctaaatcaaggaatttgaagatcgatgacagttatttttctgatggatcaaggaatcaagagagcagcacatgcaaaagggttacacaggaagcagtgctgtgtagcacaaatgattcaaagtatacatctgtagggatagaaagtgcaatgagccctacagttggtgttacagtatctgatgaaaaaaatagccaaggtgagttccagttcaaggaccctgattctcttccattgcctgtacaaacattaggaagtacacaagcatcatcagtgaaggaccagcgagaattgaacacaggtcatgttggtaatccccttctgaaggaaaactttattccttataatcatattgagagaaagctggatactctgctctcaaaggtagagaagatggaattatgttgctctaggtttgagaacagcatgataaagccccttggtagcattgaggcgaggcttcagcgactagaggaacagtttagttcgttctccatggatattcagtctttgagaggttcttctgcatttaggtcagcaacagatggtatgtctaatacgatgcgctcacaggaggaagcacataatgatgctaatgataacagtatttctacaactgacaggaaaccaggtttagctgtcagggcgccagattttatgtcagatgattactgtggttataatgtaataactaatggaaaccatgttagttttcgtgggcctagtgtggtgccaaggctgcttgtgaaggccactgattttattgctcaacctgaattaaccgatgcaagcctccatgatgggtctgcttctgaaaaggagcataagacttccccgggtttagttgtcaaggttcctgaattcccagatgatgatgatgatgatgatgatgatgatgatgatgatgatgatgatggggaggataatgattatgacaacgatgacgtggaagaaaagaaacaagcagaagtttgtggtgatggtgatgatcacatatggtctgatgatactctgaggaaaagcacagctggcgacacaaatagcaaaaaacctgtatctatcaatggtgcattggcgtccgcattggaagcattactcacttccaccaaaggaacatcatctttgaaacctgctgtttgcactagcagtaatttaggtgctgaaaacattaacgattccttcagttgttccctttctcctggaaaaactggcaagatgcccactaaagatggttcagctgaccaatttctgggtacatctggtgatgctaatttggttggtgccatcatgtcttctcaagatattgatacaactcctagcaattctctctcaaatgaaatgttggatagcaaggttgagataaatgaacagaacgatgatctcagtacagaaaaggtggcatttgttgcgatcacagaaccattggatgttccctcacgcactgatacaattgaggaatctattgatgatgcaagttgcgtgaatagacaaagcaatggtcctaatctagatacaatgaactgtggacctttggatcctcctaagcctcctacattgtttgaacctgttgatagtggagttcaggtgaatgaaaatagaccttccatatccttagtggagtttcttgcagcaaggaatgctagctcttgtaagaatggtacttctgaggcatgccttggtaatggtgatgctgaaaagctgtcatttgagagaaaatcagctggagctggtaaaaactcgaaaaatatcagtcaacttctagtgaagaaagctcttgaggctgatgtggacgagagaaatcttttgtccagcatacccattggggcaaaatttgaaggatcaagcagtcttgaccccagaactagtgggcacgatattaataatacaaaggaagctgtctcagataaggaatgtggcctgaaggatacagagaatggatttaggctctcttcgaggatggactctatattttctcagtatcatgctacagattccaagaaaaaattggttgagaacagcagtttggactggagtctagatgagagtttctcaaaacagaatggggaacattcctggtcaagtttgagtagtatggagtcgtttagtcgagcacctgccagagaacctgttgtttcagggaatgacacatcaggaaattacgcggaagaacttcttgcaggcattggagatcgtcctgttgcaacacatatttttgtggaagagctccaaaaggtttctgatgatttgctttatgagtttaaggatgacatgctaggcatgacctccgcagcaaagggtacaaataagagcagcctgtcccttgaagtcttgcttgctgaatcatctgattctgaagcacaaatttctgatctggagggtattgacagtggttctggtattggctcagctcaactgtttagtacactctcatcttcagatgacgatgcttctgctgcagacgagcctttagttgatgttgctgacctgagtacaccatcagagccatatacttctgcccccaatgagcctctggttgacgtggctgacctgacaaacccttcggtgaatgagccttcggctgatgtggttgatctgctacatacttcaaacgagccgttcgacagtttgaatgatatgccaaaccctccagagatgtcttttggtgggagcagtggagaacatgctgacagtcttatataa

SEQ ID NO: 1566 - protein, 1161 aa, Sorghum bicolor
MATSGSGGNEPGGRPWTATSTWVPGPAGGAVEDAVSFETSDDDAEASPAGVVLCHPPADSDRDMTPCPCEVTVSFRGKYEIHRVYVRSTARIYELYHSPDPKGASKDYLCTVRCGLAVKEPQPCGEESMSQWTGSASNSDKREHEAKSVSSGSDEDNWVDVKIPESPAGNKTLESQERNAIRTCQENTLAHYEATAEMTDVNPCVSLTIRFLSLQSKASVHIEEIYIFADHVESTSDVSVRGPGNMGGSSLLAMLVPGLMQMSKSRNLKIDDSYFSDGSRNQESSTCKRVTQEAVLCSTNDSKYTSVGIESAMSPTVGVTVSDEKNSQGEFQFKDPDSLPLPVQTLGSTQASSVKDQRELNTGHVGNPLLKENFIPYNHIERKLDTLLSKVEKMELCCSRFENSMIKPLGSIEARLQRLEEQFSSFSMDIQSLRGSSAFRSATDGMSNTMRSQEEAHNDANDNSISTTDRKPGLAVRAPDFMSDDYCGYNVITNGNHVSFRGPSVVPRLLVKATDFIAQPELTDASLHDGSASEKEHKTSPGLVVKVPEFPDDDDDDDDDDDDDDDDGEDNDYDNDDVEEKKQAEVCGDGDDHIWSDDTLRKSTAGDTNSKKPVSINGALASALEALLTSTKGTSSLKPAVCTSSNLGAENINDSFSCSLSPGKTGKMPTKDGSADQFLGTSGDANLVGAIMSSQDIDTTPSNSLSNEMLDSKVEINEQNDDLSTEKVAFVAITEPLDVPSRTDTIEESIDDASCVNRQSNGPNLDTMNCGPLDPPKPPTLFEPVDSGVQVNENRPSISLVEFLAARNASSCKNGTSEACLGNGDAEKLSFERKSAGAGKNSKNISQLLVKKALEADVDERNLLSSIPIGAKFEGSSSLDPRTSGHDINNTKEAVSDKECGLKDTENGFRLSSRMDSIFSQYHATDSKKKLVENSSLDWSLDESFSKQNGEHSWSSLSSMESFSRAPAREPVVSGNDTSGNYAEELLAGIGDRPVATHIFVEELQKVSDDLLYEFKDDMLGMTSAAKGTNKSSLSLEVLLAESSDSEAQISDLEGIDSGSGIGSAQLFSTLSSSDDDASAADEPLVDVADLSTPSEPYTSAPNEPLVDVADLTNPSVNEPSADVVDLLHTSNEPFDSLNDMPNPPEMSFGGSSGEHADSLI

SEQ ID NO: 1567 - DNA, 1353 bp, Sorghum bicolor
atgagagagatcatcagcatccacatcggccaggccgggatccaggtcggcaacgcctgctgggagctctactgcctcgagcacggcatcgagcccgatggcaccatgcccagtgatacctcggttggcgtcgcacatgatgccttcaacacgttcttcagtgagaccggttccggcaagcatgtgccgagggctattttcgtcgaccttgagcccactgtcattgacgaggttcgcactggctcgtaccgccagctcttccacccagagcagctcatctcggggaaggaggatgcagctaacaactttgcccgtggccactacactgttgggaaggagattgtcgatctatgcctggaccgcgtgcgcaagcttgcagacaactgcactgggctgcagggattcttggtgttcaatgctgttggtggtggtactggctctggacttggttcactgctactggagcgcctttcagttgattatggcaagaagtctaagctcggtttcaccatttatccttccccacaggtgtcaacagctgttgtagagccatacaacagtgtcctctcgacccactccttgcttgagcacactgatgttgcagtcctcctggacaacgaggctatctatgacatatgcaggaggtcccttgacatcgaaaggccaacctacaccaacttgaacaggttgatctcacagatcatatcatcacttaccacctccctgaggtttgatggtgctatcaacgtggatgttactgagttccagaccaaccttgtgccgtacccacgtatccatttcatgctttcctcatatgcccctgtaatctctgctgagaaggcctaccatgagcagctctctgtgcctgaaatcaccaatgctgtttttgagccctcaagcatgatggccaagtgtgacccaaggcacgggaagtacatggcttgctgcttgatgtaccgtggtgatgttgttcccaaggatgtcaacgctgctgttgcaaccatcaagaccaagagaactgtccagtttgtggactggtgccccactggattcaagtgtggcatcaactatcagccaccctctgttgtccctggaggtgacctggcaaaggtccagcgtgccgtgtgcatgatcagcaacaacactgccgttgccgaggtgttctcacgcattgaccacaaatttgaccttatgtacgccaagcgcgcattcgttcactggtacgtcggtgagggtatggaagagggtgagttctcagaggcccgtgaggacttggctgctcttgagaaggactatgaggaagtcggcgcagagggtgcagatgacgagggtgacgagggcgatgactattga

SEQ ID NO: 1568 - protein, 450 aa, Sorghum bicolor
MREIISIHIGQAGIQVGNACWELYCLEHGIEPDGTMPSDTSVGVAHDAFNTFFSETGSGKHVPRAIFVDLEPTVIDEVRTGSYRQLFHPEQLISGKEDAANNFARGHYTVGKEIVDLCLDRVRKLADNCTGLQGFLVFNAVGGGTGSGLGSLLLERLSVDYGKKSKLGFTIYPSPQVSTAVVEPYNSVLSTHSLLEHTDVAVLLDNEAIYDICRRSLDIERPTYTNLNRLISQIISSLTTSLRFDGAINVDVTEFQTNLVPYPRIHFMLSSYAPVISAEKAYHEQLSVPEITNAVFEPSSMMAKCDPRHGKYMACCLMYRGDVVPKDVNAAVATIKTKRTVQFVDWCPTGFKCGINYQPPSVVPGGDLAKVQRAVCMISNNTAVAEVFSRIDHKFDLMYAKRAFVHWYVGEGMEEGEFSEAREDLAALEKDYEEVGAEGADDEGDEGDDY

SEQ ID NO: 1569 - DNA, 1485 bp, Sorghum bicolor
atgtcgtcgaagagactacatggcgtgtttacccttcttatgctcatggttttcaatgtttcaggggcgtttgttggtatcactattggcaatgacatgtcgaacatgccaccagcaacagatatagtgtctatcctcaaagcaaagaagactcagcatgttcgcctgcttgattcagaccatcagatgttgactgcccttgcaaatactggaatagaagtgatggttggggttccaaatgatcagctacttcgtgtgggccaatctcgttccacagctgctgattggattaataagaatgtcgctgcttacactccggcaactaacataacatatattgctgtgggcaatgaggtccttactaccattcccaatgcagcacttgttctcgtacctgcactgcaattcctccagtcagcacttttggctgcaaacctcaatactcaagtgaaaatttcgagtcctcattcaatggatgtgatctcgaaggcgtttcctccctctgctgccactttcaattcgacatggagctcaataatgtctcagtatcttgagtttctcaagaatacgggatcttcgtttatgctgaatgcccaaccatactatggctatgtcggagggcaaggcgtattccccttggagtatgcactattccgctcacttaatccgaacagtcaaatttcagatcctaacaccaatctcttttataccaatatgtttgatgctataattgatgctacctacaactcaattcaagcaatgaatttcacggggattcctgttttagtcacagcttctggttggccatggcgtggtgggccaagtgagaaggctgctactgttgataatgctttggcctacaatacaaacctcatacatcatgtactgaacaattctggtactcccagccaaccaaataatcagtcaagcacctacatctttgagctgttcaacgaggataatcggtcagggcctgtatcagagcaaaattgggggattatgtttcccaatgcaaccactatatactctctatcatttgaggacgtggccacaactattcctgaatcgccagctttgcgtggggtgttttgtgtggcaaattcaagtgcaccccatagtgcactgaagcatagtttggattgggcatgtggccctggttctgcaaactgcagtgcaattcaacctgggcaaccatgctatgcatcagatgatattgtagctgtttcttcttatgctttcaacgattattaccacagaacacagtctagtggtggtacatgcaacttcaatggcaccgcaatgataacatcaactgatccaagccatggttcatgcattttcgctggaagcactggcgccagtggcagcaaaggtggaacggcctccgggcctgcaagcccggacagttttgcttcaaaatcccaatcatgctggttgattcacctagtagccacattgctgcccattctatttgtagtgatgtaa

SEQ ID NO: 1570 - protein, 494 aa, Sorghum bicolor
MSSKRLHGVFTLLMLMVFNVSGAFVGITIGNDMSNMPPATDIVSILKAKKTQHVRLLDSDHQMLTALANTGIEVMVGVPNDQLLRVGQSRSTAADWINKNVAAYTPATNITYIAVGNEVLTTIPNAALVLVPALQFLQSALLAANLNTQVKISSPHSMDVISKAFPPSAATFNSTWSSIMSQYLEFLKNTGSSFMLNAQPYYGYVGGQGVFPLEYALFRSLNPNSQISDPNTNLFYTNMFDAIIDATYNSIQAMNFTGIPVLVTASGWPWRGGPSEKAATVDNALAYNTNLIHHVLNNSGTPSQPNNQSSTYIFELFNEDNRSGPVSEQNWGIMFPNATTIYSLSFEDVATTIPESPALRGVFCVANSSAPHSALKHSLDWACGPGSANCSAIQPGQPCYASDDIVAVSSYAFNDYYHRTQSSGGTCNFNGTAMITSTDPSHGSCIFAGSTGASGSKGGTASGPASPDSFASKSQSCWLIHLVATLLPILFVVM

SEQ ID NO: 1571 - DNA, 1521 bp, Sorghum bicolor
atggcgctgcagctccagctgccgcggccgctcgccgccgcccggccctccgccctcctcccttcccgggaccatggcgcctccgcttccgcgaccgcccttcacgctcgcgccggcggcgtcgcgttctcgctccagaccaacgtgcgcctcctcaagcccaaccgccgcgtccgccgctcccgggacccctactacgacctagacgaggacgatgaggaggaggcggagttcgacgaagaggatgacgacgaaggttacgagagcgatgatgacatgtcgggtttggaatatcctggtgtactttattcaaacagccctcgtgcttcaagcaagagacaagaattggaacctccactggtaaaagaaaactgggaaggaagacaacccaaaactcgtgataactacggcagtccaggaaaaagtaagtccctgtatcctaggagtaaagtgggacgatcatcaatggatcttaagaacatggatagtgaagttgagttgaaaaatgcaagtatctctcgaagtctgttccagaaactacaagaagattatgactttgatgacaaatggttaccgctgattgattacttgtgcacatttggactaaaggagtctcattttacttacatctatgagagacacatggcctgctttcaaatcagtcaggcttcagcagaagaaaggttggatttcctgctaagtgctggggttaaaagcaaggatatgaagaggatactggtcaggcagccacagattctggaatacacccttggcaatctgaaatcccatgttgattttctcgtaagcattggagttccgaatacacgaataggacaaattatttctgctgctccttcgatgttctcttacagtgtggagcactctctgaagccaacagtaaggtatctgattgaggaagttggtattgaggagagtgatgttgggaaagtagtgcagctaagcccacagattctggtgcagaaaattgatagtgcatggaaatctcgatcgcttttcctgacaaaagaactgggcgctcccaaagatagcatagttaagatggtcacaaaacaccctcagctgcttcactacagcattgaggatggaatcttacctcgaataaatttcctgagaagcattggtatgagaaacactgacattctcaaagtattgacaagtcttactcaggtgctatctttgtcattggaggaaaatctcaagccaaagtatctttacttggtcaatgaactcaagaatgaggttcaatccttaacgaaatatcctatgtatctgagcttgtctcttgatcagaggatccgtccccgccaccgttttctggtttcattgaagaaagctccaaagggtccatttcctctgagctcctttgtgcccacagatgagcgtttttgccagaggtgggctgggactagcttggagacataccatacattcagacagaggttgctgctaacaggttttgcagagaagtctggaaggaaaacactagtctcaagacggtag

SEQ ID NO: 1572 - protein, 506 aa, Sorghum bicolor
MALQLQLPRPLAAARPSALLPSRDHGASASATALHARAGGVAFSLQTNVRLLKPNRRVRRSRDPYYDLDEDDEEEAEFDEEDDDEGYESDDDMSGLEYPGVLYSNSPRASSKRQELEPPLVKENWEGRQPKTRDNYGSPGKSKSLYPRSKVGRSSMDLKNMDSEVELKNASISRSLFQKLQEDYDFDDKWLPLIDYLCTFGLKESHFTYIYERHMACFQISQASAEERLDFLLSAGVKSKDMKRILVRQPQILEYTLGNLKSHVDFLVSIGVPNTRIGQIISAAPSMFSYSVEHSLKPTVRYLIEEVGIEESDVGKVVQLSPQILVQKIDSAWKSRSLFLTKELGAPKDSIVKMVTKHPQLLHYSIEDGILPRINFLRSIGMRNTDILKVLTSLTQVLSLSLEENLKPKYLYLVNELKNEVQSLTKYPMYLSLSLDQRIRPRHRFLVSLKKAPKGPFPLSSFVPTDERFCQRWAGTSLETYHTFRQRLLLTGFAEKSGRKTLVSRR

SEQ ID NO: 1573 - DNA, 1644 bp, Sorghum bicolor
atggctgacactccaacttcccgcatggtgcacccctttggcgacgtcccaaggcagactcccaagcagttcctgtattctggtaactcacagcacctctgttatccataccagtcagcttcggacacccatgtcgtgccgcagcgtcattgcaccatgaggtctcattcaccagatgctggctctgaagaccatgataatcacaagcagtacacactggactcctcagcaacttctggttgttcaaggcatgattctccctccagtcaaagtgtccatgctgggagtggcagccctgtatctcttgaagacagccactctggctctacaaatggcaatggatcacctgtgagtgcatcgtgtgtcactgaggaccctactgatctcaagcagaaactgaaggatcttgaggctgcaatgctgggtacagacccagagatcgtcaacagtctcgagatctccatagcagaccaactttcgttggagcccgaggagtggaagcacatgatgagcatgcccggagggaacctgaaggagctgctgattgcctgcgctagagcggtggaatataacaacagctacgccattgatctgatgatcccagagctgaggaagaaggtttcagtgtctggtgaaccacttgagaggctgggagcctacatggtggaaggtcttgttgccaggctcgccgcctctggcagctcaatctacaaagctttgaagtgtaaggagcccaggagttctgatctcctctcctacatgcacttcctgtatgaggcctgcccctacttcaagttcggctacatgtcagcgaacggcgcaatcgcagaggctgtcaagggagaagacaggatccatatcattgacttccacatcgctcaaggggctcagtggatctctctccttcaagcccttgcagccaggcctggcgggccaccgttcgtgaggatcaccggcattgatgattcagtctcagcttacgcccgaggcggtggtctggagttggttggcaggaggctgtcacacattgctggcctctacaaggtgccatttcagttcgacgcagtcgctatctccagcagcgaagtggaggaggggcatctcggcatcgtccctggcgaagccgtcgctgtcaacttcaccctggagctgcaccacatccccgacgagaccgtgagcacggcgaaccaccgagatcggatcctgaggctggtgaagggcctgtcgcccaaggtgctcacgctggtggagcaggagtccaacaccaacacggcccccttcgcgcagcggttcgcggagacgctggactactatactgccatcttcgagtccatcgacctggcgctgccgagggacgacagggagcggatcaacatcgagcagcactgcttggctcgggagatcgtgaacctggtggcctgcgagggcgaggaacgggtggaacggcacgaggtgttcggcaagtggaaggcgcggctgatgatggccgggttcaggccgtccccgctcagcgcgctggtcaacgccaccatcaagacgctgctgcagagctactcgccggactacaagctcgccgagagggacggcgtgctctacctcgggtggaagaacaggcccctgattgtctcgtcggcatggcactag

SEQ ID NO: 1574 - protein, 547 aa, Sorghum bicolor
MADTPTSRMVHPFGDVPRQTPKQFLYSGNSQHLCYPYQSASDTHVVPQRHCTMRSHSPDAGSEDHDNHKQYTLDSSATSGCSRHDSPSSQSVHAGSGSPVSLEDSHSGSTNGNGSPVSASCVTEDPTDLKQKLKDLEAAMLGTDPEIVNSLEISIADQLSLEPEEWKHMMSMPGGNLKELLIACARAVEYNNSYAIDLMIPELRKKVSVSGEPLERLGAYMVEGLVARLAASGSSIYKALKCKEPRSSDLLSYMHFLYEACPYFKFGYMSANGAIAEAVKGEDRIHIIDFHIAQGAQWISLLQALAARPGGPPFVRITGIDDSVSAYARGGGLELVGRRLSHIAGLYKVPFQFDAVAISSSEVEEGHLGIVPGEAVAVNFTLELHHIPDETVSTANHRDRILRLVKGLSPKVLTLVEQESNTNTAPFAQRFAETLDYYTAIFESIDLALPRDDRERINIEQHCLAREIVNLVACEGEERVERHEVFGKWKARLMMAGFRPSPLSALVNATIKTLLQSYSPDYKLAERDGVLYLGWKNRPLIVSSAWH

SEQ ID NO: 1575 - DNA, 1647 bp, Sorghum bicolor
atgcctgcgcctgccgcacccgtaaccgccaggctgaagcgggaagactgcccccgcaccaagcacgactccctcttctccccatggaaggttcttgtcgggccgtcggactggaaggaccacgctgccggcaaggagggggtccagaggtaccgcatccgcaacctcccggacaacttccccggtctctatgagctaggcgttgccggcgcggccgatgagggcgtcaggacccggaggcgtgacgcgcgaggcgtcgtcgtggtgtacctcgggcaggccgacagtgtccgggcgaggctgcagcagtatggccgctcggggtcgcatctggacactgcaaattcgctgggctctgctggtaaagatgcggtgaatgcgctcgccgcgggtcctggactgttcagagaagtgttctccagaggctactccgtcgtgtttcgatgtgcactgatggacaataaacaagaagctgagaagactgaagcactactgttgagagtatttgattatgcatggaacaaacttcagaatggtgcttgtcgccgggaagaaatactgcacaagttagaactgcaagcagccaaccatagatctctacttagcagagtaagtgacatgaaacaaaaaatatttggagagaaagcaggtataaagataaagggaagtgggtctgctaacacctcgcctggcataattaaaagtatgctcccaagggttcgtactattgttcgtttcagacctcaggtacttaactctgaggacaatgaaggtgagatgactgatattccctggaagaaaatatctgatattccgtatgcaaatagacaagcacatagaaggaggtccgaaggatacaaagtaaaaaagattgatgttacaaaacggagaaccgtgccgatacaggattctaactctgtttgtggagtggtgctggaagatggttcttcttgtctggagcacccagttcatggaagaaagaggtgcagcttacacaaaggtaaaagagtcaaaggcagcccaaaaagttcacctactagctatccttgccaagttgagattgcaactactgagttcgtaccttgcctaactgaagatttggacaactcagtcccaaaacaagaaagcgaaatactgcccaaaaatatgtctataactctgaaggaacctttgaggcaaagcaatagcttcgaatcagaaaaggtgaatactggagaagcttctacagaagatggaacatgtgaaatctccaaggatgcttgtgccttagaagagaaggcttgccatgctgaatctgagtctaaggagcagcagccttctgggagaatgtggtttgagctgctcaaatcacagacgaaatcggcgagcacacattcatcaagaggctcaggatctcagataacagtaatgacagataaaaggccttgcaaaatggtgtcaattgcagaaatggaaaggtgtgagaaggacagtggaatagaggtcactgttgcttcgttttccagaagctcaggatggccgtgtacctgtggcgcccatacatcagacggttcaccttgtatgaataggccggttgaagggaggaagagatgtgcattgcacaaagggcaaagagcagcattcctccctacatcattggtacaatag

SEQ ID NO: 1576 - protein, 548 aa, Sorghum bicolor
MPAPAAPVTARLKREDCPRTKHDSLFSPWKVLVGPSDWKDHAAGKEGVQRYRIRNLPDNFPGLYELGVAGAADEGVRTRRRDARGVVVVYLGQADSVRARLQQYGRSGSHLDTANSLGSAGKDAVNALAAGPGLFREVFSRGYSVVFRCALMDNKQEAEKTEALLLRVFDYAWNKLQNGACRREEILHKLELQAANHRSLLSRVSDMKQKIFGEKAGIKIKGSGSANTSPGIIKSMLPRVRTIVRFRPQVLNSEDNEGEMTDIPWKKISDIPYANRQAHRRRSEGYKVKKIDVTKRRTVPIQDSNSVCGVVLEDGSSCLEHPVHGRKRCSLHKGKRVKGSPKSSPTSYPCQVEIATTEFVPCLTEDLDNSVPKQESEILPKNMSITLKEPLRQSNSFESEKVNTGEASTEDGTCEISKDACALEEKACHAESESKEQQPSGRMWFELLKSQTKSASTHSSRGSGSQITVMTDKRPCKMVSIAEMERCEKDSGIEVTVASFSRSSGWPCTCGAHTSDGSPCMNRPVEGRKRCALHKGQRAAFLPTSLVQ

SEQ ID NO: 1577 - DNA, 2175 bp, Sorghum bicolor
atgattcccatctcgataaaggtttctttggactttgttaaaagtctgtatgcaaagttcatagattgggacgaggatatgtatgacctggaaaacgacatacctgcccatgcagcaaacacagcaattagtgaagacttggggcaggttgaatatattttgacagataaaactgggacattgactgagaacaagatgatcttcagaaggtgctgtattgggggcaccttttatgggaatgaatctggagatgcgctcagagatattgaattactgaacgctgtcgccaataattctcctcatgtcatcaagtttttgaaagtcatgacactctgcaatacagtaattcctataaaaagtcctagtggatcaattttgtataaagcccagtcccaggatgaggatgctctggttaatgcggctgcaaatttgcatatggttcttgtcagcaagaatggaaacaatagtggacaaaagacaaagacgtttgttgatgcagttgacaaatatgctcagctggggttgcgcacactctgtttgggatggcgtgagctggaaccagaggaatacactaaatggtctcaatcatttaaggaggctaatagctcgttgaatgacagggagtggaaagttgctgaggtttgccaaaggttagaacatagcttggagattctaggtgtcagtgcaatagaagatcgcctccaggatggggtaccagaaactatcgaaatactgaggcagtcaggaatcaacttctggatgttaactggtgataaacaaagtactgccattcaaattgctctattgtgcaacttgatttcttcagaacctaaagggcagctcttgcatatcgatgggaaaactcaagatgaagttgctagaagcttggaaagagttcttcttaccatgaggattacgtcatcagagcctaaggagctggcttttgtagtggatggctgggcactagagattattctgtcacactatactgaagcttttactgaactagcagttctttcaaaaactgcattatgctgtcgtgttacaccttcacaaaaagctcagctagtgaagcttctaaagtcatgtgactatcgaactttggcaatcggtgatggtgggaatgatgtaaggatgatacaacaggctgacattggtgtaggaattagtggtagggaaggtcttcaagctgcaagggctgctgactatagcattggcaaattcaggttcctgaaaaggctgattcttgtccatgggcggtactcctacaatcgcactgcctttctttcgcagtactctttctacaagtcattgttaatttgctttattcagatacttttttcttttctttcaggcattgctggaacaagtttattcaactcagttagtttgatggcttataatgttttctacacaagcattcctgttttaactactgtactggacaaggatttatctgaaaagacagtgatgcaaaatccagagatattactttactgccaggctggaaggcttctcaatccaagtacctttgctggttggtttggtcgatcgttgtatcatgcaatcgttattttcttaataaccatccatgcatacgctaatgagaaaagcgagatggaggagctctcaatggttgcactctcaggaagcatttggttgcaggcatttgttgtgacattggagatgaattccttcacatttctgcaacttctggccatatggggaaacctcattgccttctatgtcctcaacttttttatcagcagtatacccacttctggaatgtacaccgttatgttccgcctttgcagacaaccgtcatactggataacgctggtgttgatcagtggagttggaatgggtcctgtattagctctgaaatatttcagatatacatacagacctagcgcgatcaacattcttcagaaggccgagcgctcacgggggccaatgtacaccctgatgaatctggagtctcaactgagaccagataaagataatatgatgatagccagttccacagcgccagccaagaataagagctctgtttacgagcctttgctttctgactcaccgatggcatccaggagatcccttgcaccatcttcatttgacatcttccatccagcacattcgagaacatctcaccctagaaatatcaaagccaattga

SEQ ID NO: 1578 - protein, 724 aa, Sorghum bicolor
MIPISIKVSLDFVKSLYAKFIDWDEDMYDLENDIPAHAANTAISEDLGQVEYILTDKTGTLTENKMIFRRCCIGGTFYGNESGDALRDIELLNAVANNSPHVIKFLKVMTLCNTVIPIKSPSGSILYKAQSQDEDALVNAAANLHMVLVSKNGNNSGQKTKTFVDAVDKYAQLGLRTLCLGWRELEPEEYTKWSQSFKEANSSLNDREWKVAEVCQRLEHSLEILGVSAIEDRLQDGVPETIEILRQSGINFWMLTGDKQSTAIQIALLCNLISSEPKGQLLHIDGKTQDEVARSLERVLLTMRITSSEPKELAFVVDGWALEIILSHYTEAFTELAVLSKTALCCRVTPSQKAQLVKLLKSCDYRTLAIGDGGNDVRMIQQADIGVGISGREGLQAARAADYSIGKFRFLKRLILVHGRYSYNRTAFLSQYSFYKSLLICFIQILFSFLSGIAGTSLFNSVSLMAYNVFYTSIPVLTTVLDKDLSEKTVMQNPEILLYCQAGRLLNPSTFAGWFGRSLYHAIVIFLITIHAYANEKSEMEELSMVALSGSIWLQAFVVTLEMNSFTFLQLLAIWGNLIAFYVLNFFISSIPTSGMYTVMFRLCRQPSYWITLVLISGVGMGPVLALKYFRYTYRPSAINILQKAERSRGPMYTLMNLESQLRPDKDNMMIASSTAPAKNKSSVYEPLLSDSPMASRRSLAPSSFDIFHPAHSRTSHPRNIKAN

SEQ ID NO: 1579 - DNA, 921 bp, Sorghum bicolor
atggaggccgtgcgcgcgtcggcggcgtgggtcgccagtcgctcctcccatgtcacggttgacctgcaagaaattgagaaggtagtggaccaaatcaagggagatgttccaaaagttgagtgggatttcgaaggaatccactactttgacaatgggccacttacagtccagtaccttttcgtcttggatgcacttaacttctgcttctggccagataaggacttgagctatgaccatttggcttctggactgaagttagccttggagaaagacaaaaatgcccttgattcagatcgtcttcagaattacactggcccccagctccgccaacttctgaactggccacgaccactgccaattgaggaggaaagagtacgccttctccatgaggttggactggaaatggaaagaagctttggaggccaggctgctagtctagtgaagtctgctggaaactctgctgcaactcttatcgaactgattactcgacattttcctggtttccgggatcattccctttacaagggacaccaggtttttttgtacaagagagctcagatctttgttgctgatttgtggggcgccttcaagggacaaaactatggcgagttccacgacatcaattccatcaccatatttgctgactacattgttccagccgtgctgagggagcttggcatactcaaatatggctcgaatctatcttgctcgatcgattcgaatagtgagatagtgcctggaagcgaggaggaagtggagatacgcgcgtgctccatctatgcagtggagaagatgagggatctgattggcaaaaagtttggaaagcagcttctgagcattgacattgatctctggctctggtcctgcggcgtgcagaacatggcgctgtcacatcaccgcaccctgtcgatttactactag

SEQ ID NO: 1580 - protein, 306 aa, Sorghum bicolor
MEAVRASAAWVASRSSHVTVDLQEIEKVVDQIKGDVPKVEWDFEGIHYFDNGPLTVQYLFVLDALNFCFWPDKDLSYDHLASGLKLALEKDKNALDSDRLQNYTGPQLRQLLNWPRPLPIEEERVRLLHEVGLEMERSFGGQAASLVKSAGNSAATLIELITRHFPGFRDHSLYKGHQVFLYKRAQIFVADLWGAFKGQNYGEFHDINSITIFADYIVPAVLRELGILKYGSNLSCSIDSNSEIVPGSEEEVEIRACSIYAVEKMRDLIGKKFGKQLLSIDIDLWLWSCGVQNMALSHHRTLSIYY

SEQ ID NO: 1581 - DNA, 483 bp, Sorghum bicolor
atgtcggactcggaggagcaccacttcgaatcgaaggccgacgctggtgcgtccaagacttacccgcagcaggctggcaccgtccgcaagaacggcttcctcgtcatcaagggccgtccctgcaaggttgtggaggtttctacctcaaagactggtaagcacggccacgccaaatgccactttgttgccatagacatattcaacgggaaaaagcttgaagatattgttccttcttcacacaactgtgacattccgcatgtgaaccgtactgagtatcagctgattgacatatcagaggatggatttgtgagccttcttacttcagatggcaacactaaggatgatcttagactcccaactgatgagactcttgtggcccagattaaggaaggttttgaaagtgggaaggatcttgttgtgactgtccagtctgctatgggggaggagcagatctgcgccctgaaggatattggccccaagtaa

SEQ ID NO: 1582 - protein, 160 aa, Sorghum bicolor
MSDSEEHHFESKADAGASKTYPQQAGTVRKNGFLVIKGRPCKVVEVSTSKTGKHGHAKCHFVAIDIFNGKKLEDIVPSSHNCDIPHVNRTEYQLIDISEDGFVSLLTSDGNTKDDLRLPTDETLVAQIKEGFESGKDLVVTVQSAMGEEQICALKDIGPK

SEQ ID NO: 1583 - DNA, 624 bp, Sorghum bicolor
atggcatcagtcactgcaaataaagatcaccagtatatctatgagatactgttggcatctggtcttttgcacaaagaacatagtatcgcagtattacctggtcaactccaaccatcaaattatccaatcaatccggagctcttcctcattcttgagcaaacaaaaccagacttagtttctgccttccaaactgtcagcggagctaagaaaagttgtaagccttgcacagggaggcttcatcgaagacttgtgtttgacctggtaaatgaaacaatagctcagaagatgagcgtctgtagatctggaaggcagacagtaaagtttcttcaatcaaggaagttaagtgggtggcaactattcaaggatttgtgcactgaggttgacaggctaataaaatgctccgacgaggaggagaatgaaaacatgatatttgatgaggatacagttaatggaacgaaagactggatgagcttcgacactgtgctacatggcatggtttgggaaattgaacgatccatcttcaagggccttatcgacgaggtcatcggtggtgagactacagagaagatgcaatttgtacaaaggaaactgcagaggcagctttctttcagtagtataaactga

SEQ ID NO: 1584 - protein, 207 aa, Sorghum bicolor
MASVTANKDHQYIYEILLASGLLHKEHSIAVLPGQLQPSNYPINPELFLILEQTKPDLVSAFQTVSGAKKSCKPCTGRLHRRLVFDLVNETIAQKMSVCRSGRQTVKFLQSRKLSGWQLFKDLCTEVDRLIKCSDEEENENMIFDEDTVNGTKDWMSFDTVLHGMVWEIERSIFKGLIDEVIGGETTEKMQFVQRKLQRQLSFSSIN

SEQ ID NO: 1585 - DNA, 846 bp, Sorghum bicolor
atggaaagggaatcgtctaccacatatgagccaaaaaggaactgtgaaataagggtttttgagagttcagatgaaatttcaacagatcttgctgagtatatctcgcaaatttcagaaatttctgtcaaagaaaggggatactttgccatcgccttatctggtggtcccctagtcagttttttggggaaactttgtgaagcaccatacaacaagaccctggactggtccaaatggtacatcttctggtctgatgaacgtgccgttgcaaaaaaccatgcagagagtaactataagttaacaaaagaaggatttattgccaaggtacctattccgcatggccatgtctactccataaatgacaatgccacagtggaggatgcagcaacagactatgaattcatgatcaggcagctggttaaggtccgcacaataggagtctcagagagaaacgactgtcccaagtttgatctcatcctccttgccatgggcgctgatgggcatgtggcctcacttttcccgaaccaccctgccatggagctgaaagacgactgggtcacctacatcactgactccccgcagcctcctcctgagaggatcaccttcactctcccagtaatcaactcagcatccaacatagcaatagtgtccaccggtgatgacaaagcaaatgctgttcacttagcagtttctgacacgactgaaggtcctgatgctcctacatcactgcctgctagaatggtccagccaacggacgggaagctggtgtggtttctggacaaggaggcggcatcatcccttgagtccatgaacgacgacgatgcttccttcgaccgtcatgagtactaa

SEQ ID NO: 1586 - protein, 281 aa, Sorghum bicolor
MERESSTTYEPKRNCEIRVFESSDEISTDLAEYISQISEISVKERGYFAIALSGGPLVSFLGKLCEAPYNKTLDWSKWYIFWSDERAVAKNHAESNYKLTKEGFIAKVPIPHGHVYSINDNATVEDAATDYEFMIRQLVKVRTIGVSERNDCPKFDLILLAMGADGHVASLFPNHPAMELKDDWVTYITDSPQPPPERITFTLPVINSASNIAIVSTGDDKANAVHLAVSDTTEGPDAPTSLPARMVQPTDGKLVWFLDKEAASSLESMNDDDASFDRHEY

SEQ ID NO: 1587 - DNA, 486 bp, Sorghum bicolor
atggagagggagcctgtcgagggggcggaagaggaagaggaggaggtggcgtgcgagtgctgcggcttcacggaggagtgcacggcgccgtacatcgctggcgtgcgcgcgcggtacggcgggcggtggatctgcggcctgtgcggggacgcggtgggcgaggagctcgggcgcgcgtcccctcccatctcccccgccgaggcgctggaccgccacgcctgcgtctgccgcggggcgtccgcgccgccgtcgcccgcgggcagccccgacgacctcatcgccgcgctgcgcctgctcctgcgccgcaggctcgggtccccgccgccgcccacggcgcccaggaaggcgcgctccacgcccagcagccccaggcgcgacgcctcccccggcggcatctccgtcgtcgcggccgtggccgtggccaacgggggtcccgggagctcgctggcgcgtaccgggagctgcttcgccgcgctcgtcgaatga

SEQ ID NO: 1588 - protein, 161 aa, Sorghum bicolor
MEREPVEGAEEEEEEVACECCGFTEECTAPYIAGVRARYGGRWICGLCGDAVGEELGRASPPISPAEALDRHACVCRGASAPPSPAGSPDDLIAALRLLLRRRLGSPPPPTAPRKARSTPSSPRRDASPGGISVVAAVAVANGGPGSSLARTGSCFAALVE

SEQ ID NO: 1589 - DNA, 708 bp, Sorghum bicolor
atggcggcgtccgcgaggccaggggagagagcgaccagcttcaccgtcgcgtgcagcctcctcagccgcttcgtccgccagaacggcgccgcggctgccgagctaggcctcgggatcaaaggcgaggtcgagcagcagaggacgccggcgacaattagcttgctccccggagcggagggcgaggaggccgagaggacgaaggagaccatggagctgttcccgcagagcgccgggttcggcgtcaaggatgctgctgcccctagcgagcaagaaaataaagagaagcctaagcagctcaccatcttctatggcgggaaggtgctggtgtttgacgatttccctgccgacaaggcaaaggacctgatgcagctggccagcaagggcagccttgtggtacagaacgttgttttgcctcaaccttctgcacctgctgctgtcaccgacaaggccgtgccggccccggtcatcagcttgtctgctgctcaggctgatgctaagaagcctgctcgcacaaatgcttctgatatgcctattatgaggaaggcgtctcttcaccgcttccttgagaagagaaaggatcgtctcaatgcaaagacaccatatcagacttctccttcagatgcggcgccagtcaagaaggagcccgagagccaggcatggcttggattaggaccgaatgccgtgaagtccaacctgagcctgagctag

SEQ ID NO: 1590 - protein, 235 aa, Sorghum bicolor
MAASARPGERATSFTVACSLLSRFVRQNGAAAAELGLGIKGEVEQQRTPATISLLPGAEGEEAERTKETMELFPQSAGFGVKDAAAPSEQENKEKPKQLTIFYGGKVLVFDDFPADKAKDLMQLASKGSLVVQNVVLPQPSAPAAVTDKAVPAPVISLSAAQADAKKPARTNASDMPIMRKASLHRFLEKRKDRLNAKTPYQTSPSDAAPVKKEPESQAWLGLGPNAVKSNLSLS

SEQ ID NO: 1591 - DNA, 1626 bp, Sorghum bicolor
atgacccaggccaaggaaagcaacggaacaaccgtaccagccatatgcttcaacgccaaaccatgcacatgttccagcagctccgaccaggatcagagggcaaggtacacctggaacactactttccagcagatgaaccagggccttctgttccaccgcgacaacgaatcggtcaccttacaaccaggcagcctgggctactacatggggaattcctctcagctagggttcaacttgacagatcctggctggtttgtcatccctaaatggtttgatccatggaaaatgagcagtggcgatgataggatcgacttgcaggaagcatccttcagcatcgtcttcacgttgagcgtactcttgcagctccacacctggaacttcaccatagatgtcccggtgactgaacagtcacaagggcctaatactgccaccatagtgtcttctgttgtcggatcagcagctgctacagccgctattgctgccgttgtgtacttctacttgaactccaagtacaggaggtggaagaaagaccttgacaagctcgccaagaccatgcagagcctccccggtgtgcctatgcaggttgactttgctgacataaaaaaggccaccaacaacttccacgagaccatgaggctaggccaaggcggattcggcacagtttacaggtgcaaacttcctgcaccaaagaagggagagctcatagaggttgccgtcaagaagttcactcgggctgataaccggggatatgaagacttccttgccgaggttagcatcatcaaccgcctccgtcacaaaaatatcgttcctctcgtcggagagcccattcttatctatgagtacatgcccaatggtagcctggaccaacatctgttccgtagaagcggtgatgagcaacggcaagctatttgtatgagtcagtggggcactcgctacaacctggtcaaggatatcgcgactgggttacagtatgttcaccatgagtacgagcctatggtgctccaccgtgacatcaaggcgagcaacatcatgatcgatttcaactttcaaggacggcttggagactttggcctcgcctgcatattggccaatggcaaggactcctacactgactatggcgcccctggaacccttggcttcagggcgcctgagtatgtgtacaacggcaaggccactaggaagacagacatctttgcctttggagtgcttgtccttgagattgttacaggaaagagggcagttggcaaagatgtgcagtttggacatgttacagactgggtctggaaacttcatgcggagggcaacctacttgctgctgttgatgttgtgctcaccgccaccagtgagttcgatgccgatgaggccatacagctactgcagcttggcatggcgtgcagtagcccgaacccatctgatcggccaagcatgacggatgcggtgcagatcatcagcaagtcagtgccgccaccagacatacctctttccaagccaccgctcgtgtggccaccagaagggtgggggaacccgtcatcgacctccgattatagcacgttgtccactagtaacttcaacaccacctcgacattcatggttgagatgacggcgggcacagaacacacctcctga

SEQ ID NO: 1592 - protein, 541 aa, Sorghum bicolor
MTQAKESNGTTVPAICFNAKPCTCSSSSDQDQRARYTWNTTFQQMNQGLLFHRDNESVTLQPGSLGYYMGNSSQLGFNLTDPGWFVIPKWFDPWKMSSGDDRIDLQEASFSIVFTLSVLLQLHTWNFTIDVPVTEQSQGPNTATIVSSVVGSAAATAAIAAVVYFYLNSKYRRWKKDLDKLAKTMQSLPGVPMQVDFADIKKATNNFHETMRLGQGGFGTVYRCKLPAPKKGELIEVAVKKFTRADNRGYEDFLAEVSIINRLRHKNIVPLVGEPILIYEYMPNGSLDQHLFRRSGDEQRQAICMSQWGTRYNLVKDIATGLQYVHHEYEPMVLHRDIKASNIMIDFNFQGRLGDFGLACILANGKDSYTDYGAPGTLGFRAPEYVYNGKATRKTDIFAFGVLVLEIVTGKRAVGKDVQFGHVTDWVWKLHAEGNLLAAVDVVLTATSEFDADEAIQLLQLGMACSSPNPSDRPSMTDAVQIISKSVPPPDIPLSKPPLVWPPEGWGNPSSTSDYSTLSTSNFNTTSTFMVEMTAGTEHTS

SEQ ID NO: 1593 - DNA, 1788 bp, Sorghum bicolor
atgaggaagcgcctggagccccgtctcgtccggtccctggccaccgccaccgtctcgtccgcccacccgccgctcccatcgccctccttctcgtccccgaagccgccccgcaccgcggcgccgttcctcgccgtgctcttccgccggggccgcgcggacgccgcggcgctcctcaaccgccgcctccgcggggcgcccgtgacggaggcgtgctccctcctctccgcgctcccggacgtccgcgacgccgtctcctacaacaccgtcctcgccgcgctctgccgccgcgggggcgaccacctgcgccaggcgcgctccctcctcgtcgacatgtcgcgggaggcgcacccggccgcccgccccaacgccgtgtcctacaccacggtcatgcgggggctctgcgcgtcccgccgcacgggggaagccgtcgcgttgctccggtccatgcaggccagcggcgtccgcgccgacgtcgtcacgtacggcacgctcatccgcggactctgcgacgcctcggagctcgacgcggcgttggagcttctggatgagatgtgcgggagtggtgttcagcccaacgtggtcgtgtacagctgcttgcttcgtgggtactgcaggtccggcaggtggcaggatgtaggcaaggtgttcgaggacatgtcccgtcgggggatcaagccggatgtgatcatgttcactggtttaatcgatgacttgtgtaaagagggaaagacgggtaaggctgcaaaggtgaaggacatgatggtgcagcgggggctggagccaaatgtggtgacatacaatgtgctcatcaattccctgtgcaaggaaggatcggtaagggaggcactgacattgaggaaggagatggatgacaagggtgtggcaccagatgtcgtgacatacaataccctgatcgcagggctttctggtgtgcttgagatggatgaggcaatgagtttccttgaggagatgattcagggagatactgtagttgagcctgatgtggtcactttcaactcagttatacatggactatgtaagatcggtcggatgacacaagcagtcaaagttcgtgagatgatggccgagagggggtgtatgtgtaacttggtgacttacaactatctgattggtggattccttagggttcacaaggttaagatggctatgaatctaatggatgagctggcaatttctggattggaacctgattcgttcacctatagcatattgataaatggcttcagcaagatgtgggaagttgaccgtgcggaaaagttcctgtgtacaatgaggcaacgtgggataaaagctgaactatttcactacattcctctgcttgcagctatgtgtcaacagggaatgatggagcgagctatgggtttgttcaatgaaatggataagaactgtggactcgatgctatcgcatatagcacaatgatccatggtgcctgcaaatcaggggatatgaaaacagttaaacaattgattcaggatatgcttgatgagggtctggctcctgatgccgtgacatattctatgctaatcaacatgtatgcaaaattaggagacctagaagaagctgagagggtgcttaaacagatgactgcaagtggctttgtgcctgatgttgctgtatttgattctctgatcaaaggctacagcgctgaaggccaaacagacaaggttcttaaattgatacatgaaatgagagccaagaatgtagcctttgatccaaaaattatttctaccatcatccgcctccctcaacagacgccgttgctctag

SEQ ID NO: 1594 - protein, 595 aa, Sorghum bicolor
MRKRLEPRLVRSLATATVSSAHPPLPSPSFSSPKPPRTAAPFLAVLFRRGRADAAALLNRRLRGAPVTEACSLLSALPDVRDAVSYNTVLAALCRRGGDHLRQARSLLVDMSREAHPAARPNAVSYTTVMRGLCASRRTGEAVALLRSMQASGVRADVVTYGTLIRGLCDASELDAALELLDEMCGSGVQPNVVVYSCLLRGYCRSGRWQDVGKVFEDMSRRGIKPDVIMFTGLIDDLCKEGKTGKAAKVKDMMVQRGLEPNVVTYNVLINSLCKEGSVREALTLRKEMDDKGVAPDVVTYNTLIAGLSGVLEMDEAMSFLEEMIQGDTVVEPDVVTFNSVIHGLCKIGRMTQAVKVREMMAERGCMCNLVTYNYLIGGFLRVHKVKMAMNLMDELAISGLEPDSFTYSILINGFSKMWEVDRAEKFLCTMRQRGIKAELFHYIPLLAAMCQQGMMERAMGLFNEMDKNCGLDAIAYSTMIHGACKSGDMKTVKQLIQDMLDEGLAPDAVTYSMLINMYAKLGDLEEAERVLKQMTASGFVPDVAVFDSLIKGYSAEGQTDKVLKLIHEMRAKNVAFDPKIISTIIRLPQQTPLL

SEQ ID NO: 1595 - DNA, 747 bp, Sorghum bicolor
atggaagctcttgtggataagctgtgcaataggtttgctggagtaaatgatgtcagacagtgggagtatatctcttattgcctttctcagctaaccttcactgaaaagggcctgaaaaaactcatcgataattttaagatgtttgagcatgcattgtctgaagattctgtgatgaaccacttcagaagcgtaatatcaaagtgcaagaagtttgcgaaacctgagctaaaagtttgcattgaggaatttgaggagaaacttagcaaggttcatcaggaaaagaaagaacaggaggaaacaaccaaaaatgctgaggcacacagacagagaattggctcacttgatgaatttctggctactaaggaagttagtcagaacagtgggaattctactgaagaagaaactagcgaggtagttgatccttcggtggatagcagcaccgaacataaggagaacacaccagaatgcagtgaccatactaccgagaaagcaggaccggtcgggccacttgcgccatctcggagcgatccgatcgatccttttcgtcacctggaccaccgctcctcctacccaccgcagccgcagacgcgcctccacctccaagaatttgatcgcgcgctggcgggcgcgcggcacgagcacgactcggccccgctaccgcgacggcgacggcgacccccgtcgtgtgccctgctcctcccccgccgcacgttccccccggctcgtctgccaccactggttttctag

SEQ ID NO: 1596 - protein, 248 aa, Sorghum bicolor
MEALVDKLCNRFAGVNDVRQWEYISYCLSQLTFTEKGLKKLIDNFKMFEHALSEDSVMNHFRSVISKCKKFAKPELKVCIEEFEEKLSKVHQEKKEQEETTKNAEAHRQRIGSLDEFLATKEVSQNSGNSTEEETSEVVDPSVDSSTEHKENTPECSDHTTEKAGPVGPLAPSRSDPIDPFRHLDHRSSYPPQPQTRLHLQEFDRALAGARHEHDSAPLPRRRRRPPSCALLLPRRTFPPARLPPLVF

SEQ ID NO: 1597 - DNA, 1554 bp, Sorghum bicolor
atgaggaaccacaggcgttcttaccgccacctgagaagcctcattgctgtactggatactgtctttccggcggcgacccaggaccccaatttcttgcacagatcccttctcattgagggagtgtcgctgagggctactccttgtgatctgcttgacgaggcattgggccttcaggttgagggagctgttgttgttcgtgatgctgagtttggcgactctgttggactgctggtgctgacacatgctcatgacacggaggttgccatggcagcagggccacgcccaggagtattttgtgactgtatcaaggcgagcgacagtagttacacacgcttccagatcttggaggcccttgacgacagggtcagacggcaggctacagccgagctcttccggtcacttgtacccccagaataccttctcgcggatgcagccatgacgttccacttgagctgtgtgttcctcagaggcccagactgctccagcgagcatgcagtgtacaacctatgcaatattggtgccagggttcttcttgccaatggaccagtcaacgcggtgatccttgggccggatcacgatgttgccgtcctggtctactacgacgcccagggtacagagagaatcggcagaagggaaccacatttgcgccagaggcagctggggatgtacgactcatctctatttccactccctgccggcgcagctgccgaggaggcttcactggtgcggcgcctgctgccacccttcgtcacggccgctgattacctgggacgggtgattctactgacggagatcaacacgacgacttgtgacgctgaaaatatcgcgaggttcatcatactccaagcagagctacgtcatggattggaggcagtcatagtgcatagagctcttggggctgtgttcgtggtgctccagaggcagtctgactcggagttgctactacaggtgccccaggaagaatggttggcagtattcaagagtccggtggagcttcaactcctgcaggcgacgcccatgcagcagcagcagcagcagcagttggctccagtgcagcagtttgatttgagcagattgagcattggactgagacagtgggtgaaccccaaagcatttgagatcatgaggcttgggttcagagtggcattgacggagtgcccggatcacaacttcatggagctgactctcgggctgatgagactcgctgccctgtcacagcctcatgcacttcggcgcagctacttcccagacagagcagtgttgcttacagggacttgcatctacatgaaggaatgggatctgaggaccgcgctgagcaggtacggttcactggacgagttagtatatctgagacccaggaggatcgccctgatcatcttcacgtcttggactggggcaaccagactgctacgggagccagcagagacccggaggcgccggggttttggcgactgccgacctgcagcaccagatgctggcgttgccagttccattgcgaacacggtgttgcaggatctgctctccttacagagcaggctaccggcttactggtga

SEQ ID NO: 1598 - protein, 517 aa, Sorghum bicolor
MRNHRRSYRHLRSLIAVLDTVFPAATQDPNFLHRSLLIEGVSLRATPCDLLDEALGLQVEGAVVVRDAEFGDSVGLLVLTHAHDTEVAMAAGPRPGVFCDCIKASDSSYTRFQILEALDDRVRRQATAELFRSLVPPEYLLADAAMTFHLSCVFLRGPDCSSEHAVYNLCNIGARVLLANGPVNAVILGPDHDVAVLVYYDAQGTERIGRREPHLRQRQLGMYDSSLFPLPAGAAAEEASLVRRLLPPFVTAADYLGRVILLTEINTTTCDAENIARFIILQAELRHGLEAVIVHRALGAVFVVLQRQSDSELLLQVPQEEWLAVFKSPVELQLLQATPMQQQQQQQLAPVQQFDLSRLSIGLRQWVNPKAFEIMRLGFRVALTECPDHNFMELTLGLMRLAALSQPHALRRSYFPDRAVLLTGTCIYMKEWDLRTALSRYGSLDELVYLRPRRIALIIFTSWTGATRLLREPAETRRRRGFGDCRPAAPDAGVASSIANTVLQDLLSLQSRLPAYW

SEQ ID NO: 1599 - DNA, 2118 bp, Sorghum bicolor
atgcgcggccgccacctcctaaaacccttgcccctcctcacccctaaacccccttcccgcccgcccgccgcccacttccgcgcccgtgccgcagcccatccgcccacgccgcgccgcgcaccgctggccgagcccgacgtcggcatctcccgcttcgccgcctccatcccgggcttcaacggcgcgctcaagcagcgctactccgacttcatcgtccacgaggtcgcccgcgacggcgccctcgttcgcctcacctccttcgatctccccgacggcgaggagagtggagataatgtggaggacggcgaatgcgacgccaccgcggatccatcgcgggcgctcgcgtcgttccggctgctctgcggcgaagtggattacgacgcgttgaggggattcctggagagggtctcggagggaggggatggtgatttgtcgccaatcattctgtcagccgatgcagataaggcccatcgatcggaggtgcacgagttcatcaagagaaatttcaagttcctgaacacggatacggttgagcacagcgacggtattcagaaatgtattagggtgcgcttgggttcagggccacgcggtgggagggcaaggaacaggagaggcatgaacagttcaggctggagagatgacaagccatttgacagtagaggctctacatcctggccttatcacctggggaagttcctgaggtttaacctttacaaggagaataaggacacacaagaggcactaggagttataggaaagatgctaggggttcagccaagatcgtttggatttgcagggacaaaggataaacgtgctgttacaacccaacaggtgacacttttcaaagtgcatgccagtaggttggctgctcttaatagcaaactcgcaggtatcagagttggagactttagttatgtgaaggagggccttactcttggtcaactcagagggaaccgctttgcaattactttgaggaatgttattgcagaatcagatgatgttataaatgctgcagttaatggtctaagtaaaaatggatttatcaattactatggcttacagcgctttggcagcggttctgtgcctactcactttgttggtgctgctttactgagaggagagtggagacatgctgttagcttgattctgggtacaagggtacattataaatggcatggtgatgttgatgcagcacttaggggcatgccccgacatctcacagtggagagagctattcttcagagattgaagaagtaccccggcaactatctacaagcactaatggctatacctaaaacactgaggctgatgtatgtacatagctaccagagttacctatggaatcatgctgcaagtatgagagtggaaaaatatggcatttcacaagttgtagaaggtgacttagtttacaaaacagggtcctctcttggagaagcaactaccacagatacgtttgatgatgatgatagccatgttaattcatctgaaatggaaatgtcttgtgaaacacttcctgaagaaaagatccagtctgtgaagatagttgattctgaagatttattgaaggcagtctactcgtttgaggatgttgtcctccctttgcctgggtcagaaacattgtttcctgggaatgaagttgctaggatttatcatgaaatagccaagaaggatggcattagcctgatagagagcgcccatggtatcaaggacttctcgattacaagcatgaaaggaggttaccgccgcatactccaacgccctattgattttgaatgggacctaatgacttacacagacgacaatacacctttagtaccaactgatttagatgttctatcagaaatccaatcatcagaaacaaatgagctgttatctgatgggacttgcagttgtccatcaagtgattcccagttgcaagtttcagtggtcacctctggaccaaccattgaagctagctcagcagaaaccaaatcaattggcatcttagatctgtcaccagagaaactggctgtgaaattagaatttactctaccagcatcatcttatgctacaatggccataagggaattgacgaaaacttcgacttcggttgcttgccagaaaacattaaatggctga

SEQ ID NO: 1600 - protein, 705 aa, Sorghum bicolor
MRGRHLLKPLPLLTPKPPSRPPAAHFRARAAAHPPTPRRAPLAEPDVGISRFAASIPGFNGALKQRYSDFIVHEVARDGALVRLTSFDLPDGEESGDNVEDGECDATADPSRALASFRLLCGEVDYDALRGFLERVSEGGDGDLSPIILSADADKAHRSEVHEFIKRNFKFLNTDTVEHSDGIQKCIRVRLGSGPRGGRARNRRGMNSSGWRDDKPFDSRGSTSWPYHLGKFLRFNLYKENKDTQEALGVIGKMLGVQPRSFGFAGTKDKRAVTTQQVTLFKVHASRLAALNSKLAGIRVGDFSYVKEGLTLGQLRGNRFAITLRNVIAESDDVINAAVNGLSKNGFINYYGLQRFGSGSVPTHFVGAALLRGEWRHAVSLILGTRVHYKWHGDVDAALRGMPRHLTVERAILQRLKKYPGNYLQALMAIPKTLRLMYVHSYQSYLWNHAASMRVEKYGISQVVEGDLVYKTGSSLGEATTTDTFDDDDSHVNSSEMEMSCETLPEEKIQSVKIVDSEDLLKAVYSFEDVVLPLPGSETLFPGNEVARIYHEIAKKDGISLIESAHGIKDFSITSMKGGYRRILQRPIDFEWDLMTYTDDNTPLVPTDLDVLSEIQSSETNELLSDGTCSCPSSDSQLQVSVVTSGPTIEASSAETKSIGILDLSPEKLAVKLEFTLPASSYATMAIRELTKTSTSVACQKTLNG

SEQ ID NO: 1601 - DNA, 1545 bp, Sorghum bicolor
atggatctggcctggatggtggcggcggccgtcgcgtcggtgctggcgtcttgggcgttcaacgcgctgctgcacctcgtctggcgcccctacgccatcacccggagcctccgcgcgcagggcgtccgcgggccggactacaggttcctcaccgggaacctcgccgagatgaagcgcctccgcgccgatggcgccgccgtcacgctggacgtcggcgaccacgacttcatccccatggtgcagccgcaccaccgcaagtggatctcgctctacggccggacgttcgtgtactggaacggcgcgacgccgaacgtgtgcctggcggacgtgaacgtggtcaggcaggtgctcttcgaccgcaccgggctctaccccaagaacctcatgaacccgcacgtctcccgcctgctcggcaagggcctcgtcctcaccgacggcgacgactggaagcgccaccgcaaggtcgtgcacccggccttcaacatggacaagctcaagatgatgacggcgaccatgtccaactgcgctctgtccatgatgtccgagtgggaggcgcagcttgccaagggcgccggcgacgccgaggtcgagctgagcacccggttcgaggagctcaccgccgacgtgatctcgcacacggcgttcgggagcagctacgaggacgggaaacgggtcttcctggcgcagagggagctccagttcctggccttctccacttttttcaacgtccagatcccagcgctcaggtacctcccgaccgagaagaaccgcaggacatggaagctggacaagcaggtgcggggcatgctgatggacatcatcaaggcacgcgtcgccaacaaggacaccgccggctacgggaacgacctgctcgggctcatgctggaggcgtgcgcgccggagcacggcgagacgccggtgctgagcatggatgagatcatcgacgagtgcaagaccttcttcttcgccgggcacgacaccacgtcgcacctgctcacctgggccgcgttcctgctgagcacgcatccggagtggcaggacaggctccgggaggaggtgcggcgagagtgcggcgacgaggtccccacccgcggggacgcgctcaacaagctcgctctggtgaacatgttcctcctggagaccctgcggctgtacggcccggtgtccctgatccagaggaaggcgggatcggacctcgacctcggcggcatccgggtacctgagggcgctatcttcacgatccctatcgcgacgatccaccgcgacaaggaggtctggggcgacgacgccggcgagttcaagccggagaggttcgagaacggggtgacgagggcggccaagcaccccaatgcgctgctgtccttctccagcgggccaaggtcgtgcatcggtcagaacttcgcgatgatcgaggctaaggctgtggtcgccatgatccttcagaggttcgcgctcgagctgtcccctaaatacgtccacgcgcctatggacgtgatcactctgcggcccagacatgggctccccatgctcctcaggcgcttgtag

SEQ ID NO: 1602 - protein, 514 aa, Sorghum bicolor
MDLAWMVAAAVASVLASWAFNALLHLVWRPYAITRSLRAQGVRGPDYRFLTGNLAEMKRLRADGAAVTLDVGDHDFIPMVQPHHRKWISLYGRTFVYWNGATPNVCLADVNVVRQVLFDRTGLYPKNLMNPHVSRLLGKGLVLTDGDDWKRHRKVVHPAFNMDKLKMMTATMSNCALSMMSEWEAQLAKGAGDAEVELSTRFEELTADVISHTAFGSSYEDGKRVFLAQRELQFLAFSTFFNVQIPALRYLPTEKNRRTWKLDKQVRGMLMDIIKARVANKDTAGYGNDLLGLMLEACAPEHGETPVLSMDEIIDECKTFFFAGHDTTSHLLTWAAFLLSTHPEWQDRLREEVRRECGDEVPTRGDALNKLALVNMFLLETLRLYGPVSLIQRKAGSDLDLGGIRVPEGAIFTIPIATIHRDKEVWGDDAGEFKPERFENGVTRAAKHPNALLSFSSGPRSCIGQNFAMIEAKAVVAMILQRFALELSPKYVHAPMDVITLRPRHGLPMLLRRL

SEQ ID NO: 1603 - DNA, 2088 bp, Sorghum bicolor
atgcatactatttcctccgcggtgaagaggaggctcagactgaggcctcggtggcttcctcttgcctccccagcgatttctcctcgccgcgggtgcagcagccacggcccccgcgaggccgtcggctcgcacgactcgctactcctccggctgcagtcgggccccgccctcacggaggtacggagattgcacgctgcgctgctggtgcgaggataccgtacaagcaccgtcctcgccgcacagctggtgcgcgcgtacgccaggctgcgggatggtgggctcgggcacgcggtgcgcgtgttcgacggaatgcttacgaggaactccttcgcgtggaacgccgtgatcaagggccttgtcgatgccggtaggttctcggaggcactgcagtggtactgggacatggtcggtgatggctcggtcgttgctgatcgtttcacttacccacctgttctgaaagcatgtgctgcacttggcgtggttgagcaggggagaaaagttcaagagaacgtggaggcggacattgccaggggtattgcaaagtgcaatgtgtttgtgcagtgtgcgcttgtggacatgtttgccaagtgtgggtgcttaggtgaagcaaggaatgtgtttgagagcatggaagtgagggacttggctgcgtggactgcgatgattggaggaaccgtgcacggaggagactggcttgaggtgatgacgttgcttaagcgcatgaagtcagaagggtttcggcccgattcaatgattttggccactgttattccagcatgtggcaaggtgaaagagcttaggactggaacggcattacatggatgtgtggtaaaatgtggagtaggtgttgatacctgtgttctgaatgctttggtcgatatgtattgcaaatgtgctaggctggattttgctgcttctctgttttggtctatcgatcacaaggatgttatctcttggagtaccataattgcagggcattcacagaacagaagatatcatgtgagtgtcagtttgttttctgaaatggttgcttcaggagtaaaaccaaattctactacccttgcaagcatacttcctagtctttcagagctgaggttattcaggtatggaaaagaaattcattgcttctccttaagaaatggtttggaacacagtgagtttctagccagtgcactcatcgacttctacagtagacaaggatccattaaggaagcagaaattgtttttgagttcacgccgaagaacgatttggttgtttcgaattcaatgatcggaggatatgttgtgaatgaggattcagagtctgcattacgtctattaagggcactgctgaaagagggacttagacctgatcgtgtgactgttgtttcagttcttcctctatgcaatcaacactccaggcttctccagggcaaagaactacatgcttacgccatcaggcataacataagttcatgttgctcagttagtaatgcacttacagatatgtactgcaagtgtggttgcctagaactagccttcgagatttttctgctgatgacagagcgaaatactgttacatataacactctgatttcttctctgggaaagcatggtcatgcagagcaagccttctttctttttgacctaatgaagagagatggagtttctccagataaagtgacttttgtagctctgttatcatgttgtagccatgagggccttattgataagggcttgtgcttctatgattccatgttgcgggactacaatatttctccagataaggagcactattcgtgcattgttgacctttacagcagatctgggaggcttgatgctgcttggagttttattgcaaatttacaagaagtgccagaaatcgatgttcttgggtgtctattgtcagcatgcagagagcacaatagaatggacattgctgagctcgttgcagaaagaatatttgagcaaaaccccaatgatcctggctatcacattctgttatctaacatctatgccagtgctggaatgtggtctgaggtgactaggataagaactatgatcgaagagaggagcttgaagaagagaacaggaaatagcttgatttaa

SEQ ID NO: 1604 - protein, 695 aa, Sorghum bicolor
MHTISSAVKRRLRLRPRWLPLASPAISPRRGCSSHGPREAVGSHDSLLLRLQSGPALTEVRRLHAALLVRGYRTSTVLAAQLVRAYARLRDGGLGHAVRVFDGMLTRNSFAWNAVIKGLVDAGRFSEALQWYWDMVGDGSVVADRFTYPPVLKACAALGVVEQGRKVQENVEADIARGIAKCNVFVQCALVDMFAKCGCLGEARNVFESMEVRDLAAWTAMIGGTVHGGDWLEVMTLLKRMKSEGFRPDSMILATVIPACGKVKELRTGTALHGCVVKCGVGVDTCVLNALVDMYCKCARLDFAASLFWSIDHKDVISWSTIIAGHSQNRRYHVSVSLFSEMVASGVKPNSTTLASILPSLSELRLFRYGKEIHCFSLRNGLEHSEFLASALIDFYSRQGSIKEAEIVFEFTPKNDLVVSNSMIGGYVVNEDSESALRLLRALLKEGLRPDRVTVVSVLPLCNQHSRLLQGKELHAYAIRHNISSCCSVSNALTDMYCKCGCLELAFEIFLLMTERNTVTYNTLISSLGKHGHAEQAFFLFDLMKRDGVSPDKVTFVALLSCCSHEGLIDKGLCFYDSMLRDYNISPDKEHYSCIVDLYSRSGRLDAAWSFIANLQEVPEIDVLGCLLSACREHNRMDIAELVAERIFEQNPNDPGYHILLSNIYASAGMWSEVTRIRTMIEERSLKKRTGNSLI

SEQ ID NO: 1605 - DNA, 669 bp, Sorghum bicolor
atgccgggactcaccatcggcgacaccgtccccaacctggagctggactccacccacggcaagatccgcatccacgactacgtcggcgacggctacgccatcatcttctcccaccccgctgacttcacgccggtgtgcacgacggagatggcggcgatggcggggtacgccaaggagttcgagaagcgtggcgtgaagctgctgggcatctcgtgcgacgacgtggagtcgcacagggagtggaccaaggacatcgaggcgtacggcggcgggaagcagaaggtgacgtacccgatcctggcggacccgggtcgggacgccatccggcagctcaacatggtggaccccgacgagaaggactccaacggggtgagcctgccgtcccgcgcgctccacgtcgtcgggcccgacaaggccgtgaagctgagcttcctgtacccggccaccacggggcggaacatggacgaggtgctgcgcgccgtcgactcgctgctcaccgccgccaagcacggcggcaaggtcgccacgcccgccaactggaagcccggggaccgcgccgtcatcgcgcccagcgtctccgacgaggaggccaggaagatgttcccgcacgggttcgagaccgccgacctgccctccaagaagagctacctccgcttcaccaaggtctag

SEQ ID NO: 1606 - protein, 222 aa, Sorghum bicolor
MPGLTIGDTVPNLELDSTHGKIRIHDYVGDGYAIIFSHPADFTPVCTTEMAAMAGYAKEFEKRGVKLLGISCDDVESHREWTKDIEAYGGGKQKVTYPILADPGRDAIRQLNMVDPDEKDSNGVSLPSRALHVVGPDKAVKLSFLYPATTGRNMDEVLRAVDSLLTAAKHGGKVATPANWKPGDRAVIAPSVSDEEARKMFPHGFETADLPSKKSYLRFTKV

SEQ ID NO: 1607 - DNA, 585 bp, Sorghum bicolor
atggattccaggatctccgtcctctgctccctcgtcctcgcctcctccctcctgcactgcgccagatccgacggtaatgacgctcagcttctcaagggcatcaacagctacaggtcctccctcaaggtcccggcgctgacggagaacacgaacgcggcgtgcctcgccgagcagctcgcgaagcagttcaaggggcagcagtgcaccaacaccacgggcgccaacaccgtcatcggcaccgagcagcagttcccggactaccccaagtacctggaccactgccacctcaatgcgtcggtgaccgaggacggccaggtgatgccggcgtgtgtgccggggctcgtccccgccgtcgtcctcaccaactacaccaagtcgcagtacaacaggttcttgaacgacacccagttctccggtgtcgggatcgccaatgagggcgactgggtggtggttgtcctcagcaccagcacgggctccggtgactactcgccggctccgccgggctccaattgggcggcttcggctctgccgttcacccaactggttcttttgctgataggatttgtgatcttgctcatcaagtga

SEQ ID NO: 1608 - protein, 194 aa, Sorghum bicolor
MDSRISVLCSLVLASSLLHCARSDGNDAQLLKGINSYRSSLKVPALTENTNAACLAEQLAKQFKGQQCTNTTGANTVIGTEQQFPDYPKYLDHCHLNASVTEDGQVMPACVPGLVPAVVLTNYTKSQYNRFLNDTQFSGVGIANEGDWVVVVLSTSTGSGDYSPAPPGSNWAASALPFTQLVLLLIGFVILLIK

SEQ ID NO: 1609 - DNA, 11604 bp, Sorghum bicolor
atggcgcccatcaacagcggcaacatggagcagcactcgcagcggctcctcgagcccgacctccctgtgcaagtccgactgcagcttgccatggaagttcgggacagcctggagatgacacacactccagactacctcaactttcttcgctgctacttcagagccttctcagcaattctcaccacttacactaagccacaggccacagagaatgctgagcacaagctacggaatgttgtgatcgagatactcaaccgccttccacacagcgaggtgctcagaccatttgtgcaggatttgctcaagctttctctccgtgtgctgacacaggacaatgaggacaatgctctccttgccatccgaattgtgtttgacctcctccgtaacttccgccctactgtcgaggcggaggtgcagccatttcttgactttgtggttaacatataccataaatttcccacaactgttagctacttctttgaaaatcccaacacaagtgccagtatggctgcgtccatgcccatgcagcatttggaccccactgctgatgctccagtcacgatgcaagtgcctggtggtggtcaactcaacccgagcacacggtccttcaagatagtcacagagagccctcttgttgtgatgtttctcttccagttgtatgcaaagcttgtgcagacaaatatcccacacttgttgccactcatggtggcggccatctctatcaagggtcccgacaaggtgccaccacaccttaagacacccttcaatgatttaaagggtgcacaagtcaagaccttgtcattcctgacgtacctcctgaagagcaatgcagattacataaagtcatatgaagaaagcatatgcaagagcattgtgaacttgcttgttacgtgtcctcctgattctgtctccattagaaaggcaagatttgacctggagctattagttggtctgaaacaagttctaaacaccgagtacaagcgagggttgttccccttgatcgacacacttcttgatgaaagaacgcctagaaaagttaataagattttctccgctgatctaatgggtattacaaagatttggggtagcattctagttgttgaatttgcatttgtcacggattatctatttgttctctcggaatatgcacgattcttctttaacccttataattcatacgacatctgcccgcttgatgctgaacctggtacatttgctattctgaaattctttatattagtcaaagttgagcccatatatcaaaaaggtgttgaccagcaaagcatggatgaagcacgggttttattggggcgcatattggatgcattcgttgggaagttcaggacgttgaaacgaacaatccctcagttgcttgaagaaggcgaggaagggaaggaacaaccgaatctgagaatgaagcttgaagtcccattacagactgtgctgaatttgcaacaacctttggaatatactaaggaaatcaacgattacaaaagtctgataaagactcttgctgtgggaatgaagacaataatatggagcataacccatgctcactggccacgaccccaggtgcggaagacatctggtgttctgaagtctggtgttcactgtctggctctgtttaaggaaaaagacgatgatagggaaattctgcaatcgttttcgcagatgttggctataatggaagctcgcgatattatggatatgttctccttttgcatgcctgacctctttaattctatgataaccaacaaccagctgttgcacatattttcgacccttttgcaagctcccaaggttctgcggcctttcacagatgtattaattaacttccttgttagctcaaagcttgaagccctgaagcagccagattcacctgcagcaaagcttgttttgcaacttttccggttcttgttcattgctgcagccaaagctccagaaagctgtgaacgcacacttcagccacacgtgccagttataatggaagtctgcatgaagagtgccactgaagttgagaaacccctaggttacatgcaccttcttcgtaacatgtttcgtgcattgaacagtgctaaatttgattcattgatgcgtgatcttataccatctctgcaaccctgcctcaatatgttactctccatgcttgatggaccaataagtgaagatatgcgggacttgattttggagctttgcctgattttacctgcccgcttgagttctttattgccccacatacctcgtctaatgaagcctcttgttcttgctctaaaaggtagtgatgaccttgtgagcttagctctacgcacacttgagttttggattgatagtctgaaccctgattttttggaacctagcatggcaaatttaatgtcagaagtcattcttgctttatggtcccatttaaggccgcctccttacacatggggcacaaagtctttggaactgttagggaagctggggggccgaaataggcgatttttgcgggagcctcttgcactcgaatgcaaggaaaatccggaacatggattacgcttagttctgacttttgagcctgcgacaccatttttggttcctctggacagatgcatacaccaagctgttggtgcagttatgcaaggcaatggtatggaagctttctacaggaagcaggctcttcagttcattcgggtgtgcctggattctttgttaaatctgagggaaaatgtacctggcgagggtgtgagcactggtgttctcggtacattgctaatctcttccctggatccctcaagacgtcgcaatgatgcttcagatatgaagggagatttaggtgtgaagacaaaaacacaactactggctgaaaaatctgttttcaagactcttcttgtagctatcattgcagctaatgctgacaccagtcttcatgatgagaaggatgattatgttgtagatatatgccggcattttgctatgcttttccatgttgattcaccatcctccagtcaatctggatttatgcatcctattggttcttcactaccatctagcatcaacatgggatcaagatcaagatgcaacacttcatctaatctccgggagctggatcctttgatatttttggatgctttagttgaagtgttatccagtgaaaatcgccaacatgcaaaagcttccctatctgctttgaatatttttgctgagacattaatctttcttgcacggatgaagcatactggtatgctaaggggtggtcctagcacccctatgctagtctccagtccatctttaaatccagtatattcacctcccccaagtgtgcgggttgctgtatttgaggaattattaccacggttattgcattgttgctacagtagcacatggcaagcgcagatgggtggggtaatgggtctcggagcattggttggtaaagtgtctgtggataccctatgcatctttcaggtcagagttgtgcgtggtcttctttttgttcttaagaggttaccagtgcatgcaaacaaagagcaggaggagacaaatcatgtcctaacacaagttcttagggtagtaaacaatgcagatgaagcaaacagtgaacctcgacggcaaagttttcagggagttgttgagttccttgcacaggagttgtttaacccaaacgcttcaatggttgtgagaaagaacgtgcaggcttgcttatcactgcttgcaagcagaactggcagtgaggtctctgaattgcttgagcctctctatttgccaatgcttcagcctctgatttcacggcctcttcgtttgaagaatattgagcaacaggtgggcactgttactgctttgaacttctgtcttgcactcagaccacctcttctaaagctatctcctgagcttgtcaattttttgcaagaagcactgcaaattgccgaggctgatgaaactgtgtgggtcaccaggatgatgaatgcaaaagtaattctcacatggaacaaactcagaactgcatgtattgaactactttgtactgcaatggcatggggagatctaaaagctcaaaatcatactgaattgcgagcaaagattatttcaatgtttttcaaatctctaacatgcagaacgacagagattgtcaatgttgctaaggagggacttcgtcaggtggttcagcagcaaaggatgccaaaggatcttctacagagcagcttaaggcccattctagtaaacttagcaaacacaaagagccttaccatgccattactacaagggttggctcgtctgcttgaattgctgtcaaactggtttaatgtcactttaggtgccaagctattggatcacttgaaaaaatggctggagccagaaaagcttgcccagactcaaaaatcttggaaggctggagatgaaccaaaaatagcagcagctatgatcgaactgtttcaccttcttcccccggcagcaagcaaattcttggatgaccttgttaccttggtaattgatctggaaagggcacttcctgaagatcagttttacagtgagatcaacagtccatatcgtgccccacttgctaaatttttgaatcgttatgctgtggatgctgttgactattttcttgctcgattaagccatccaaagtatttcaggaggtttatgtacataatctgctcggatactggggacctaagggatgaacttgcaaggtcacctcagaaaatacttgcaagtgccttttcacagttttactctcaaactgaagcatctgctgctcaattatcttctgtaaaggatgaagcccttactggtgctatatctgagagttttacagtacaatcttcatccaacatggttactacttcggagagttactttaatggattagagcttgtctcagcccttgtgaaattgatgccagagtggctccgtaacaaccgggttgtcttcgacaccttgctacttgcttggaaatcacctgcaagacttgcgaggttgcagaacgagcaggatttgagtttaccccaggtgatggaaagcaagaggcttatcaaatgcttcctgaattacttaagacacgatcgcactgaagttggtgcactctttgatatgctatcaatattcttgtaccggagtcgtatagattatagttttcttaaggaattttatgtcatagaggttgcagaaggatactccccaaatttgaagaaaactattcttaaccactttctgaacattttccagtcaaaacaatatgggcaagatcatttagttgttaccatgcagattcttatacttccaatgctagctcattcttttcaaaatggacaaagttgggaagttgttgatcctactataattaaaactattgtcgagaagcttcttgatcctccagaagaggtcagcgtggaatatgatgaaccattgaggatagaacttcttcagctagctacactgcttttgaagtatctacagactgatcttgttcaccatcgaaaggaactcataaagtttggttggaatcatctcaagcgtgaagataactccagcaaacagtgggcctttgtgaatgtttgtcatttcttagaggcctatcaagctcctgaaaagattattttacaggtcttcattgctctgctacggacatgccaaccagaaaacaagttgctggtgaagcaagctcttgatatcctcatgcctgccctacctaggagacttcctcctgaaaaaaatgatagccgcatgccgatatggatcagatacaccaagaaagtccttgtagaggaagggcattcaattccaaacatgattcacatattccagcttgttgttcgccatgcggacctcttctatagttgcagagcccactttgttcctcagatggtcaactctcttagccgccttggattaccatactacacaacagcggaaaatagaaggcttgcaattgaacttgctgggttggtagtgtcatgggaaagacagagacaaagtgagatgaaagtggcgcaggaaagtgagacccagaatcaattaggcgacatgcttaatccttctgttattggtggtgatccaaaacgctcagatgttccgtcgtttgctgatgatttgagtaagagggtgaaagttgagcctggcttgcaacctctttgtgtaatgtcgccgggtggggcatctatacctaatattgagacacctggatcttcagggcaacctgatgaggagtataaacctaatgcagcaatggaggagatgatcattaccttcctcatcagggtatcgcttgtgattgagcctaaggataaggagtctagcgcaatgtacaagcaagctcttgacctactgactcaagctctggaagtctggccaaatgccaatgttaaattcaattatcttgagaaattacttgggaatctgtcacccactcctcagtccaaggaccctgcaacagccctcgcacaaggccttgatgttatgaacaaagtcttggagaaacaaccccgtctcttcatccgaaataacatcaatcatatttctcaaatattggatccttgtttcggcaacaaaatgctggatgctggaaagtcactttgttccttgctcaagatggtgttcagtgcttttccccttgaagcagcaacaacgccacaagatataaagttgttgcatcaaagggttcaagaactcattcacaagaatcttgctgctgttacaactcaacagatagcacttgagcccaacagtgctaactcaatcattagtttttcactgttcgtcctcaatgcacttgcagaagtacagaaaaatttcattgacccgttcattggcttgcttttccgtgtactgcaacgtcaggcacgtgacatgggatcttctgctggcagccatatcagacaaggacagaggcctgaactggattcatcagttaactcacgtcctaccatagattctactgtcatatctaacatgaagactgtcttaaaacttataagtgagagggtgatgtcctcttctgaccacagaaaatctatgggccaaatacttcaagctcttctttcagagaaaggcactgattccagcattcttctgtgcatactagacatgataaaaacttggattgaggaggattataggcttgcttcatcaactggttctgttagttcacttaactcaaaggaaatactaacttatcttcagaagttatcattagttggcagaaaaagcttccctccagctgcacaagaagaatgggatgcaaaatacttgcagcttctttattcactttgtgcagattcaaccaagtatccattggcttttcggcaagaatttttccataagattgagagacagtatatgcttggacttagagctaaagacccagaaatgaggaagcgattcttcaagctttaccatgacacagtgggaaaaacattattttctagattgcaatttataatacaggtacaggactgggaagcagtgagtgatgttttctggttgaagcaaggccttgatctcattttggcaatactagtagaaaatgaaccaattacacttgcagcaaattctgctcgagtaccagcgcttatgatagcagggcctgttccagatcgcatcaccatgccacagcaagttgctgatgctcaggaaagcatggatggtacagcactatcgtttgactctcttgccgcaaggcatgctcagttcttaaatgatgcgaacaagcttgtggtggcagatatcatggctccattgaaggaacttgcatttgctgatcccaatgttgcatatcatttatgggtgcttgtgttcccaattgtttgggtcaccttacataaagaggaacaagttgccctagctaagccaataattgcccttctatcgaaagattaccacaagaggcagcagggttgcagacctaacgttgcccaggcacttcttgaaggtcttcatttgagccatcctcaaccacgcatgcctagtgagcttatcaaatatattggaaaaacttgcaatgtgtggtatactgcaattgccttacttgagagtcatatggtgcttatgaacgaggctaaatgctctgagtcattggctgagttatacagacttcttaatgaagatgacatgaggtgtggattatggaagagaaaatcaatcactgcagaaacaagagctggtctttcacttgtccagcatggttactggcaacaggcacaaaatctattttaccaggctatgattaaagctactcagggaacatacaataacaccgtcccaaaggctgaaatgtgtctttgggaagaacagtggttatcctgtgcgtctcagttaggccagtgggaagtcttagctgattatggaaaaggggtggagaatcatgaaattcttttggactgcctctggaaggttcctgactgggcatatatgaaggataatgtaatttccaaagctcaggtagaagagacaccaaagttgcgccttattcaagcatttttcactctccatgacaaaggtactaatggtgttagtgaagcagagaacctcatcagcaaaggtgttgaactcgcactagaacagtggtggcagttgcctgaaatgtctgtacagtcacgaatgcctctgctgcagcagtttcagcagttggttgaagtaaaagaatcatccaaaatactgcttgacatagcaaatggtaacaaaccagcttcagcaagctctggtgctaattccaacccaaataactcattcgctgatctcaaggatattcttgaaacttggagacttcgtacacccaatgaatgggataatatgactgtttggtatgatctgctccagtggaggaatgagatgtacaattcagtaatagatgcattcaaggactttggtcaaacaaatcctcaacttcatcatcttggctaccgagacaaagcttggaatgtgaataagctcgcacacatagctcgcaagcaaggtcttcctgaagtttgtgtaactatacttgacaagatgtatggtcatgctactatggaagttcaggaagcatttgtgaagatatgtgaacaagctaaggcgtacttagaaatgaaaggtgaactagtcagtggtcttaacttaatcaataataccaatttggaatttttccctgtgaagaacaaagcagaaatatttcgtctcagaggtgatttcttgctgaagatgaacgaatgcgatcctgcaaatcagtcttattcgaatgctataactctttttaagcatttgcccaaaggatggattagctggggaaattactgtgatatggtttttaaagaaacaaaagatgaggtttggcttgagtatgcagtcagttgttttttccagggaatcaaatatggagtttcaaactcaaggagccatctagctcgaattctctaccttcttagctttgatggacaaaatgaacccgttggacgggctttggataaatatctggagcagctgcctcattgggtttggctttcatggatacctcagttgttgttgtcattacagagaagtgaagcccaacacagtaaattggttttgctgaagatagctcaagtttacccacaggcattatattattggcttcgtacatacttgatggaacgccgtgatgttgctactaaaactgaaatgggaagaaacatgttggctcagcagcgcatgcagcaagctatgatggcaaacaatgcggccaataacttacctgacgggagtgcaaggacatctaatcatgcaggtggtaacatgccatctgacaaccagtctcatcaagcttcccagtcagttggtgctgcaggttctcacgatggtggtaatgtccaaggacaagatccggacagatctactgctgaaggtggcacaaatactagtcatgatcaaggtcaacagagttctacaggtgctgagggctcacaagttccactaaggcgtaatagcggacatgggtgggcaacttctgcagcaagtgcatttgatgctgcaaaagacataatggaagctcttagaagcaaacatactaatctagccaatgagcttgagcttttactgtcagaaattggatcacgattcgttactctgcctgaggaaaggcttcttgctgtggttaatgctctgcttcatcgctgctacaagtatccaactgcaaccactggcgaggttccacagtctctcaagaaggaactctctggtgtatgtagagcttgcttctcacaagatgctgttaacaagcatgttgattttgtgaaggagtacaagcaagattttgaacgtgatcttgacccagagagtgctactacttttcctgcaacccttgctgaacttacagagagattgaaacactggaagaacattcttcagagtaacgtagaggatcggttcccagcagtattaaagctggaggaagaaagtaaaacacttcgggattttcatgttgttgatattgaactcccagggcagtacttcacagatcaggaaatcgcgcctgaccacactgttaagttggacagagtcggacctgacattccaattgtccggaggcatggcagtagctttcgacggttgacactcattggttctgatggttcacagcgccattttattgttcaaacatcactgactccgaatgctcggagtgatgaaaggatgctgcagctattccgtgttctaaataaaatgtttgacaagcacaaagaatctaggcggcggcatctcgctatccatactcctataattattcctgtttggtcccaggttcggatggttgaggatgatttaatgtatagcacttttcttgaggtgtatgaaattaactgtgcacggcataatagagaagctgactcgcctattacaattttcaaagagcagcttaatcaagccgtttcagggcagctctctcctgaagcagttgtggagctacgtctgcaagcatacaatgagattacaaaaaatatcgttaatgataatatcttttcccaatatatgcacaagattctgccaactggcaactacctctggaccttcaagaaacaatttgcaatccaagtggccctctcctgcttcatgtcgtatatgctgcagattggtggcagggctcctaataaaattctgtttgctaaaaatactgggaagatcttccagactgacttccatccagcttatgatccaaatggaatgatcgagttcaacgagcttgttccatttaggctgacacgcaacttgcaagctttcttctcgaattttggtgttgaaggtctcattatgtctgccatgtgttctgctgcccagtcagtggtttctccaaaacaaagccagcacatttggcatcatttggctatgtttttccgtgatgaactgttatcttggtcgtggagacggcctctaggcattccatcagtccctgtcgctgctggaatgatcaacccatcggatttccaacagaaggtggtaaacaatgtggatcatgtcgtcaatcgtatcaagtcaatatcaccacattatctggctgaggaggaggagaatgcaaccgagccaccgcagtcggtacaaagaggcgtcaccgagctggtggagtcggcattgtcgtcgaggaacctgtgcatgatggatccgacatggcacccatggttctga

SEQ ID NO: 1610 - protein, 3867 aa, Sorghum bicolor
MAPINSGNMEQHSQRLLEPDLPVQVRLQLAMEVRDSLEMTHTPDYLNFLRCYFRAFSAILTTYTKPQATENAEHKLRNVVIEILNRLPHSEVLRPFVQDLLKLSLRVLTQDNEDNALLAIRIVFDLLRNFRPTVEAEVQPFLDFVVNIYHKFPTTVSYFFENPNTSASMAASMPMQHLDPTADAPVTMQVPGGGQLNPSTRSFKIVTESPLVVMFLFQLYAKLVQTNIPHLLPLMVAAISIKGPDKVPPHLKTPFNDLKGAQVKTLSFLTYLLKSNADYIKSYEESICKSIVNLLVTCPPDSVSIRKARFDLELLVGLKQVLNTEYKRGLFPLIDTLLDERTPRKVNKIFSADLMGITKIWGSILVVEFAFVTDYLFVLSEYARFFFNPYNSYDICPLDAEPGTFAILKFFILVKVEPIYQKGVDQQSMDEARVLLGRILDAFVGKFRTLKRTIPQLLEEGEEGKEQPNLRMKLEVPLQTVLNLQQPLEYTKEINDYKSLIKTLAVGMKTIIWSITHAHWPRPQVRKTSGVLKSGVHCLALFKEKDDDREILQSFSQMLAIMEARDIMDMFSFCMPDLFNSMITNNQLLHIFSTLLQAPKVLRPFTDVLINFLVSSKLEALKQPDSPAAKLVLQLFRFLFIAAAKAPESCERTLQPHVPVIMEVCMKSATEVEKPLGYMHLLRNMFRALNSAKFDSLMRDLIPSLQPCLNMLLSMLDGPISEDMRDLILELCLILPARLSSLLPHIPRLMKPLVLALKGSDDLVSLALRTLEFWIDSLNPDFLEPSMANLMSEVILALWSHLRPPPYTWGTKSLELLGKLGGRNRRFLREPLALECKENPEHGLRLVLTFEPATPFLVPLDRCIHQAVGAVMQGNGMEAFYRKQALQFIRVCLDSLLNLRENVPGEGVSTGVLGTLLISSLDPSRRRNDASDMKGDLGVKTKTQLLAEKSVFKTLLVAIIAANADTSLHDEKDDYVVDICRHFAMLFHVDSPSSSQSGFMHPIGSSLPSSINMGSRSRCNTSSNLRELDPLIFLDALVEVLSSENRQHAKASLSALNIFAETLIFLARMKHTGMLRGGPSTPMLVSSPSLNPVYSPPPSVRVAVFEELLPRLLHCCYSSTWQAQMGGVMGLGALVGKVSVDTLCIFQVRVVRGLLFVLKRLPVHANKEQEETNHVLTQVLRVVNNADEANSEPRRQSFQGVVEFLAQELFNPNASMVVRKNVQACLSLLASRTGSEVSELLEPLYLPMLQPLISRPLRLKNIEQQVGTVTALNFCLALRPPLLKLSPELVNFLQEALQIAEADETVWVTRMMNAKVILTWNKLRTACIELLCTAMAWGDLKAQNHTELRAKIISMFFKSLTCRTTEIVNVAKEGLRQVVQQQRMPKDLLQSSLRPILVNLANTKSLTMPLLQGLARLLELLSNWFNVTLGAKLLDHLKKWLEPEKLAQTQKSWKAGDEPKIAAAMIELFHLLPPAASKFLDDLVTLVIDLERALPEDQFYSEINSPYRAPLAKFLNRYAVDAVDYFLARLSHPKYFRRFMYIICSDTGDLRDELARSPQKILASAFSQFYSQTEASAAQLSSVKDEALTGAISESFTVQSSSNMVTTSESYFNGLELVSALVKLMPEWLRNNRVVFDTLLLAWKSPARLARLQNEQDLSLPQVMESKRLIKCFLNYLRHDRTEVGALFDMLSIFLYRSRIDYSFLKEFYVIEVAEGYSPNLKKTILNHFLNIFQSKQYGQDHLVVTMQILILPMLAHSFQNGQSWEVVDPTIIKTIVEKLLDPPEEVSVEYDEPLRIELLQLATLLLKYLQTDLVHHRKELIKFGWNHLKREDNSSKQWAFVNVCHFLEAYQAPEKIILQVFIALLRTCQPENKLLVKQALDILMPALPRRLPPEKNDSRMPIWIRYTKKVLVEEGHSIPNMIHIFQLVVRHADLFYSCRAHFVPQMVNSLSRLGLPYYTTAENRRLAIELAGLVVSWERQRQSEMKVAQESETQNQLGDMLNPSVIGGDPKRSDVPSFADDLSKRVKVEPGLQPLCVMSPGGASIPNIETPGSSGQPDEEYKPNAAMEEMIITFLIRVSLVIEPKDKESSAMYKQALDLLTQALEVWPNANVKFNYLEKLLGNLSPTPQSKDPATALAQGLDVMNKVLEKQPRLFIRNNINHISQILDPCFGNKMLDAGKSLCSLLKMVFSAFPLEAATTPQDIKLLHQRVQELIHKNLAAVTTQQIALEPNSANSIISFSLFVLNALAEVQKNFIDPFIGLLFRVLQRQARDMGSSAGSHIRQGQRPELDSSVNSRPTIDSTVISNMKTVLKLISERVMSSSDHRKSMGQILQALLSEKGTDSSILLCILDMIKTWIEEDYRLASSTGSVSSLNSKEILTYLQKLSLVGRKSFPPAAQEEWDAKYLQLLYSLCADSTKYPLAFRQEFFHKIERQYMLGLRAKDPEMRKRFFKLYHDTVGKTLFSRLQFIIQVQDWEAVSDVFWLKQGLDLILAILVENEPITLAANSARVPALMIAGPVPDRITMPQQVADAQESMDGTALSFDSLAARHAQFLNDANKLVVADIMAPLKELAFADPNVAYHLWVLVFPIVWVTLHKEEQVALAKPIIALLSKDYHKRQQGCRPNVAQALLEGLHLSHPQPRMPSELIKYIGKTCNVWYTAIALLESHMVLMNEAKCSESLAELYRLLNEDDMRCGLWKRKSITAETRAGLSLVQHGYWQQAQNLFYQAMIKATQGTYNNTVPKAEMCLWEEQWLSCASQLGQWEVLADYGKGVENHEILLDCLWKVPDWAYMKDNVISKAQVEETPKLRLIQAFFTLHDKGTNGVSEAENLISKGVELALEQWWQLPEMSVQSRMPLLQQFQQLVEVKESSKILLDIANGNKPASASSGANSNPNNSFADLKDILETWRLRTPNEWDNMTVWYDLLQWRNEMYNSVIDAFKDFGQTNPQLHHLGYRDKAWNVNKLAHIARKQGLPEVCVTILDKMYGHATMEVQEAFVKICEQAKAYLEMKGELVSGLNLINNTNLEFFPVKNKAEIFRLRGDFLLKMNECDPANQSYSNAITLFKHLPKGWISWGNYCDMVFKETKDEVWLEYAVSCFFQGIKYGVSNSRSHLARILYLLSFDGQNEPVGRALDKYLEQLPHWVWLSWIPQLLLSLQRSEAQHSKLVLLKIAQVYPQALYYWLRTYLMERRDVATKTEMGRNMLAQQRMQQAMMANNAANNLPDGSARTSNHAGGNMPSDNQSHQASQSVGAAGSHDGGNVQGQDPDRSTAEGGTNTSHDQGQQSSTGAEGSQVPLRRNSGHGWATSAASAFDAAKDIMEALRSKHTNLANELELLLSEIGSRFVTLPEERLLAVVNALLHRCYKYPTATTGEVPQSLKKELSGVCRACFSQDAVNKHVDFVKEYKQDFERDLDPESATTFPATLAELTERLKHWKNILQSNVEDRFPAVLKLEEESKTLRDFHVVDIELPGQYFTDQEIAPDHTVKLDRVGPDIPIVRRHGSSFRRLTLIGSDGSQRHFIVQTSLTPNARSDERMLQLFRVLNKMFDKHKESRRRHLAIHTPIIIPVWSQVRMVEDDLMYSTFLEVYEINCARHNREADSPITIFKEQLNQAVSGQLSPEAVVELRLQAYNEITKNIVNDNIFSQYMHKILPTGNYLWTFKKQFAIQVALSCFMSYMLQIGGRAPNKILFAKNTGKIFQTDFHPAYDPNGMIEFNELVPFRLTRNLQAFFSNFGVEGLIMSAMCSAAQSVVSPKQSQHIWHHLAMFFRDELLSWSWRRPLGIPSVPVAAGMINPSDFQQKVVNNVDHVVNRIKSISPHYLAEEEENATEPPQSVQRGVTELVESALSSRNLCMMDPTWHPWF

SEQ ID NO: 1611 - DNA, 1092 bp, Sorghum bicolor
atggtgaaggtgcagaggatgggaggggttgtgttggcagcagcagtgctgctggtagcaatggtggccatggtggcggcagaactcgtgccggtgatggacaaggacctggagtcggaggccagcatgatgaacctataccagaggtggcgcagcgtgtacaacgggtcgttggaccacgttgagaagccaagcaggttcgacacgttcaaggagaacgctaggcacatcaacgagttcaacaagagggaggacgagccgtacaagctcggcctcaaccagttctccgacttgaccgacgaggagttcgatagcggcatgtacaccggagccttgctcgaagacaccggcaatgttagcctcagcagtggcatgatcgacgacgacgacgacgatgagctgctggcctccgccgccaacaagaaggtgccgtgcaagtgggactggagacgccacggagctgtcactccagtgaagaaccaaaaaaaatgcgggagctgttgggctttcggaatggtgggtgctgtggagggcatcaacgcaatcaagacagggaaactaaagtcactgtcggagcaagaggtgctcgactgctccggcgccgggacctgtaaaggtggggacccgtacaaggcattcgatcatgccaagaggcctgggttggccctagaccaccagggacatcctccatactatcccgcatacgttgccgagaagaagaagtgcagattcaatccgagaaaacatgtggtgaagattgacggcaagagaatgatgagagacaccaccgaggcgaagctgaagtgccgcgtgtacaagcagccggtggccatcctcattgaagccaaccacgccttcagccggtacagtaagggtgtcttcacgggcccttgtgggacgcgtctaaaccacgtggtcgtggtcgtgggctatggaactacaacaaacggtatcgactactggatcgttaagaactcgtggggcaagggttggggcgaaaatggctacatccggatgaagcgtaatgtgcgtagcaaagcgggtctttgcggcatgtacatgaggcccatgtaccccatcaagaataagtaa

SEQ ID NO: 1612 - protein, 363 aa, Sorghum bicolor
MVKVQRMGGVVLAAAVLLVAMVAMVAAELVPVMDKDLESEASMMNLYQRWRSVYNGSLDHVEKPSRFDTFKENARHINEFNKREDEPYKLGLNQFSDLTDEEFDSGMYTGALLEDTGNVSLSSGMIDDDDDDELLASAANKKVPCKWDWRRHGAVTPVKNQKKCGSCWAFGMVGAVEGINAIKTGKLKSLSEQEVLDCSGAGTCKGGDPYKAFDHAKRPGLALDHQGHPPYYPAYVAEKKKCRFNPRKHVVKIDGKRMMRDTTEAKLKCRVYKQPVAILIEANHAFSRYSKGVFTGPCGTRLNHVVVVVGYGTTTNGIDYWIVKNSWGKGWGENGYIRMKRNVRSKAGLCGMYMRPMYPIKNK

SEQ ID NO: 1613 - DNA, 204 bp, Sorghum bicolor
atgacagaagcaccatttctgccacgtgagaggctcttcaagcagcaacattacttccagcacttgaccaagcacacctacctgaaagggcgctatgatgtgatcacctctgttgccatcccccttgcacttgctgcctccagcatgttcatgattgggcgtggagtttacaacatgtctcatgggattgggaaaaaagagtga

SEQ ID NO: 1614 - protein, 67 aa, Sorghum bicolor
MTEAPFLPRERLFKQQHYFQHLTKHTYLKGRYDVITSVAIPLALAASSMFMIGRGVYNMSHGIGKKE

SEQ ID NO: 1615 - DNA, 1200 bp, Sorghum bicolor
atgcctttcagcagcatgatccatgagatgaagggcgagatcggcgccatctcgtcgcgcggcctgctgcggttccggtcggggggtcacgccgccgctgccgggcgagcgtcggcagccgccgagccggacgaggcgctgcgggagagctgctgggcgcgggtgccccccgagctcttgcggatggtgctggccagggtcgagcacgaggaggcgcgctggcccggccgcagcgccgtcgtggcttccgccggcgtctgccgctgctggagggccgtcgtcaaggagatggtgcgcgtgccggaggtgtctgggaaaatcaccttccccatctctctcaagcagcctggtccaagggatgccccaatgaaatgtttcattaggaggaaccgggcgactcagtcatattctctgtgcattggaatcactgatgcgttagctgatgatgggaaatttctacttgctgcacgcagaagtcgtaggcccgcaggcactgaatacctgatctcgcttgatgcaaagaatacatcaaaaggtacctgcattggcaagctaagatcaaacttcttgggaacaaaatttactgtctatgatgcccatccaccttgtaccggggctgtggtttcaaagggtccgtctgcacacatgatcggttcagcccaagtttctcctggggtgcctgctgggaattatccaatttcgcacatttcttatgaagcgacttttggttctaggtatccaagaaagatgaactgtgtcatggattccatccctttatcagcaattaaagaaggagggactgctcccacgcagactgaatttccatcaattaactccaactcttttgcttcagttccattcttcaggaaatcaggtcgtctggatagttcaggtgttcagctagccactcagaatgaagctaagatggtgctgaagaacaagtcccccaactggcatgaaccactgcagtgttggtgcctgaatttccatgggcgggtcacggttgcatctgttaagaacttccagttggtggcttcaggagagagtgatctgaataaccagggtgatgacgacgtgatactccagtttggcaaggtcgggaaggacttgttcaccatggactaccgttatccaatatctgcattccaggcatttgccatctgcctgagcagctttgataccaaaattactcgcgaatga

SEQ ID NO: 1616 - protein, 399 aa, Sorghum bicolor
MPFSSMIHEMKGEIGAISSRGLLRFRSGGHAAAAGRASAAAEPDEALRESCWARVPPELLRMVLARVEHEEARWPGRSAVVASAGVCRCWRAVVKEMVRVPEVSGKITFPISLKQPGPRDAPMKCFIRRNRATQSYSLCIGITDALADDGKFLLAARRSRRPAGTEYLISLDAKNTSKGTCIGKLRSNFLGTKFTVYDAHPPCTGAVVSKGPSAHMIGSAQVSPGVPAGNYPISHISYEATFGSRYPRKMNCVMDSIPLSAIKEGGTAPTQTEFPSINSNSFASVPFFRKSGRLDSSGVQLATQNEAKMVLKNKSPNWHEPLQCWCLNFHGRVTVASVKNFQLVASGESDLNNQGDDDVILQFGKVGKDLFTMDYRYPISAFQAFAICLSSFDTKITRE

SEQ ID NO: 1617 - DNA, 1242 bp, Sorghum bicolor
atgtcgtccgccgccgcggacgcagccagcggcaaggaggcaccggcgtgcgaatcctgcacaagcctgccggcggtggtttactgccgggccgactccgcgaggctgtgcctgccgtgcgaccgccacgtgcacggcgccaacgccgtgtccacccgccacgtccgggcgccgctctgctccggctgccgcgccaccgccaccgtcaccgcaggcggcggcaccttcctctgcgccaactgccactttgggtcggaggaggaggaggggcgacaccgggacggcgacgatccgcagcctctccaccatgaccgtgcagccgtggaagggtacgtcgggtgcccatcgatcgccgagctcgcggccatcctcggcgtcgccgggtacgacgagaaggcggcggcggccgggaacggagggtggtggcctgcctccgcctgggaggatccccaggtgctccgcttggaggacgtgatcgttcccaccacctcttgccatggcctccagccgctcctcacgccgccgtccccagagaaccggagctccggcggtgagatggccgacgaggttgtccggcagctgggggagctcgccaagttggaggcgactgtggcggcggcttacgcggagatggagccggctgacggcgagcagctgcctccgtgggcgtcgccggagcttgccattggacacgccgacttcggggctctcgacgctggcgccgcctggcatgatgcagcaaccatcgcagcagtgccttccactgaggagcaggaagcgtggatcgcggccggctgcgacgtcgacgcggcgggccggacggacgaggaggcgcgcgagcacgctgctctggctccggcgccggccgagccgtgcctgtcctcgttcgtggagatgtcagagatctgccccggcagcgtcgtcaccctcagccacggcggggttggtggcggcggcaccgccgacgtcgacaacagcgggaagacagacgcggagacagccccgcggccgcagctggcgccgacggcgccggtgctggtggcggtgccagtgccggtgacggagaagatgggcgggtacgacgtggcgtaccccgaccgcggcacggtgatctcgcgctacaaggagaagcggaagaacaggaggttcgacaagcagatccggtacgagtcgcgcaaggcgcgcgccgacggccgaatgcggatcaaggggaggttcgccaagtccggcggcgaggtctga

SEQ ID NO: 1618 - protein, 413 aa, Sorghum bicolor
MSSAAADAASGKEAPACESCTSLPAVVYCRADSARLCLPCDRHVHGANAVSTRHVRAPLCSGCRATATVTAGGGTFLCANCHFGSEEEEGRHRDGDDPQPLHHDRAAVEGYVGCPSIAELAAILGVAGYDEKAAAAGNGGWWPASAWEDPQVLRLEDVIVPTTSCHGLQPLLTPPSPENRSSGGEMADEVVRQLGELAKLEATVAAAYAEMEPADGEQLPPWASPELAIGHADFGALDAGAAWHDAATIAAVPSTEEQEAWIAAGCDVDAAGRTDEEAREHAALAPAPAEPCLSSFVEMSEICPGSVVTLSHGGVGGGGTADVDNSGKTDAETAPRPQLAPTAPVLVAVPVPVTEKMGGYDVAYPDRGTVISRYKEKRKNRRFDKQIRYESRKARADGRMRIKGRFAKSGGEV

SEQ ID NO: 1619 - DNA, 1389 bp, Sorghum bicolor
atggcgaatttgtgcgtaatcctcctcctacggtcctcccggcgtaggctcatcgaggcggaagagatcggccagggcacgtacagcaatgtgtacaaagcgcgggactcgatcagcggcaagatcgtggcgctcaagaaggtgcgcttcgacaacctggagcccgagagcgtgcggttcatggcgcgcgagatcctcatcctgcgccgcctcgaccaccccaatgtcatcaagctcgacgggctcgtcacctcccgcatcctctacctcgtcttcgactacatggtccacgacctcgccggcctcgccgccagccccgacatcaagttcacgctgccccaggtcaagtgctatgtgcatcagctcttgtcagggctcgagcactgccacaaccggggagtgctacatcgcgacatcaaggggtcgaatctgcttttggacaacaatggtgtgctgaagattggtgatttcggtctggcgtccttcttcgaccccaaccataaacagccaatgacgagtcgggtggtgacactatggtaccgccctccagagttgctgctgggtgcgaccgattatggagttggcattgacttgtggagtgcaggatgtatactggctgaattgctggctggaaaacctattatgcctggacggactgaggtggaacagctgcataaaatttttaaactatgtggctctccgacggaagaatattggaaaaaatcaaagttgcctcatgcaactatatttaagcctcaacagccatacaaaaggcgaatagcggatacattcaaagatttccctcaaacagcaattcgattgatcgagaccctacttgcaattgatccagctgatcggttaacagcaacttctgcattaaacagtgatttctttgcaacagagccttatgcgtgtgaaccatcaagtctgccccaatacccgccaagcaaagaaatggatgcgaaacgaagagatgaagaagctagacgcttaagggctgctggtggtagagctaacggagacggaacgaggaagacaaggacacgggatcggcctagggctgttccagctccagaggcaaacgccgaactgcaagcaaatattgataaaagaaggttaataactcatgcaaatgcgaagagcaagagtgaaaagttccctccaccgcaccaggatggtgcgcttggatttcccttgggctgttcgaatcacatggaaccttcatttgagcccccagacccttcttccttcagcactgtatttcctttcgataaaagcacagtgcctacctggtccggaccattggcggactctgcagctggcaaccaaaagcggaaacacaagtctggccgctcctcaaaacaaccagcaaccgcccgtgctagatga

SEQ ID NO: 1620 - protein, 462 aa, Sorghum bicolor
MANLCVILLLRSSRRRLIEAEEIGQGTYSNVYKARDSISGKIVALKKVRFDNLEPESVRFMAREILILRRLDHPNVIKLDGLVTSRILYLVFDYMVHDLAGLAASPDIKFTLPQVKCYVHQLLSGLEHCHNRGVLHRDIKGSNLLLDNNGVLKIGDFGLASFFDPNHKQPMTSRVVTLWYRPPELLLGATDYGVGIDLWSAGCILAELLAGKPIMPGRTEVEQLHKIFKLCGSPTEEYWKKSKLPHATIFKPQQPYKRRIADTFKDFPQTAIRLIETLLAIDPADRLTATSALNSDFFATEPYACEPSSLPQYPPSKEMDAKRRDEEARRLRAAGGRANGDGTRKTRTRDRPRAVPAPEANAELQANIDKRRLITHANAKSKSEKFPPPHQDGALGFPLGCSNHMEPSFEPPDPSSFSTVFPFDKSTVPTWSGPLADSAAGNQKRKHKSGRSSKQPATARAR

SEQ ID NO: 1621 - DNA, 564 bp, Sorghum bicolor
atgggtatcgacctcgtcgccggcggccgcaacaagaagaccaagcgcacggcgcccaagtccgacgatgtctatctcaagctccttgtcaagctctaccgcttccttgtccgtaggacaaagagcaacttcaacgccgtgatcctgaagcgactgttcatgagcaagaccaaccgcccgccgctctcgatgcgccgcctcgttaagttcatggaggggaagagtgatcagattgccgttattgtgggcaccgtgactgacgacaagaggatcaacgaggtgccggcgatgaaggtgtgtgcgctcaggttcactgagacagctagggccaggatcatcaatgccggtggagagtgcctcaccttcgaccagcttgcgctccgtgccccgctcgggcaaaacacggttctcctgaggggtcctaagaacgctagggaagctgttaagcacttcggccctgcaccaggagtgccacacagccacaccaagccttacgttcgctcaaagggaaggaagtttgagaaggcaagaggtaggaggaacagcaggggcttcaaggtctaa

SEQ ID NO: 1622 - protein, 187 aa, Sorghum bicolor
MGIDLVAGGRNKKTKRTAPKSDDVYLKLLVKLYRFLVRRTKSNFNAVILKRLFMSKTNRPPLSMRRLVKFMEGKSDQIAVIVGTVTDDKRINEVPAMKVCALRFTETARARIINAGGECLTFDQLALRAPLGQNTVLLRGPKNAREAVKHFGPAPGVPHSHTKPYVRSKGRKFEKARGRRNSRGFKV

SEQ ID NO: 1623 - DNA, 975 bp, Sorghum bicolor
atggcagcttcgtcgcgaatgggcgcgctactagttgtctacctcactctcatggcggcggctctcggggtcagggcggagctcaccgcggactactacagcgagacgtgcccgctcgcgctgagcaccatcaaggtcctcgtcggcaccgccatcgtgggggagcccaggatgggggcgtcgctggtccgcctacacttccacgactgcttcgtcaatggctgcgacggctccatcctgctggacgacaccgacgacatggtcggcgagaagacggccaagcccaacaacaactccgtgagaggctacgaggtcatcgacaccatcaagtcggcggtgaacacggtatgcttggggaacgtcgtctcctgcgccgatatcttggctgtggccgctcgcgattccattgtcgctctgggaggaacctcgtacgacgtggtcctcgggcggcgcgacgcgacgacggcgagcatggacgacgcgaacaacgtgatcccgaacccgttcatggacctgccggcgctgcaggcgagcttcgagtccctgggcctgtccctgcacgacctggtggtgctctccggcggccacacgctgggctacgcccgctgcctcttcttccggggccgcctgtacaacgagacggcgacgctggacccgacctacgcggcgtcgctggacgagcggtgcccgctgtcgggcgacgacgacgcgctgtcggcgctggacgacaccccgaccaccgtcgacacggactactaccagggcctcattcagggccgcgcgctgctgcacacggaccagcagctgtaccagggcggcggcgacgccggcgacctggtcaagtactacgccgacaaccccaccaagttctgggaggacttcggcgcggccatggtgaagctgggcaacctaagcccgctcaccggcgaccaaggagaggtcagggagaactgccgggtcgtcaaccaggcgtga

SEQ ID NO: 1624 - protein, 324 aa, Sorghum bicolor
MAASSRMGALLVVYLTLMAAALGVRAELTADYYSETCPLALSTIKVLVGTAIVGEPRMGASLVRLHFHDCFVNGCDGSILLDDTDDMVGEKTAKPNNNSVRGYEVIDTIKSAVNTVCLGNVVSCADILAVAARDSIVALGGTSYDVVLGRRDATTASMDDANNVIPNPFMDLPALQASFESLGLSLHDLVVLSGGHTLGYARCLFFRGRLYNETATLDPTYAASLDERCPLSGDDDALSALDDTPTTVDTDYYQGLIQGRALLHTDQQLYQGGGDAGDLVKYYADNPTKFWEDFGAAMVKLGNLSPLTGDQGEVRENCRVVNQA

SEQ ID NO: 1625 - DNA, 1296 bp, Sorghum bicolor
atggaggcgccggctcgcctccccatctccctcctcgtcgtctccgccctcctcctcctcctctcggctcagggaccggcgggagcggcggcggcggccgtgccgccgcgaatccagccgctcgctaccgccgcgctgcgccgcctctacgacacctccaactacggcaggctgcagctcaacaacggcctcgcgctcactccgcagatggggtggaacagctggaatttcttcgcttgcaacatcaatgagacggtcatccgcgagacagctgacgcgctggtgtccacgggactggctgctctgggctacaacttcgtaaatattgatgattgctggtcatacgtgaaacgaggaaagcaggaccaattgctgcctgatccgaagactttcccttcaggcatcaaagcccttgcagattatgtgcatggaaaaggtctgaaacttggtatatactctgatgctgggaaatttacttgccaagttcgacctggatcactcgatcatgaaagtgacgatgctgcgatctttgcttcatggggtgttgattacctgaagtatgacaactgctacaatttgggaataaagccacagaaaagatatcctcctatgcgagatgctcttaactcaactgggcgccaaatcttctactctttgtgtgaatggggccaggatgatccagccttatgggctggcaaagtgggcaatagttggcgtacaactgatgacataacggatacatggcaaagcatgacagacattgctgataagaacaacaagtgggcgtcatatgctggacctggtggttggaatgacccagatatgttggaagtaggcaatggtggcatgacctcagcagagtatcgctcacattttagcatctgggctctcatgaaggcccctttattaattggctgtgatgtcagaaacatgacttctgaaacaatggaaatattgagcaacaaagaagtaattcaagtaaaccaagatcctcttggagttcaaggaagaaaaattttaggagaaggaaaatatggatgccgtgaggtgtgggctggtcccctgtctggaaatcggcttgttattgctctatggaaccgttgttctgagactgctaatattacaatgaaactgccagcggtaggccttgatggatcagctgcctattctgttagggatctgtggaagcatgaaacgctatcagaaaatgtggtaggaacttttggcgctcaagttgacgtgcatgacaccaagatgtacatcttttctcctgcaaccagtgtcgcttcaatttga

SEQ ID NO: 1626 - protein, 431 aa, Sorghum bicolor
MEAPARLPISLLVVSALLLLLSAQGPAGAAAAAVPPRIQPLATAALRRLYDTSNYGRLQLNNGLALTPQMGWNSWNFFACNINETVIRETADALVSTGLAALGYNFVNIDDCWSYVKRGKQDQLLPDPKTFPSGIKALADYVHGKGLKLGIYSDAGKFTCQVRPGSLDHESDDAAIFASWGVDYLKYDNCYNLGIKPQKRYPPMRDALNSTGRQIFYSLCEWGQDDPALWAGKVGNSWRTTDDITDTWQSMTDIADKNNKWASYAGPGGWNDPDMLEVGNGGMTSAEYRSHFSIWALMKAPLLIGCDVRNMTSETMEILSNKEVIQVNQDPLGVQGRKILGEGKYGCREVWAGPLSGNRLVIALWNRCSETANITMKLPAVGLDGSAAYSVRDLWKHETLSENVVGTFGAQVDVHDTKMYIFSPATSVASI

SEQ ID NO: 1627 - DNA, 186 bp, Sorghum bicolor
atggcactcccggcgtcgagctccggcctcttccgattcgtctccccgcgcagccgcccccagtccaccgacatcgtggccgccgcctcctggggagtcttcgccggcaccgccggcctctacctcgtccagccatttgactggattaagaaaactttctttgagaaacctgaaccagaggcatga

SEQ ID NO: 1628 - protein, 61 aa, Sorghum bicolor
MALPASSSGLFRFVSPRSRPQSTDIVAAASWGVFAGTAGLYLVQPFDWIKKTFFEKPEPEA

SEQ ID NO: 1629 - DNA, 1557 bp, Sorghum bicolor
atgcacctcctcctcaccgacatgtgggccacaagaacatcgggcccacctgacatcgacacgcgcttttctcgtggatgcgcacggctttatttatcgaaagggaaaatctctctagctggggtgtgctacgtgcacccggcgttcgtgcacctgggcccgcctgaaccaccgggtgatttggcgcgcgatgtatgtgaagatagagaggacatgagggtcaccggggagaagccatgcacacatcaggaattagatgttgaccagacaaatagttcttctagctttaacaattccagtgagtgtgagaatctggcacccagcaatgacgaaatatccggatcagagtccaatttggagatagccaagacggagggtgatgtaccgagtggagagaaggttctgaagaagccagacaaaatcctgccatgccctcgttgcaatagcatggatacaaagttctgttactataacaactacaacattaagcaaccaaggcatttttgcaagagttgtcagaggtactggactgcaggtggaagcatgagaaatatccctgtcggtgcaggaaggcgcaagagcaagagctccagtgcgaattgccgcagcatattgattccaggcagcagtgtagctactcctgggggagaggcttccctttttccattgtccataaatggaaatcaagcggcagttagcttcgggcctgattcccctctctgcaactctatggcctctgtgctgaagattggaggagagcagattaagagttcgaaccctgcctcagcagcacagcccagaaatggagaaaaccagatgtgcccaccttgtactacatcatcagatggtccaaggaatgaatcacaaaaggaaacagcgaatgcacatcaaaatggaatcattgggcaaagcaatggagtcacttctgtgcatcctataccattctttcctggtccgccttttgtgtacccatggagtccagcatggaatggcattcccaccatggcagcagctgtgtgcccagctccagccgaagcagcaaattcttcagaaaattgcaccacaagcagtaatgttcaatggaatgtgccaccaattgtccctgtactgccaccgggattctgcggtccgattccagttcctgtaatgccgccttcggtttggccattcattactccttggcctaacggagcatggaacgcaccatggcttggacctagctctactgtgccatcatcgtctccaacaagcagcagcacatgttccgaaagcggctctcctgtcctaggaaagcactctagggactccaaacctcaaggagatgagaaggcagaaagatgcttatggatccccaaaacgcttcggattgatgaccctgtcgaagctgcaaagagctcaatctggaccactcttgggatcgagcctggtgatcgaggcatgttcagaccattccagtcgaaacctgaaaggcaggaacagatatccggcgccgctcgagccctgcaagcaaatccagcagctctgtcacgctcgcgatcttttcaggagacaacatga

SEQ ID NO: 1630 - protein, 518 aa, Sorghum bicolor
MHLLLTDMWATRTSGPPDIDTRFSRGCARLYLSKGKISLAGVCYVHPAFVHLGPPEPPGDLARDVCEDREDMRVTGEKPCTHQELDVDQTNSSSSFNNSSECENLAPSNDEISGSESNLEIAKTEGDVPSGEKVLKKPDKILPCPRCNSMDTKFCYYNNYNIKQPRHFCKSCQRYWTAGGSMRNIPVGAGRRKSKSSSANCRSILIPGSSVATPGGEASLFPLSINGNQAAVSFGPDSPLCNSMASVLKIGGEQIKSSNPASAAQPRNGENQMCPPCTTSSDGPRNESQKETANAHQNGIIGQSNGVTSVHPIPFFPGPPFVYPWSPAWNGIPTMAAAVCPAPAEAANSSENCTTSSNVQWNVPPIVPVLPPGFCGPIPVPVMPPSVWPFITPWPNGAWNAPWLGPSSTVPSSSPTSSSTCSESGSPVLGKHSRDSKPQGDEKAERCLWIPKTLRIDDPVEAAKSSIWTTLGIEPGDRGMFRPFQSKPERQEQISGAARALQANPAALSRSRSFQETT

SEQ ID NO: 1631 - DNA, 1383 bp, Sorghum bicolor
atggcgtacatggcagctgtcgcgcccgtgccctggtggccgcctccaccggagctggcgcctgtgggcttccccgacgcgtcctctcccgccggctatccaaagccccaaaccctacccttcttgctagcgccgacccctccgccaccgccgccgccgccgccgctgcctgcggggtaccctcttcttcctcccccagccccgatcatcatccagctccagcccgaccccagcttcgtcgcggaggtggatcagcgtcgcagcagttcccttgtgcagttcttgaaggatgagggggccgttccgtcgccggaggatgaaaagaagagggagaaggtgatccgagagctcaagaagatagtgatgcattgggccaacgcggtggcctatgagcagagtgtgccccaggggctggccactgctacggtcttgacatacggctcttacaccttaggggctcatggacctgaatctgacatcgatgtactttgcgttggaccttgtattgcaacactgcagtaccatttctttgttgttttgagacaacttcttgagggcagacctgaagtatcagaactgcaaactattgagaaggctaaggttcccttgatgcgatttagatttactggaattgcagttgatttcacatatgcccagctccctgttattgatgcattaaagaagtttcaagctctgttgcgatgcatcaaactgtgggctaggaaaagaggacttcattgtcattatcttggcttctttgctgggattcatttagcgatccttgcggcttatgtctgtcggaaatttccagatgccagtgtcaatggtttgttcgcagtgttctttcagacttttgctcactggccttggcaagttccagattcattgagacatgatttccagtggacctggctttttgaaccctttccatatgataaaaaatatcaacagtttcttcgcattgctttatgtgcgccaacatttgccgagctacgagactgggctggatgggtgaaatctcgattccgtctcctgattctaaagctggaaagagctggcattgagtgtgatccatgcccctcggaggaagttgatcatacagacaatgaccctaacgtagtcttctactggggcctcatccctgaaagaatcattcaggttgacactagctccctgaaagaagatttcatggaaagcatcaccaatgatgtctatggcacggtgaagtgcacgcattcagatgtgacaatatctgtggttgggctgccacagttgccaaagagtatgcgcagccatgttcactggcagtacatgcagcgttgtatgatggcctacgagggcacagatgaaggccagagcgcaggttggctaggacttggttag

SEQ ID NO: 1632 - protein, 460 aa, Sorghum bicolor
MAYMAAVAPVPWWPPPPELAPVGFPDASSPAGYPKPQTLPFLLAPTPPPPPPPPPLPAGYPLLPPPAPIIIQLQPDPSFVAEVDQRRSSSLVQFLKDEGAVPSPEDEKKREKVIRELKKIVMHWANAVAYEQSVPQGLATATVLTYGSYTLGAHGPESDIDVLCVGPCIATLQYHFFVVLRQLLEGRPEVSELQTIEKAKVPLMRFRFTGIAVDFTYAQLPVIDALKKFQALLRCIKLWARKRGLHCHYLGFFAGIHLAILAAYVCRKFPDASVNGLFAVFFQTFAHWPWQVPDSLRHDFQWTWLFEPFPYDKKYQQFLRIALCAPTFAELRDWAGWVKSRFRLLILKLERAGIECDPCPSEEVDHTDNDPNVVFYWGLIPERIIQVDTSSLKEDFMESITNDVYGTVKCTHSDVTISVVGLPQLPKSMRSHVHWQYMQRCMMAYEGTDEGQSAGWLGLG

SEQ ID NO: 1633 - DNA, 1608 bp, Sorghum bicolor
atgtcgctccgtgtgctgaaccctaacgcccaggtgctcaacaagtcggaggcgctgcacatgaccatcaacgccgccaagggcctccaggacgtgctcaagaccaacctcggccccaagggcaccatcaagatgcttgtgggtggagctggtgacctgaagctgactaaggatgggaacaccctcttgaaggaaatgcaaattcagaacccaactgcaatcatgattgcaaggacggctgtggcacaggatgacacaagtggtgatggcacaacctccactgtgctttttattggggagctaatgaagcagtctgagcggtgcatagatgaaggtactcatccaagattcttggtcgatggttttgatgttgctaagagagcatgtcttgattttcttgaaaagttcaagacgccagtcgttattggtgaagaaccggacagagacaccttgaaaatgatagcaagaacaactcttaggacgaagttgtatgaaggattggctgatcagttgacggatattgttgtgaatgcagttctgtgcatcagcaaaccagatgaaccaatcgatctttttatggtggaaataatgcacatgcgccacaaatttgatgttgacacccgcctggttgaaggtctggtcctggaccacggttctcgtcaccctgacatgaagcgcagggcagagaactgttacatcttgacctgcaatgtctcattagaatatgagaaaagtgaaatcaatgcaggatttttttactcaaatgcagaacaaagggagaagatggttgctgcagagagacgccaagttgatgaacgtgtcaaacggattattgagttgaaaaataaggtttgtgctggaggtgataaaaactttgttgtgataaatcagaagggcattgaccctccatctctggatctccttgctagagctgggataattgctctccgaagagcaaagaggagaaatatggagaggcttgtgctagcatgcggtggtgaagctgtcaattccgttgatgacttgactgaagattgtctaggctgggctggtcttgtctatgagcatgttcttggagaagaaaagtacacttttgtggagaatgtgaaaaacccacgctcttgtaccatactgattaaaggacctaatgaccataccatcgcacaaatcaaggatgctgtccgtgatggtctaagatctgttaagaacacaattgaggatgaagcagttgtgctgggtgctggtgcttttgaggttgcggcaaagaagcatcttattgacaacgtgaagaaaaccgtcaaaggacgagcacaacttggggtggaggcgtttgcagaagctcttcttgttatacccaagactttagctgaaaactctggtttagatacccaagatgtgattgtttctctccagaacgagcatgaccgtggattagttgtgggattgaaccatcactctggggaaccgattgatccccagatggaaggcatctttgataattactctgtgaaacgccagatcatcaactctggacccatcattgcatctcaattgctgcttgtggatgaagtgatcagagcaggccgcaacatgaggaaaccgacttag

SEQ ID NO: 1634 - protein, 535 aa, Sorghum bicolor
MSLRVLNPNAQVLNKSEALHMTINAAKGLQDVLKTNLGPKGTIKMLVGGAGDLKLTKDGNTLLKEMQIQNPTAIMIARTAVAQDDTSGDGTTSTVLFIGELMKQSERCIDEGTHPRFLVDGFDVAKRACLDFLEKFKTPVVIGEEPDRDTLKMIARTTLRTKLYEGLADQLTDIVVNAVLCISKPDEPIDLFMVEIMHMRHKFDVDTRLVEGLVLDHGSRHPDMKRRAENCYILTCNVSLEYEKSEINAGFFYSNAEQREKMVAAERRQVDERVKRIIELKNKVCAGGDKNFVVINQKGIDPPSLDLLARAGIIALRRAKRRNMERLVLACGGEAVNSVDDLTEDCLGWAGLVYEHVLGEEKYTFVENVKNPRSCTILIKGPNDHTIAQIKDAVRDGLRSVKNTIEDEAVVLGAGAFEVAAKKHLIDNVKKTVKGRAQLGVEAFAEALLVIPKTLAENSGLDTQDVIVSLQNEHDRGLVVGLNHHSGEPIDPQMEGIFDNYSVKRQIINSGPIIASQLLLVDEVIRAGRNMRKPT

SEQ ID NO: 1635 - DNA, 1911 bp, Sorghum bicolor
atgcccctaggccgcaccgccactgggtggaatgcaggggccgctgctgccgcctccatggaacacagtcctcatggggctcgccacgtgcgtggccttggggtgccctccatgcgggcgagcagctccgtcgtggggcgtcgtaggcgagagcagcgggtgatggcgatggtggcggtggcaggcgatggaggagcgagtgcgacacacgatgggatcgggatttgtagtggggagctgccgagctgtgacaaatcaatatcaataaaaacaaatcaatggccgcacctagaggaagacaaagaacttgaagaagctcgacggccgcgcgcccaacggcgaggacgacggcgcgggccgcgattgcgctccggggactcgcgtagggagctgtcgagctgtgcagcgttgggaagctgggcgacggtgacggctagggcgagggcgagggcgagggcacaggggcaggggcaggggcaggggctacgatttcttggagctctcagctgggcgcgtggccaactgagagggcgacggcgtgggcagcgattgcgccccgttgcctcgcgcggggagctgcggagctgggcggcggcggcaagggcgcaggggtcgtggtttcttcgaggcttggagctcaggtctcaggtggattggatctcaggcctcagctacagcaagcatggcatgggactcgatcagcagcgccgcaccagttcccggcactactccagtagctcgtcggcaaaagatgctccggctgctcgccgtcgctgcggtggccgtgtctccctgtcgagccagctggtgccgctgccctccgtgagcaggtggtggcggccgttctccgtgccaccgcagacagcgcgccgagcaccaccaccagctgctggcaaagggacaacatcaacatgcatcatgttcaacttcggggactccaactccgacaccggcaacctcgtcgccggcgcgggcttccggctgcaccgccccgtggggcgccgcttcttcggcaagcccagcggccgcttctccgacggccgcctctacatcgacttcatctgtgagaggctagggctggatcacctgagcccctacctggagtcatcgggcgtgagcttccggcacggcgccaacttcgccgtggcaggtgcgatgaccggcgccggggaccagagccagttcagcctggcgacgcaggtgcggcagttccggcacttcaagtcccggacggcggatctcctcaagctaggactcgggcccggcatcaccgtggaggagttcgagcaattggcaccaaacgcctgcctctctgcctcgtcgtacgttcttctttcgttcgtcgccatgcacaacgacgacacggccctggcttcctgtccaatgacttgcatgcagatggtgcacgaggccggcgggcgcaagttggtggtctacaacacggggccactggggtgcctgcccacacgctggcgcggcggcgaggcgccggcaatggcaccggcgagcttgaccacgcgggctgcctcgccggccggccacaaccgcgtcgccagggccttcaacgcgcggctcggccgcctctgcagcgacctgcgcgccgagctcgccaacgccactgtggtgtgcgtcgacatgtacgccgtcaagtacggcctcttcgccaaccacacggagcacgccgctgacggcgtgctgcggcgcgccgtacaatacaattacgaggctgggaaggcgtgcgggagccccaaggtgaagaaagcgtgcgccgatggcgaccggcgcatcgtctgggacgggctgcactacacggaggcggccaacaggatcgtcgccgacaaggtgatgtcagcggagtacagcgaccctccgcttcagctgcaaacgctctgcgactctcacagattttga

SEQ ID NO: 1636 - protein, 636 aa, Sorghum bicolor
MPLGRTATGWNAGAAAAASMEHSPHGARHVRGLGVPSMRASSSVVGRRRREQRVMAMVAVAGDGGASATHDGIGICSGELPSCDKSISIKTNQWPHLEEDKELEEARRPRAQRRGRRRGPRLRSGDSRRELSSCAALGSWATVTARARARARAQGQGQGQGLRFLGALSWARGQLRGRRRGQRLRPVASRGELRSWAAAARAQGSWFLRGLELRSQVDWISGLSYSKHGMGLDQQRRTSSRHYSSSSSAKDAPAARRRCGGRVSLSSQLVPLPSVSRWWRPFSVPPQTARRAPPPAAGKGTTSTCIMFNFGDSNSDTGNLVAGAGFRLHRPVGRRFFGKPSGRFSDGRLYIDFICERLGLDHLSPYLESSGVSFRHGANFAVAGAMTGAGDQSQFSLATQVRQFRHFKSRTADLLKLGLGPGITVEEFEQLAPNACLSASSYVLLSFVAMHNDDTALASCPMTCMQMVHEAGGRKLVVYNTGPLGCLPTRWRGGEAPAMAPASLTTRAASPAGHNRVARAFNARLGRLCSDLRAELANATVVCVDMYAVKYGLFANHTEHAADGVLRRAVQYNYEAGKACGSPKVKKACADGDRRIVWDGLHYTEAANRIVADKVMSAEYSDPPLQLQTLCDSHRF

SEQ ID NO: 1637 - DNA, 1221 bp, Sorghum bicolor
atgtcggcggccgggacgctctccggcggcgccgccggtctatccggcctcctccgcctccgccgccgggccgcccccgcccccgcgatcgccgcgccgtcgctccaccccgctgggaccatcaagtgcaccgccgtgcccgatgccgccccgattgtctggggccgccagctccgaccggcgctcctcctccccgcggcactgctcccgtcgtcgcagcccgccaagaagcacaatctgcgcccggccgccgcagccgccgagtccgcaggggaggccaagggtttcctggagaaatacccggccctggtcaccggttttttcttcttcatgtggtacttcctcaacgtcatattcaacatcctcaacaagaagatctacaactacttcccctatccatactttgtgtccttgatccatctagtagtgggtgtcgcatactgcctcgtcggctggagtgtcggtctccccaagcgagcgcctatcaatgccaatctcctgaagctgctctttccagtggcattgtgccatggtattggtcacgtcactagcaatgtgtccttcgctgctgttgcagtctcatttgcccacactatcaaagctctggagcccttcttcagcgcagctgctactcagtttatccttgggcagcaagttcccctctctctgtggatgtctcttgcccctgttgtcattggtgtttcaatggcatcccttactgagctttcgttcaactggactggcttcatcaatgccatgatatcaaacatctcattcacttacaggagcatttattccaagaaagctatgactgacatggatagcaccaacgtgtatgcttacatctcaataattgctctcattgtttgcattccacctgcaataatttttgaagggccccagctaatgtcgcatggatttagtgatgccattgcaaaagtaggtttgacaaagtttgttagtgacctagtcttggttggactgttctaccatctgtataaccagattgctacaaacaccttggagcgagtggctcctctgacacatgctgtcggcaatgtgttgaaacgtgtttttgtcattggtttctcaatcgttgtttttggcaacaaaatttccacacaaactggaattggcacgtccattgccatagcgggtgttgctttgtactcttacattaaggctaagattgaagaggagaaaaggaaaaagagcgcatga

SEQ ID NO: 1638 - protein, 406 aa, Sorghum bicolor
MSAAGTLSGGAAGLSGLLRLRRRAAPAPAIAAPSLHPAGTIKCTAVPDAAPIVWGRQLRPALLLPAALLPSSQPAKKHNLRPAAAAAESAGEAKGFLEKYPALVTGFFFFMWYFLNVIFNILNKKIYNYFPYPYFVSLIHLVVGVAYCLVGWSVGLPKRAPINANLLKLLFPVALCHGIGHVTSNVSFAAVAVSFAHTIKALEPFFSAAATQFILGQQVPLSLWMSLAPVVIGVSMASLTELSFNWTGFINAMISNISFTYRSIYSKKAMTDMDSTNVYAYISIIALIVCIPPAIIFEGPQLMSHGFSDAIAKVGLTKFVSDLVLVGLFYHLYNQIATNTLERVAPLTHAVGNVLKRVFVIGFSIVVFGNKISTQTGIGTSIAIAGVALYSYIKAKIEEEKRKKSA

SEQ ID NO: 1639 - DNA, 1107 bp, Sorghum bicolor
atggctctcaagaagttgctgcagctcttttgtgtcggcaagaaggattccaagaagaaaggcaaatccattgacccactctggcgagcctctgcttccctctcctctgtgagtgtcactgcaaacaagactcatttggatccctgttcaagtgggactggcactgtatgcgtgcaaaaccatgaacctgaatgctcaagtatggtttcctcatgggcaaggacagagcatggaactgagagtactgatcatatgtcttttaaacaatttgatgttgtccaagatttctcggatcaccactatgcaaagacttcagcaggaaaggtcaccaaagattgggtgaaggcaatccaaagtgaatggagtcttctacagaaaaacctacctgaatctatatatgttagagtttatgaggacaggactgatctgctcagggctgcaatagttgggccggctggaactccatatcatgatggcctgttcttcttcgatgtccgttttccttctgaatacccgaagtgcccaccaaaagtttactaccattcgggtggacttcggctaaacccaaacctgtatgagagtgggaaagtctgcctgagccttctgaacacctggtggggcaatggatgcgagaagtggggcaagtcgaattccaccatgctgcaagttttggtctccatccagggccttgtgctgaatgataagccatacttcaatgagccaggaaacaaaaattcagctcaaacaacagctggtgaaaggtattccttggcttacaatcagacgaccttcgtcagatcatgcaagacaatgctgtattcactccggaagcctccaaagcattttgagacccttgtaatgtgccacttcctcaagcatgagcgtgccatcctcgacgcctgcagcgcttacatgtctgggacaatcgtggggtcatctgttgggagcgaccttaaatatgcccgtgacaagtgctttgcagatttccacaagtcactgacgctctacactgaacatctcaggactgagtttgctgcaaacagaagacgcatgcttgagctggagagagaggtgtcacctgcgcaggagatcgtgcctagcagctag

SEQ ID NO: 1640 - protein, 368 aa, Sorghum bicolor
MALKKLLQLFCVGKKDSKKKGKSIDPLWRASASLSSVSVTANKTHLDPCSSGTGTVCVQNHEPECSSMVSSWARTEHGTESTDHMSFKQFDVVQDFSDHHYAKTSAGKVTKDWVKAIQSEWSLLQKNLPESIYVRVYEDRTDLLRAAIVGPAGTPYHDGLFFFDVRFPSEYPKCPPKVYYHSGGLRLNPNLYESGKVCLSLLNTWWGNGCEKWGKSNSTMLQVLVSIQGLVLNDKPYFNEPGNKNSAQTTAGERYSLAYNQTTFVRSCKTMLYSLRKPPKHFETLVMCHFLKHERAILDACSAYMSGTIVGSSVGSDLKYARDKCFADFHKSLTLYTEHLRTEFAANRRRMLELEREVSPAQEIVPSS

SEQ ID NO: 1641 - DNA, 1509 bp, Sorghum bicolor
atgtcgacccgcgccgcctcccgccgctcctcctcgtcgtccgcggccgccaagcgccccgcgatggcggagggcgccaaggcggcgggaaccgccgccgcgcaggccaagaagcgcgccgcgctcggcaacatcaccaacgtcgtcgccgctccggcgggaagggccgccgcccttgggaaggtcgcgccaccggtcaccggcgcgaagttgaattcagctacctcagctgtacccttaaagaagccatctttggcaaatgctcgcaatgcgagctccattcggggttctgctgtgaagtcggcttccatcaagccagctccaccagtaccacgcctcgacagcagcacaaggccgaagcataatgttcctgtgcctgccactgtccatgtgccaagtcgtgctcctgccttggtaccctgcagcagtttcgtgtcgcctgcacgttcaggagattcagtttctatcgatgagacgatgtcgacttgcgactccatgaaaagcccggactttgagtacatagacaatggggattcctcgatgctggcctcgttgcagcgacgggcagatgaacatctgcgtatatcagaggatacagatgttgaagaaaataaatggaagaaaaatgcccctgccccaatggaaatcgaccgcgtctgtgatgttgacaacgacttggaggatccacagttgtgcgctactctggcttctgacatctacatgcatctgcgagaagctgagacaaagaaacgaccatcaactgatttcatggaaacgattcaaaaagatgtcaacccaagcatgagggcaattttgatagactggctcgtagaagttgctgaagagtatcgtcttgttcctgatactttgtacctgacagttaactacattgaccgttatctttctggcaacgaaatcaaccgccaaaggctgcaattacttggtgttgcttgcatgcttatagctgcaaaatacgaggagatatgtgcaccccaagtagaagaattctgctacataacggacaatacatacttcagagatgaggtcctagaaatggaagcttctgtgctgaattatttgaagtttgaaatgacagcacctacagcaaagtgttttttgaggagatttgctcgttctgcacaagcgtgtgatgaggatcctgctttgcatctcgagttcctcgccagttacatcgctgagctatcccttctggagtacaatctactatcctaccctccatcactaatagctgcttcggctattttcttggcgaggtttatactccagccaacaaagtatccttggaactccacactttctcattacacacagtacaagccgtccgaattgagcgactgtgtaaaggcattgcaccgccttttcagcgttggtcctgggagcaaccttccagcaatcagagaaaagtacagtcaacataagtacaaatttgttgcgaagaagcagtgtccaccacaaatccctaccgaattcttcagggatacgacatga

SEQ ID NO: 1642 - protein, 502 aa, Sorghum bicolor
MSTRAASRRSSSSSAAAKRPAMAEGAKAAGTAAAQAKKRAALGNITNVVAAPAGRAAALGKVAPPVTGAKLNSATSAVPLKKPSLANARNASSIRGSAVKSASIKPAPPVPRLDSSTRPKHNVPVPATVHVPSRAPALVPCSSFVSPARSGDSVSIDETMSTCDSMKSPDFEYIDNGDSSMLASLQRRADEHLRISEDTDVEENKWKKNAPAPMEIDRVCDVDNDLEDPQLCATLASDIYMHLREAETKKRPSTDFMETIQKDVNPSMRAILIDWLVEVAEEYRLVPDTLYLTVNYIDRYLSGNEINRQRLQLLGVACMLIAAKYEEICAPQVEEFCYITDNTYFRDEVLEMEASVLNYLKFEMTAPTAKCFLRRFARSAQACDEDPALHLEFLASYIAELSLLEYNLLSYPPSLIAASAIFLARFILQPTKYPWNSTLSHYTQYKPSELSDCVKALHRLFSVGPGSNLPAIREKYSQHKYKFVAKKQCPPQIPTEFFRDTT

SEQ ID NO: 1643 - DNA, 1089 bp, Sorghum bicolor
atggctggtggtgctcatcaacaggtggtggttgtgctcgctatggtggcgctcatggtgacggcggccgagggtttcatctccaagaagacatggagcgccatccggcgagcggaccgcgacggcccctttgtggggctggtggtgcccaacacctacgagatggaccccgtcctaagctctcctgacttcaagcctagcaacaacatccccattctagatgtccaagggcgacgattccgcttcggaactattggaagccaaaacgttgtcatggtcatgactgggctgagcatgctgaatgcagggctcaccacccagctgctgctgagcctgttcagggtgaaaggcatcgtccactggggcatcgccggcaacgccaacgaggaccttcagatcggcgacgtgaccatccccgagtcctgggcgcacctgtccctgtggaactggcagaggcacggcgatggtgcggagaacgagctgccgctggagagcgccggcgactacacgagggagtacggcttcctcaacttctccgactacactgtcggccaggccaacccggagctgtcggcgaacactctgaacagcgtgtggtaccagccggaggagatcttcccgatctccggcacgccggaggagcggcagcacgcgttctgggtgcccgtcagcaagcgctactacaggctcgccgcgaagctggaggggatggagctgccggcgtgcgtgaacgagacgacgtgcctgccccgtgcgccccgggtgacgcgtgtgcccaggggttgcagcgccaacatctacaccgacaacgccagctaccggcagttcatccgcgctcacttcgggtgcacccccgtggagatggagagcgccgccgtggcgctcgtggcgcaccagcacggcgtccccttcattaccatccgctccctctccgacctcgccggcggcggctcgtctctcagcaacgaggccgccacgttccttgacatcgcggccaagaacgccgtcgacgtcatgctcaagttcgtgcccctccttggccgcggtggcgagcaggagcaggccgacggtctggcccaagacatgtaa

SEQ ID NO: 1644 - protein, 362 aa, Sorghum bicolor
MAGGAHQQVVVVLAMVALMVTAAEGFISKKTWSAIRRADRDGPFVGLVVPNTYEMDPVLSSPDFKPSNNIPILDVQGRRFRFGTIGSQNVVMVMTGLSMLNAGLTTQLLLSLFRVKGIVHWGIAGNANEDLQIGDVTIPESWAHLSLWNWQRHGDGAENELPLESAGDYTREYGFLNFSDYTVGQANPELSANTLNSVWYQPEEIFPISGTPEERQHAFWVPVSKRYYRLAAKLEGMELPACVNETTCLPRAPRVTRVPRGCSANIYTDNASYRQFIRAHFGCTPVEMESAAVALVAHQHGVPFITIRSLSDLAGGGSSLSNEAATFLDIAAKNAVDVMLKFVPLLGRGGEQEQADGLAQDM

SEQ ID NO: 1645 - DNA, 2367 bp, Sorghum bicolor
atgtacaatgtttgcacaggtggcaaaaggtggcacaatcatcttaacccagccataaacaaggaggcatggacgcaagaagaggagattactcttattcatgctcatcggatgtatggaaataaatgggctgaactgacgaaatttttacctggaaggacggataatgcaattaaaaatcactggaacagttcagtaaagaaaaaggttgattcatacatatcttctggcttactttcacaagtcccatgcctccctctgattgaatatcctgcacaatgcgattctttatcatctatggaccaagaaaacaacggagatagtgtttgcaatgctcagaacactagcatggccttgagctctgatttacaagtaaatgtggatgccaacaagagagaagcacaagactctcactcgtccttgtgtcaaggggcatgctatccttccacagaggctgtaggatctgttttgcctgatgagaaccaccatgttccttcatctttttctcaaagaatggacctgcagatggatatggatgaaggatcaggaaattctatgtttgcagatgatcaaactctttgtagcacatcaaatcaagaaaagtctatggtgccatttgttgttgcacaggaaatgcctgtctctgtgctatcaggtgtttctagcgctgagcagaaactgcacttaatctctgatgctgaaagtttgaaatctgaactttggaaagatgtttctttgcaaactcttatttcaggagttacagttgacgctgatgcttcaagattaaatcatccagattcttccaaaatggacaccaattttttgacacaggcctacccattacacacatcaaatccatccggtgtgatggaaactgtgtatgaaccgatgccgtcggagacaatctctccctcttttatatgttcagatggtttgtctgttgcacccgaaaatagatctgagccaagagaaatgccagactgtgaagcacagatggccacatcctcaaacattttttgtgatggcgatcaatctgctatacctggcagcagtgatgacaggccagaggctttcacgatgactgagagcattacaaactgtgggggtcaacagtcaacagatgccgaagaacctatggccactacagcaaaagaacagttatcgaaagacattgagactgtgccagatgaaaagaagggtgagggagctctattctatgaacctcctcgattccctggtttggatgtcccatttatcagttgcgatcttgtaacttctgctgatctgcaagaatttagtccccttgggattaggcagtggatgcggtcgaccatgaatgtccccactcctttaagattatggggctctccaacacatgatgaaagcccagatttgctaaagagtgctgctgaaagcttcccatgcacaccatcaataatgaagaaaagacagagaggtctattgtcccctactccagataaaagaattgagaagaaatctgggattgcaaagggggtgacagatatctcctatatgatcacgaccacatgttccatgaatgcaaccaacgatggagacattgttactgaatcagttgtgtgtgctgagcaaccttcttttaaacatctagacaagaaacttgagttctctaatatcaacatggaaaactctgatggagcatctaaacaggccaaagatccacaaaatgcagggaacaaacgactcgtggaggagtcctcgccaaacgttgcaaatcctaacactgatctgcaagacaatatacaacctgtacggattcttgttgagcacagcagcaataaccttattgctgctgatcatggtgcaaagccatcttgtaaggaagtaattagttcaaaatcaaagcctacagaactacttgttgaaaaatcatcaccatgtatcaatgcggattacgaatatgtgaacttattggctgataccccaggtgtcaaaagaggtttggaatctccttctgcatggaagtctccttggtatattgatatgcacatgcactttcagggttttgtcagcccagcagacagaacttatgacgcattaggattagtgaagcatttaagtaagcacagtgctgctgctgcagtggaggcctgtgaggtgctagcaagtggcaacaggacttctgataaggaaaacaaggataatactgatggcaaggagccagtggcaagaaaatcacaggtcaaaatcatggccgaggcgcgagtcctggatttcgacgaatcttccacacctgcaaggacagcagataagaaatttggcagctgtctcgggagatctgttagctcacccattcttccctcccccaacctgagaagtttccgatag

SEQ ID NO: 1646 - protein, 788 aa, Sorghum bicolor
MYNVCTGGKRWHNHLNPAINKEAWTQEEEITLIHAHRMYGNKWAELTKFLPGRTDNAIKNHWNSSVKKKVDSYISSGLLSQVPCLPLIEYPAQCDSLSSMDQENNGDSVCNAQNTSMALSSDLQVNVDANKREAQDSHSSLCQGACYPSTEAVGSVLPDENHHVPSSFSQRMDLQMDMDEGSGNSMFADDQTLCSTSNQEKSMVPFVVAQEMPVSVLSGVSSAEQKLHLISDAESLKSELWKDVSLQTLISGVTVDADASRLNHPDSSKMDTNFLTQAYPLHTSNPSGVMETVYEPMPSETISPSFICSDGLSVAPENRSEPREMPDCEAQMATSSNIFCDGDQSAIPGSSDDRPEAFTMTESITNCGGQQSTDAEEPMATTAKEQLSKDIETVPDEKKGEGALFYEPPRFPGLDVPFISCDLVTSADLQEFSPLGIRQWMRSTMNVPTPLRLWGSPTHDESPDLLKSAAESFPCTPSIMKKRQRGLLSPTPDKRIEKKSGIAKGVTDISYMITTTCSMNATNDGDIVTESVVCAEQPSFKHLDKKLEFSNINMENSDGASKQAKDPQNAGNKRLVEESSPNVANPNTDLQDNIQPVRILVEHSSNNLIAADHGAKPSCKEVISSKSKPTELLVEKSSPCINADYEYVNLLADTPGVKRGLESPSAWKSPWYIDMHMHFQGFVSPADRTYDALGLVKHLSKHSAAAAVEACEVLASGNRTSDKENKDNTDGKEPVARKSQVKIMAEARVLDFDESSTPARTADKKFGSCLGRSVSSPILPSPNLRSFR

SEQ ID NO: 1647 - DNA, 501 bp, Sorghum bicolor
atgacgcagcagtcgatggtggcgctggtcgccgccggcgtcctcctcctcgccggcgtggcgtcggcggagaaggcgggcgggttcgtggtgacgggtcgcgtgtactgcgacccctgccgcgccgggttcgagacgaacgtgtccaagagcgtggcgggcgcgacggtggaggtggtgtgccggcacttcgaggcgagcaaggagacgctcaaggcggaggcgacgacggacgacttcgggtggtacaagctggagatcgaccaggaccaccaggaggagatctgcgaggtggtgctcaagaagagccccgacccggcgtgcgccgagatcgaggagcagcgcgcccgcgcccgcgtcccgctcacctccaacaacggcatcaagcagaagggcacccggtacgccaaccccatcgccttcttccgcaaggacccgctcaaggagtgcggcgcaatcctccagaagtacgacctcaaggacgcatccgacacgccatga

SEQ ID NO: 1648 - protein, 166 aa, Sorghum bicolor
MTQQSMVALVAAGVLLLAGVASAEKAGGFVVTGRVYCDPCRAGFETNVSKSVAGATVEVVCRHFEASKETLKAEATTDDFGWYKLEIDQDHQEEICEVVLKKSPDPACAEIEEQRARARVPLTSNNGIKQKGTRYANPIAFFRKDPLKECGAILQKYDLKDASDTP

SEQ ID NO: 1649 - DNA, 855 bp, Sorghum bicolor
atggcggagcagtcgcagccgcacgaggaaggcggcgcgagccccaagcacgagtcgctgatggagaagctcgccgacaagctccacgtcggcggcggcggcaagggcgactcctcgtcgtcctcggactcggacaacgacgagcggccccgcccctcggcgccgcccgccgacgaggtcaagcagacctccttctccgactccgccgccacggcggccgccgaggccaaggcgaaggtgttccgcctcttcggccgcgagcagcccatccacaaggccctcggtggtggcaagcctgctgatgtgttcctgtggaggaacaggaacatctctgctggagtacttggtggtgccacagcaatctggatcctatttgaattgcttggctaccatcttcttacttttgtttgccacggtctcatattctctctgggtgttctctttctctggtctaacgcttcatcgtttatccacaaggctccccctaagatcccagaggtgatcattcctgaagatttagttgtcaacattgcgctatccactcgttatgagatcaacagggcctttgccaatctccgccagattgctcttggccgggacataaagaagttcctaatggttattgctgggttttggttcctttctgttcttggaagttgctgcaacttcttgaccttggtttacattgtctttgtggtgctgcacacagtacctgtgctgtatgagaagtatgaggatcacattgactcgtatggcgagaaggggtggattgagattaagaagcagtacgctgtgtttgatgagaaggttctgagcaaagtaccaaggggtcctgcgaaagacaagaagcactag

SEQ ID NO: 1650 - protein, 284 aa, Sorghum bicolor
MAEQSQPHEEGGASPKHESLMEKLADKLHVGGGGKGDSSSSSDSDNDERPRPSAPPADEVKQTSFSDSAATAAAEAKAKVFRLFGREQPIHKALGGGKPADVFLWRNRNISAGVLGGATAIWILFELLGYHLLTFVCHGLIFSLGVLFLWSNASSFIHKAPPKIPEVIIPEDLVVNIALSTRYEINRAFANLRQIALGRDIKKFLMVIAGFWFLSVLGSCCNFLTLVYIVFVVLHTVPVLYEKYEDHIDSYGEKGWIEIKKQYAVFDEKVLSKVPRGPAKDKKH

SEQ ID NO: 1651 - DNA, 129 bp, Sorghum bicolor
atggccggatggaagagagcgtccttcagtccactcaggggcggtgctagggtcgaattagctgccgactcattcacccacatgccaagcaaacggccatggaaacgagctagctttgcagatgagtga

SEQ ID NO: 1652 - protein, 42 aa, Sorghum bicolor
MAGWKRASFSPLRGGARVELAADSFTHMPSKRPWKRASFADE

SEQ ID NO: 1653 - DNA, 291 bp, Sorghum bicolor
atggcggcgaacggcggcgtccgggaggcggcgaggtacggcgccggcagcgggaagaggcgggacctgcagcagcatcaggcggccggcggcgggtgcgggcactacttccagatgccgctgcactacccgaggtacagtcgggaggactacgaggccatgcccgagtggcagctcgaccgcctcctctccgagtacggcctgcccgtcgccggcaccgtccaccacaagcgcaccttcgctatgggagccttcctctgggccgccgccgccggcaacaaccactcatga

SEQ ID NO: 1654 - protein, 96 aa, Sorghum bicolor
MAANGGVREAARYGAGSGKRRDLQQHQAAGGGCGHYFQMPLHYPRYSREDYEAMPEWQLDRLLSEYGLPVAGTVHHKRTFAMGAFLWAAAAGNNHS

SEQ ID NO: 1655 - DNA, 3819 bp, Sorghum bicolor
atggatgccacggatgttcaacagagcatgggatttatggagtccaggggtggtatgcctaagtttttccatgcccttggaccggcactcctgatttcaatggggtacattgatctcgggaagtgggtggcagcagttgaagctggttctcgttttggattcgacctggtgttactggctctccttttcaactttactgccattgtatgtcagtaccttgctgcttgcattggcactgtcacagggaagaatcttgcagagatatgccaccaagagtacaaccagccaacatgtattttcctgggtgttcaagctggattgtccttgttgacatcagagctgactatgatttttggcatagcactcggattcaacctcctgtttgaatatgatgatctcatcacagggatatgctttgcaacagtggtgcctaatctgctaccatatgctatatcccacctgggaaagaagatggaagggacagtaaatgcctgcatagcaggatttgcacttcttagttatgtgcttggcttattggttagccagccacaaattcctctcacaatgaatgtaatattccccaagatcagtggtgagagtgcttactctctgatggcacttcttggtgcaaacataatggcacacaacttctacattcattcatcagttgtccagggtcagaaaaagtcgtctgcagttggtcttggcgccttatttcacgaccatcttttttcaatattgttcatttttactggaatctttatggtgaactatgttctaatgaactctgcagcagcggaatctactaatactcttctcattaccttccaagatgttgtagagctaatgaatcagatatttgtaaatcctctggcaccaactatatttttagtggttcttctcttctccagccacatcatctcgctgacatctgctatcggtagccaagtgatttcacagcatttatttggtataaaccttcctctttctggacatcgtctcctgctgaaggtttttgccatagttcctactctgtactgggcgaaagttgcaggagctgaagggatataccaattattaattatatgtcagattatccaggccatgctccttccatcttcagtcatcccactttttcgtgttgcttcatccagatcaataatgggagcccatagagtgtctttgcatctggagatactggtttttcttgcatttctccttatgctattttcaaatatcatatttgtggcagaaatgctatttggtgacagtggctggatgaacaatctgaaaggatatactggaagccctgtggtgctcccatatactgttttcattttagttgcatgtgtatctgtggctttttcactgtacctggctgttacaccattgagatctggaagtcatgaagctgaatcccatgaatggtctgtgcattctcagagagaactcttgaatactcctcaagaaagggaagatgttaaggtggacaatgttacctatgaggaagatcagagatcagatgttggcccttctcccagggatgcgcctgacagccatccggagctggccatggactatattgatacttctgacactgctgtagaatctgatcacgactctcaacaatctactgcatatgcatccactgctcctgaaacctgcccctccccgtcatttactcgtgaggagtcaaaatcagttgttgcagtcaactggccggagcctttggagaaggttcctacttctactgtgatagaggaaagcacagtagaaagtgtggtctctaggatcacgactgaaagagatgttttagtagaaacagatgttttctcaggcaaggataaggaagatacacatgttttggagtctgagaagtcaattgttgatagcaccccttgtgtgtctgatgatggtccaccatctcttaccttcagcaggggaaaaggctcagatgcaggaaatggcaatggtagtctctcgaggctatccggtttgggccgtgcggcaaggaggcagctagctgctactcttgatgagttctgggggcatctgtttgattaccatggtaagctcactcaagaagccagcacaaaaaagtttggtatcttgcttgggatagaccttagaacacctaccacagctgtaagaacggataagcaagctgttgaaatacccaagagcccactggtgagagactcaatgcggggggcagcttttttgtcaagttcagtggacctgatgtcccctaagaatgagacatcgaatttggaacttgcatatgggcttcagaggggaccggccatgggattgtcaagctggtctcagggtatgcagctaccaaacacacagctgcagagctcaagcaacagcctacttgagcaaagtgcaagattaaactcaaattttagtgcgccatcttattcagacaacaatcaattctaccaacctgcaacaattcatgggtaccagctcacatcttacttgaaacagatgaatgccagcagaaacccttactctagcatgccactggacccacagcggcttccaaaatcatctgtgtctgctgtgccaacctatgttgattccatgatgaatgctcgtaatcataatctgcttgcttcactgggtgctactccttcacagattcctgcaacatcccgtgtaggctcaatgatgcctgaaagatcgtattacgatccttccactgttgatgggaatgaaaattctggttcgcctgcttactcaaaaaagtaccacagctcacctgatatgtctggaataatcgctgcaagtagagctgcactgttgaatgaagcaaagttgggtggtgccattggaccccagtcataccttagcaggctggcgtcagaaagatctcaatatgcaaactcagcagccaggcctgcggctccattagcatttgatgagctttcacctcctaagctccagagtgatatcttctcggcgcagtcgagcatgagcccaagtgctagatccctttgggctaagcaaccatttgagcaactgtttggcatgtcaagtgcagagctcagtaaaggtgacttcaatctttcaggcagatcaggtggcatggccaaggatgatttctcttataaggaatctgagacaaagcttcttcagtccctcagattctgcattatgaagctccttaagctagagggatcagggtggctgttcaagcaaaatggtggttgcgatgaagaactaattgaccgagttgctgcatctgagaagctattgatgcaagggactactgagaatcaactgcttcatggtgatcttcagcaacatacttctgatcaggtgggcatccaatacatgcgcacacttcccaactgtggggaggactgtgtttggcgcgcatcactcgttgttagttttggtgtctggtgcatccgccgagtgctggacatgtctctagtggaaagcagaccagaactttgggggaagtatacctatgtccttaaccgtcttcagggaatcttggacccagcattctccaagcctcggagtgctctgaccatatgtgcttgtcttcagaaagacatcagagtgctcaatagtccacccggcagtgggctaacagccatgggtcccatccccataccaatccgtggcaccttcacaactgcaggtgtggttctggagacgatcaaggatgtggagaccgcagtctcaggccgcaagggcaggagtggcacagcagcgggcgacgtcgccttccccaaggggaaggagaacctggcctctgtgctgaagcggtacaagcggaggctcgccagcaagggacagtag

SEQ ID NO: 1656 - protein, 1272 aa, Sorghum bicolor
MDATDVQQSMGFMESRGGMPKFFHALGPALLISMGYIDLGKWVAAVEAGSRFGFDLVLLALLFNFTAIVCQYLAACIGTVTGKNLAEICHQEYNQPTCIFLGVQAGLSLLTSELTMIFGIALGFNLLFEYDDLITGICFATVVPNLLPYAISHLGKKMEGTVNACIAGFALLSYVLGLLVSQPQIPLTMNVIFPKISGESAYSLMALLGANIMAHNFYIHSSVVQGQKKSSAVGLGALFHDHLFSILFIFTGIFMVNYVLMNSAAAESTNTLLITFQDVVELMNQIFVNPLAPTIFLVVLLFSSHIISLTSAIGSQVISQHLFGINLPLSGHRLLLKVFAIVPTLYWAKVAGAEGIYQLLIICQIIQAMLLPSSVIPLFRVASSRSIMGAHRVSLHLEILVFLAFLLMLFSNIIFVAEMLFGDSGWMNNLKGYTGSPVVLPYTVFILVACVSVAFSLYLAVTPLRSGSHEAESHEWSVHSQRELLNTPQEREDVKVDNVTYEEDQRSDVGPSPRDAPDSHPELAMDYIDTSDTAVESDHDSQQSTAYASTAPETCPSPSFTREESKSVVAVNWPEPLEKVPTSTVIEESTVESVVSRITTERDVLVETDVFSGKDKEDTHVLESEKSIVDSTPCVSDDGPPSLTFSRGKGSDAGNGNGSLSRLSGLGRAARRQLAATLDEFWGHLFDYHGKLTQEASTKKFGILLGIDLRTPTTAVRTDKQAVEIPKSPLVRDSMRGAAFLSSSVDLMSPKNETSNLELAYGLQRGPAMGLSSWSQGMQLPNTQLQSSSNSLLEQSARLNSNFSAPSYSDNNQFYQPATIHGYQLTSYLKQMNASRNPYSSMPLDPQRLPKSSVSAVPTYVDSMMNARNHNLLASLGATPSQIPATSRVGSMMPERSYYDPSTVDGNENSGSPAYSKKYHSSPDMSGIIAASRAALLNEAKLGGAIGPQSYLSRLASERSQYANSAARPAAPLAFDELSPPKLQSDIFSAQSSMSPSARSLWAKQPFEQLFGMSSAELSKGDFNLSGRSGGMAKDDFSYKESETKLLQSLRFCIMKLLKLEGSGWLFKQNGGCDEELIDRVAASEKLLMQGTTENQLLHGDLQQHTSDQVGIQYMRTLPNCGEDCVWRASLVVSFGVWCIRRVLDMSLVESRPELWGKYTYVLNRLQGILDPAFSKPRSALTICACLQKDIRVLNSPPGSGLTAMGPIPIPIRGTFTTAGVVLETIKDVETAVSGRKGRSGTAAGDVAFPKGKENLASVLKRYKRRLASKGQ

SEQ ID NO: 1657 - DNA, 525 bp, Sorghum bicolor
atgggcaacatgctgccatgcctggtccaacaagcaggcacaacaggtgctctgccggccagcatgaaccccaagcggaggctcatctcactcaagctcctcatgaaggccatccacaagatgaagaagaggcccgccggtcccggcaaggcggcggccaagatagatagcagcaaatcgtcgtcgtcagcggcggcggaggacgggaaaggaggagaagtgcttgatgaggcgagaagcaaggccgccagccgcaccaacaatcccaagggtgccgtgctgaggtccaggctccacggccggagaggtgacctgcaggtcaagaaagggaataagggcgtcgtgcgagtgaaggtggtcctgaccaaggaggaggccgcgcggctgctgtccctgaccgtcggcggccagaagcacaccgccgcgcagatcgtggccgagatgaggaagatggaggcccgccgcgccgccgccaatgccgcatggcgcccggcgctggccagcatcccggaggagtcgtcgtag

SEQ ID NO: 1658 - protein, 174 aa, Sorghum bicolor
MGNMLPCLVQQAGTTGALPASMNPKRRLISLKLLMKAIHKMKKRPAGPGKAAAKIDSSKSSSSAAAEDGKGGEVLDEARSKAASRTNNPKGAVLRSRLHGRRGDLQVKKGNKGVVRVKVVLTKEEAARLLSLTVGGQKHTAAQIVAEMRKMEARRAAANAAWRPALASIPEESS

SEQ ID NO: 1659 - DNA, 1152 bp, Sorghum bicolor
atggcgaagcggccgggcgttctgtgggcagccgcgttggcggtggtggtgcttgcggcgtgcacggccgccgccgccgccgtgaccatctcgcggaagcagcaccatcgcggcgggtcgtcggcgtcgtcggcggcgcggtcctgcgcccccttcgcggcgtcgggcgcgtgggtggtggacgagtcgtacccgctctacgactcggcgcggtgccccttcatccgcgacgagttcgcgtgcgcgcgcttcggccgccccgacaccatgtacctcaagtaccggtggcacctcgacgcgccgtgcgctcagcccaggttcgacggcgcggcgctgctgaagatgtggagtggcaagacggtgatgttcgtgggcgactcgctggcgctgaaccagtacgagtcgctgctgtgcatgctccacgccgcggcggggcccggcgtgcggaccagcctgtcgccggcgtccgggaagatcgacccctcctccaccgtccgcttcgaggactacaacgtgaccgtcgtgtactacctgacgcactacctggtggacctcgtgacggaggcgtccggccggcgcgtcctcaagctcgacaccatcgaccaggcccgcgactggctcgccgccgacgtgctcgtcttcgactcctggcactggtggccgcgcaccggccccacgcaaccctgggactacatccaggtgggcaacacggtggtgaaggacatggaccgcacgcaggccttcaccaaggcgctgcgcacctgggccagctgggtcgacgccaaccttgtccacaccgacaccaaggtcttcttccagggcatctcgccctctcactacaggggccaggactggggcgcgtcgccgaagaagacgtgcatgggggagacgcggccgctcaacggcactacgacgggagcgtacccgggcgggccgatcccgcagcaggcgatcctgcgcggcgtgctggccgggatggccaagccagtctacctgctcgacttcacctacctgtcgcagctccgcaaggacgcgcaccccaccaagtacgacggcggcatcttcggcggcgactgcacgcactggtgcgtcgccgggctcccggacacctggaacgtcctcttctacgccgcgctcaccgggcaggactga

SEQ ID NO: 1660 - protein, 383 aa, Sorghum bicolor
MAKRPGVLWAAALAVVVLAACTAAAAAVTISRKQHHRGGSSASSAARSCAPFAASGAWVVDESYPLYDSARCPFIRDEFACARFGRPDTMYLKYRWHLDAPCAQPRFDGAALLKMWSGKTVMFVGDSLALNQYESLLCMLHAAAGPGVRTSLSPASGKIDPSSTVRFEDYNVTVVYYLTHYLVDLVTEASGRRVLKLDTIDQARDWLAADVLVFDSWHWWPRTGPTQPWDYIQVGNTVVKDMDRTQAFTKALRTWASWVDANLVHTDTKVFFQGISPSHYRGQDWGASPKKTCMGETRPLNGTTTGAYPGGPIPQQAILRGVLAGMAKPVYLLDFTYLSQLRKDAHPTKYDGGIFGGDCTHWCVAGLPDTWNVLFYAALTGQD

SEQ ID NO: 1661 - DNA, 1101 bp, Sorghum bicolor
atggtgcatgagcagagcagcggcaaccaccaccaccaccaccagcagcagctgccgaggttcggcgcccgcgccggcgcgggcgcggccaccggcgtgtcgcggccgtcgaagaagagcaaggtcaacaaggccccgcagcgcggcctcggcgtggcgcagctcgagaagctccggatggaggagcagaagaagatggagggagccgccaccgccatgtcggtgtcgggggccgcgcacctcggcggcgcatgcggtgggctcggccacctcctcccgatgcaccctcctcctccaccgccgccgctgtcgctcagcgccctgccgaggcccggcgcggacggcggcggcgtgcactgcggctacccgccggtgctctgggacccgtcgtccgcggaccccatgaagaatctgtacaagaggagcctgtgctcgcagccttcacttccatcggtgagcacgggcttgtcgctgacggcgtcgtcgagccacccaacggagcccccttcaaaccaaatgtacagcagcagcagcagcagcgtttgcaggagcagcgcggcggcgccggcgccggccgacgacgagagggaggcggccggcgtggatcgatcctggcccttcatgttcgagggcctcaacacgactgccttccggacgacgatgggcaaagcgcctttcgcccccaggacgacgagagaggccgccgccggcttgcctgatgtctgtcctgacctgagcagatacgagttcagagcctcaaactatctcagctcgaatgcgagttattcagactggccatcggagtttgggcactgcaagagcagcaaggacagcgaggctgcctaccttaccttgaacgcacagcccacgccacgcatgaagtcgcagcagcctcctgcgctccccccgatccacctcccggagttcggcgacttcggcgtcatgcagtctcagcatgggagcgcttcagcgtcgtcgtcgtcgtcgtcatcgcggccgttctacagcttcatgccggttggcccagttcgctgcgagagaccgctgagcgagatcaaggccgacgcctctgacggcgtcgacctggagctgaagctgtga

SEQ ID NO: 1662 - protein, 366 aa, Sorghum bicolor
MVHEQSSGNHHHHHQQQLPRFGARAGAGAATGVSRPSKKSKVNKAPQRGLGVAQLEKLRMEEQKKMEGAATAMSVSGAAHLGGACGGLGHLLPMHPPPPPPPLSLSALPRPGADGGGVHCGYPPVLWDPSSADPMKNLYKRSLCSQPSLPSVSTGLSLTASSSHPTEPPSNQMYSSSSSSVCRSSAAAPAPADDEREAAGVDRSWPFMFEGLNTTAFRTTMGKAPFAPRTTREAAAGLPDVCPDLSRYEFRASNYLSSNASYSDWPSEFGHCKSSKDSEAAYLTLNAQPTPRMKSQQPPALPPIHLPEFGDFGVMQSQHGSASASSSSSSSRPFYSFMPVGPVRCERPLSEIKADASDGVDLELKL

SEQ ID NO: 1663 - DNA, 2535 bp, Sorghum bicolor
atggtgacggcgaaggaggccgcggcggcggccatggacgccagcaagtacgtgcggtacacgccggagcaggtggaggcgctggagcggctctactacgagtgccccaagccgagctcgctgcgccgccagcagctcgtccgcgactgccccgtcctcgccagcgtcgaccccaagcagatcaaagtctggttccagaaccgcaggtgccgggagaagcagcggaaggagtcgtctcggttgcaggcgctgaaccggaagctgacggccatgaacaagctgctcatggaggagaacgaccgcctgcagaagcaggtctcgcagctcgtctacgagaacggctactaccgccagcagacgcagcagagcgcggggctggcgaccacggacacgagctgcgagtcggtcgtcaccagtggccaccagaacgtggccgcggcggcgccacaagcgcagccgcgcgacgcaggccctgctgggctcatgtccatagcggaggagacactgacggagtttctgtccaaggccacggggaccgccgtcgagtgggtccagatgcccgggatgaagcctggtccggattccattggaatcatagccatctcgcatggttgcgcgggtgtggctgcgcgagcttgcggcctcgtgggcatggagcctgccaaagttgctgaagtcctcaaggatcggctgctgtggctacgcgattgccgatctatggaggtggtgaatgttcttcctgccggtaacaatggcacaattgagcttctctacttgcagctctatgcccccacaacgctggcgccagctcgggacttctggttgctgcggtacacctccattcttgatgatggaagtttagtggtatgtgagagatcactcagtaccaagcagggtggcccaagcatgcctcttgtccagccttttatcaggggtgagatgcttcctagtgggttcttgattcggcctagcgacggtggaggcagtgttatacacatcgttgatcatattgacttggagccttggagcgtgcctgaagttgtgcggccactgtatgaatcatctgcaatggttgctcagaagatgtcaatggcggctttgcgctatcttaggcaggttgctcatgaagatacccattctgtaataaccggatggggacggcagcctgctgctttacgggctctgagccaaaagctcaccagaggtttcaatgaagctcttaatgggcttgctgatgatggatggtctgtggttgaaagtgatggagtggatgatgtttgtatctctgtcaactcatccccgagtaaagtgatcaactgcaatgcaactttcaataatggattgcctgtagtcagtagcagtgtactctgtgcaaaggcatcgatgctgctgcaggatgtttctccgccagcactcctgcgctttatgcgggaacagcggtcgcagtgggctgacagcaatttagatgcattctttgcttctgcaatgaaaccaaatttctgcaatttgcctatgtctcgccttggaggatttagtggtcaggtcatacttcctttagcccacacgtttgaccctgaagaattccttgaggttataaaattagggaatgccagtaattatcaagacgcactcctgcaccgtgatctgtttctgttacagatgtacaatggggtagacgagaatatggtaggaacttgttcagagctcatctttgcccctatagacgcatcattcagcgatgactctccactgctcccatctggtttccgcatcattccgatcgacgctcctctcgacacatctagccccaagtgcacattggacctagcctccacccttgaagttggaactcccagaagcaggataaatggcagcggtcctggaaatgctgcttctgctggctcaaaggctgtgatgacgatcgtgtttcagtttgccttcgagagccatctgcaggacagtgttgcagccatggcaaggcagtacatgcgaagcatcattgcatcagttcagaggatcgcgctggcgctctcctcctcacgcctcgttcctcatggcagcagcatcagtcacactcctgctagtccggaggcaaccacgcttgccagatggatctgccagagttacagatttcattttggggctgagcttatcaaatccggagatggtagcggctgtgaaggagtgctaaaaaccctttggcatcatgccagtgctatactctgctgctctttgaaggccttgccggtgttcacgttcgcgaaccagtctggcctggacatgctggagacaaccctggtggcgctccaggacatcaccctggagaaagtgttcgatgaccaagggaggaagaacctgtgcgcggagctccccggcatcatggagcaggggttcacgtgcatccccagcgggctgtgcgtctccggcctgggccggccggtgtcgtacgagaaggcgctggcgtggaaggtgctcgacgacgacagcggcgcgcactgcatctgcttcatgttcgtcaactggtcgtttgtgtaa

SEQ ID NO: 1664 - protein, 844 aa, Sorghum bicolor
MVTAKEAAAAAMDASKYVRYTPEQVEALERLYYECPKPSSLRRQQLVRDCPVLASVDPKQIKVWFQNRRCREKQRKESSRLQALNRKLTAMNKLLMEENDRLQKQVSQLVYENGYYRQQTQQSAGLATTDTSCESVVTSGHQNVAAAAPQAQPRDAGPAGLMSIAEETLTEFLSKATGTAVEWVQMPGMKPGPDSIGIIAISHGCAGVAARACGLVGMEPAKVAEVLKDRLLWLRDCRSMEVVNVLPAGNNGTIELLYLQLYAPTTLAPARDFWLLRYTSILDDGSLVVCERSLSTKQGGPSMPLVQPFIRGEMLPSGFLIRPSDGGGSVIHIVDHIDLEPWSVPEVVRPLYESSAMVAQKMSMAALRYLRQVAHEDTHSVITGWGRQPAALRALSQKLTRGFNEALNGLADDGWSVVESDGVDDVCISVNSSPSKVINCNATFNNGLPVVSSSVLCAKASMLLQDVSPPALLRFMREQRSQWADSNLDAFFASAMKPNFCNLPMSRLGGFSGQVILPLAHTFDPEEFLEVIKLGNASNYQDALLHRDLFLLQMYNGVDENMVGTCSELIFAPIDASFSDDSPLLPSGFRIIPIDAPLDTSSPKCTLDLASTLEVGTPRSRINGSGPGNAASAGSKAVMTIVFQFAFESHLQDSVAAMARQYMRSIIASVQRIALALSSSRLVPHGSSISHTPASPEATTLARWICQSYRFHFGAELIKSGDGSGCEGVLKTLWHHASAILCCSLKALPVFTFANQSGLDMLETTLVALQDITLEKVFDDQGRKNLCAELPGIMEQGFTCIPSGLCVSGLGRPVSYEKALAWKVLDDDSGAHCICFMFVNWSFV

SEQ ID NO: 1665 - DNA, 1335 bp, Sorghum bicolor
atgggagggtccgggaagtgggtcaagtcgctcatagggctcaagaagcccgacaaggaagactgctgcaaggaaaagctgcaattcccatcagtgcatggaggactgcgaggcaagggccgcaagtggaagctgtggcggacctcctccggcgaccagggctccatctggcgcggctccagaggcggcagccagcgctcggcggcgtcggaggcctcggacgacgcgtcctcggtggccgcccccgccgacccgttcacggccgccgtcgccaccgtcacccgcgccccggcgcgggacttcatggccgtccgccaggagtgggccgccatccgcatccagaccgcgttccgcgggttcttggctcgccgtgcgctgagggcgctcaaggggctggtgcggctgcaggcgatcgtgcgcgggcggcaggtgcggaagcaggcggcggtgacgctgcgctgcatgcaggcgctggtgcgggtgcaggcgcgcatccgggcgcgccgcgtgcgcatgtccaccgagggccaggccgtgcagaagctgctcgaggcgcgccgtacccagatggacatcctcagggaagcagaggaaggatggtgtgacagtcaggggacacttgaacaagtgagggtgaagctgcagaagcggcaggagggcgcaatcaagcgcgagcgagctattgcgtacgcatattcacagcaggctgatggtgctgccaaatgcaatcagccaccgaagcttacttccaatggccgggtgaacccctccggtatgctgctcaagcaccagaattttgacaagagcaatgtcaactggagctggctggagaggtggatggcagcacgcccatgggagaatagattgatggaggagcacaaccagaccaactccagctcccctgacttccggtcctccaagaactgcgaggattcttttggtgtgctcggcgatttctctgaaccaaattcagtgaaggtgcgcaagaacaatgtcagcaaacgggtctgtgcaaaaccacctgggccaacacacgcccatggacatcatcagcgcctcaaagcccagtcgatctcgtctctgagcactgaactgcacaacgatgagagctctgcatcatcgtcgtcttgtttcgcatcgacccctatatcattctccacatttgtgacttcagagaagaccgaggacaatgtcaggacgagacccaactacatgagcatgacagagtcgatcaaggcgaagcagaaggcatgcaacgcccagagaacggtggcgctgaagcagtcagatgataggaaagtcatgagcgctgagttgatggccgctcaggtgtga

SEQ ID NO: 1666 - protein, 444 aa, Sorghum bicolor
MGGSGKWVKSLIGLKKPDKEDCCKEKLQFPSVHGGLRGKGRKWKLWRTSSGDQGSIWRGSRGGSQRSAASEASDDASSVAAPADPFTAAVATVTRAPARDFMAVRQEWAAIRIQTAFRGFLARRALRALKGLVRLQAIVRGRQVRKQAAVTLRCMQALVRVQARIRARRVRMSTEGQAVQKLLEARRTQMDILREAEEGWCDSQGTLEQVRVKLQKRQEGAIKRERAIAYAYSQQADGAAKCNQPPKLTSNGRVNPSGMLLKHQNFDKSNVNWSWLERWMAARPWENRLMEEHNQTNSSSPDFRSSKNCEDSFGVLGDFSEPNSVKVRKNNVSKRVCAKPPGPTHAHGHHQRLKAQSISSLSTELHNDESSASSSSCFASTPISFSTFVTSEKTEDNVRTRPNYMSMTESIKAKQKACNAQRTVALKQSDDRKVMSAELMAAQV

SEQ ID NO: 1667 - DNA, 342 bp, Sorghum bicolor
tatcgttattatttctgttttacctacatagcctttgacatagacgctgaccctctggtatttgtttcacagatgctacttgatgttgtgtcaatatacaataaggtcaccgatcttactgataggaagcaggctgctaagattggcatcagtggagtgcaggctttcagagagtactacccctctatgaatgatgcgtgtactgttctggagtgtgtatgggtaaaagataaattcgttttgcatgaaaaggttaacgatatatgtcaggaaatccaagttgaggatcagaagtgctgtgatcctcagcatgaaacacgtgcattcatgagtgaaggttga

SEQ ID NO: 1668 - protein, 113 aa, Sorghum bicolor
YRYYFCFTYIAFDIDADPLVFVSQMLLDVVSIYNKVTDLTDRKQAAKIGISGVQAFREYYPSMNDACTVLECVWVKDKFVLHEKVNDICQEIQVEDQKCCDPQHETRAFMSEG

SEQ ID NO: 1669 - DNA, 864 bp, Sorghum bicolor
atggcgatcgccagcgaggacagggcttcagcacatgcgaatgaggagaagcggtgggtactgtctgattttgagattgggaagcctcttgggaggggcaagtttgggcatgtttatcttgccagagaaaggaggagtagtcagattgtggctttgaaagttcttttcaagagccagctcaagcaatcacaggtcgagcatcagctgcgacgcgaagtggagattcaaagtcaccttcgacaccctaatattcttcgcctgtatgggtacttctatgatcagacccgggtatacctaatcctggaatatgctgccaagggtgaactgtacaaggaactgactaggtgcaaacatttttcagagcggcgttcagcgacctatatcgcatcactggctagagctttgatctaccttcatggcaagcatgttatccaccgggacattaaaccagagaatcttttgattggagcccagggtgagatcaaaattgctgacttcggctggtccgtgcataccttcaacagaagacggactatgtgcggaactctggattacctgccacctgaaatggtggagaagacagaacatgattacaatgtcgacatatggagcctgggtattctatgctatgagttcctttacggggtcccaccttttgaagctaaggagcactcagagacatacagaaggatagtgaaagttgacttgaagttcccactgaaaccattcgtttcacccgctgcgaaggatttgatttctcaaatgctggtcaagaactcggcgcaccggcttccactccacaaggttcttgagcacccgtggatcgtccagaacgccgacccttccggcgtgtacagagggtag

SEQ ID NO: 1670 - protein, 287 aa, Sorghum bicolor
MAIASEDRASAHANEEKRWVLSDFEIGKPLGRGKFGHVYLARERRSSQIVALKVLFKSQLKQSQVEHQLRREVEIQSHLRHPNILRLYGYFYDQTRVYLILEYAAKGELYKELTRCKHFSERRSATYIASLARALIYLHGKHVIHRDIKPENLLIGAQGEIKIADFGWSVHTFNRRRTMCGTLDYLPPEMVEKTEHDYNVDIWSLGILCYEFLYGVPPFEAKEHSETYRRIVKVDLKFPLKPFVSPAAKDLISQMLVKNSAHRLPLHKVLEHPWIVQNADPSGVYRG

SEQ ID NO: 1671 - DNA, 3108 bp, Sorghum bicolor
atggaaccgcggcggcgtcagcagcagcagtcgatcctctcatttctccagaagcagccgccgtcgtggcgggttccctccggggagggcacgcctcccgagaagccgacgcggccccctatggggtccatcgccggcatcttggagaggctcgtgcgccctccgccgccgccgccgcaggccagaaatcaatatgcttcccaggttagacatttggaggggaaaaacttgcctgtggaaaaccaagttctctcaaatgagtgctcaggacttgactctagtcctctgaaaccagaaacaccagcaatgcagccagttattcctcgcctgaagcgagttcaggaagaccaaagtgtggatgccaacaaccaatgccctcctctgggggcgttgaacaagaagatgaaatcagctcattgttctattgaaaggaaggatcatgatgaaatggctgatagtgcgcgtagcaaatttgagtggctgaatccatttgccatcagggatgcaaatagaaggcggccaaatgatccactttatgacaagagtactctttttattccgcctgatgcattgagaaaaatgtcaacatctcaaaagcaatactggaatattaagtgcaaatatatggatgttgtcctctttttcaaagtggggaaattttatgagctctatgaactagatgctgagattggccaaaaagaatttgactggaaaatgactgctaatggggtgggcaagtgccgacaggttggcatttcagaaagtggtatagatgatgctgttgataagcttgtagctagggggtataaagttggaagaatagaacaaatggaatctgcaaaccaggccaaagctagaggattacattctgttatcgagagaaagttggttcatgtgtccacaccatcaactgcggctgataacattggtactgatgctgttcaccttctggcattgaaagaggttaccctagcttctagcagttcccaggtctatggatttgctttcctagactatgccgcccttaaaatttgggtgggttcagtccaagatgatgactcgtctgcagctttgggtgctttgttgatgcaggtttctcctagagaattaatctatgaaacctcaggcatcacaaaagaaactcaaaggacaataagaaaatatgcctcagcaggatctgtgaagatgcagctgacccccctctctgggatagatttctctgatgcttcacaaattcgaatgttaatacattctaaagggttctttaacgcatcgacagagtcatggttatctgctttggactgtgcagtgaatcgagatgttgttatttgtgcacttggtggacttattggccatttgactaggctcatgttacatgatgccttgaaaaatggggaagtcttaccataccatgtgtacaaaacatgtttaaggatggatggccagactcttgtgaaccttgagattttcagcaacaatttcaatggcggttcatctggtactttatataagcaccttaatcactgtgtcacagcatctggtaagcggctgctaagaaggtggatttgtcatccacttaaagacattgatgctatcaataaaaggcttgatgttgttgagggttttatccaaaactgtggactaggccctacaacacttggttatctccggaaaattcctgatcttgagagattattaggacaagttagatccactgttgggttgtcatctttgcttcaactgccctttattggagaaaagatactaaagagacggtttttcttcctgtcagttgattgcttcatggcatgttcccagatcaaaacatttacaatgcttatcaatggcctccgcaatggtattgacttactcagtgacttgcaaagagcggatcatggtgtcttggcactttataagattgttgagattccatcattgaactgcctttgtgagttaatccatacgtttgaagagagaatacaaaatgattttccatgtggccaggatcctgatgtcgacaacaatggtgccaacaatttggttcgtctggtggaactttttattggaaaggcttctgaatggtctttggtgatcaatgctgtcagcactattgatgtgcttaggtcctttgctgcaatgacattgtcatcatttggtgccatgtgcagaccacaagttctgctgaaagatgatgtgcctatacttcggatgaagggtctgtggcatccctatgcttttgcggaaaatgcaaatggcctggttccaaatgatttaacccttggtcaggatttatctggtctcaatcgttttgcattgttgttaactggtccaaatatgggtgggaaatccacaatcatgcgtgccacctgcctggctgttgtacttgcacagcttggctgttatgtcccctgcacatcatgtgagctgacccttgcagattccatctttacgcgccttggtgcaacagatcggattatgtctggggaaagtacgtttctcgttgaatgtactgagactgcctctgttcttcagaacgcaactgtggactcacttgtcttgcttgatgagcttggcagaggaactagcacatttgatggatatgcaatcgcatatgctgtgttccgccacctagtggagcgtgtgagatgccgtcagctctttgccactcactaccattctctgacgaaggagtttgcctcgcaccctcacgtgagcctccagcacatggcctgcatgttcaagccaaggagcgacggcaacggccagaaggagctgaccttcctgtaccgactgacctcaggggcctgtccagaaagctacggcctgcaggtcgccacaatggcagggatcccaaagtcgatagtggagaatgcatctgtcgcgggccaggtgatgaggtctaagatagctgagaacttcaggtcgagcgaacagcgagctgagttctcgaccctccacgaggaacggctgagggaggccctggcggtcagcgtgcaggacggactcctggatgacgacatcatggacacgctgatctgcgtccgtcaagagctgaagtctcacttcaggaaaagccagatgagcattcacttcaggaaagccagatga

SEQ ID NO: 1672 - protein, 1035 aa, Sorghum bicolor
MEPRRRQQQQSILSFLQKQPPSWRVPSGEGTPPEKPTRPPMGSIAGILERLVRPPPPPPQARNQYASQVRHLEGKNLPVENQVLSNECSGLDSSPLKPETPAMQPVIPRLKRVQEDQSVDANNQCPPLGALNKKMKSAHCSIERKDHDEMADSARSKFEWLNPFAIRDANRRRPNDPLYDKSTLFIPPDALRKMSTSQKQYWNIKCKYMDVVLFFKVGKFYELYELDAEIGQKEFDWKMTANGVGKCRQVGISESGIDDAVDKLVARGYKVGRIEQMESANQAKARGLHSVIERKLVHVSTPSTAADNIGTDAVHLLALKEVTLASSSSQVYGFAFLDYAALKIWVGSVQDDDSSAALGALLMQVSPRELIYETSGITKETQRTIRKYASAGSVKMQLTPLSGIDFSDASQIRMLIHSKGFFNASTESWLSALDCAVNRDVVICALGGLIGHLTRLMLHDALKNGEVLPYHVYKTCLRMDGQTLVNLEIFSNNFNGGSSGTLYKHLNHCVTASGKRLLRRWICHPLKDIDAINKRLDVVEGFIQNCGLGPTTLGYLRKIPDLERLLGQVRSTVGLSSLLQLPFIGEKILKRRFFFLSVDCFMACSQIKTFTMLINGLRNGIDLLSDLQRADHGVLALYKIVEIPSLNCLCELIHTFEERIQNDFPCGQDPDVDNNGANNLVRLVELFIGKASEWSLVINAVSTIDVLRSFAAMTLSSFGAMCRPQVLLKDDVPILRMKGLWHPYAFAENANGLVPNDLTLGQDLSGLNRFALLLTGPNMGGKSTIMRATCLAVVLAQLGCYVPCTSCELTLADSIFTRLGATDRIMSGESTFLVECTETASVLQNATVDSLVLLDELGRGTSTFDGYAIAYAVFRHLVERVRCRQLFATHYHSLTKEFASHPHVSLQHMACMFKPRSDGNGQKELTFLYRLTSGACPESYGLQVATMAGIPKSIVENASVAGQVMRSKIAENFRSSEQRAEFSTLHEERLREALAVSVQDGLLDDDIMDTLICVRQELKSHFRKSQMSIHFRKAR

SEQ ID NO: 1673 - DNA, 2460 bp, Sorghum bicolor
atggcggcggcattcactgaagaggagaaggcggtggacgacgcgctgggctaccccaaggcctacgccaagctctgccgaggcggcggaggggcggtcggcctgccctacagccacggcccgccgcacgccttcctcccctacatcctccagccgcacgaggcgctgcgggccaaggacctgaacgagatgttcccggtgaccgacgcggaggcgccgcccaccgccaacccccgcggcttcgccaacctcctctggaagcagctcgaccacctcgggaacgccgggttcgatccggcgctcttccgggtggacgcgtacgggaacgtgctctacctgcacgccgactccgcctcgcccctcgcctgggacatcgaccactggttcccctgcgccaggggagggaagacagtgccgagcaacctgcggatagtgcagtggcaggtgtgcaggaagaagcagaacaagttagagttcctcatgccgtggtgggatctgcagctcggcgtctctgtcaaccagttcctgtccatcttcgcctccaagaactccgacttcagaaacagagcattcgcgttcttgttcacccatggtgccagcgaggagctgaactcgctgcaggtggtggaggcgcacgcgttcccgcagcacttctctgagatgaaaacgaaagtaggactcgcccctgctgcaattgtttcctctaggggttctgacaactcggtgctcaaatctcttgatgcgaaccgaccactcaggcctagttaccctttgattgctgctaagaaatttacaggcgacagggatgagaatgtcaacctcgcaggacaggggcctaattccactaaggagaacaataacccagatgctgacggctacattagcaatccttacttgtccatagcaatggccagggactcactgaggcaacgagaagaggccaagaagaagcaggccgaacttacagaattggagaacgaggccaatgagctgaagcagatgaacgaagaggaacgggtggccatccagggcttggaggccctactaatcaagaggaggcggcgagttgagaagtgtcgtcgcttggcagaggctcagtccaactacaaggcagtgctggagaagatgatcagagatgccatgcaccagtccgttgtgtacaaggaacaacttaggctgaaccaagctgcaaccagcactctcatggccagattggaggcccaaagagcaatgtgtgactcatctgaaaccgagctccgtaagaagtaccaacatagagatgatttggagaggcagataaagccagaaaggaagaggtatcgtgttgatgatgggttgctcgaggaaaggctcagtgagagtgtaaagtatctttcagcaagaagattgaggagtagccctctcaagcaggaactgagggttttccttgaggaagatcagaggtattcagatgcatacatttccctaggtgaagaagaaattggagaaggaacttcaactcgtactcaagcattcagcaatgccagaaatgaaccatcgaaggtgataaacttcccgaggaggtctctttccattgaacagaacactgttgatactgaaagaggaagaaccctggtgcgggagaagctagaagagttggcgatcaaagaacgtcaacatagcaggagacgggagacaaaagagaccatgagatcgaggggaactggtacacctttaagatcaagaaatgacaaggctaaagcgaccctgcagaagtgctacgagtctgaaactgaaaaatatcatgtcagtgagacagtttcaataccgaggacctcatcacttccaagtccaccctatagagcaatcggcatgtatggaacttccagatacggtacagatcagtcaatgctactgcaaaagagtgaagcacttcatcacctaggttttagcagaccggaagatgatgaaaacatgaaccatgttggcaaaggaaatgtggataagtggctccatatgctcatggataaccaacaagaagatcatgctgtataccattcttcagatgaacatgataatgacgaggagaatgcttcagatgagcagcaaatgcagagcagaattgacgaagagagctgcaggaatggggtaactgaatgttctgatgagatcgttgaggtcgaggacgagattgtttctgaccaaggagcggaaagaggcaggaacagctttggaattaaagagagagaggaaaagaagatttggttccctaggtctgacagcaccaggggtttccggtcactgccatcatcaccctctaagatcctgggaatgagaagaggcgtggaatgcatgggcaggaagcctaaggtggctggcgacgatgactgcagatatggctatgaggattcagtgtccacaagcagcagcaagttcctcagcagatgcaagcaggcaatcaagaaagcagtacacaaatag

SEQ ID NO: 1674 - protein, 819 aa, Sorghum bicolor
MAAAFTEEEKAVDDALGYPKAYAKLCRGGGGAVGLPYSHGPPHAFLPYILQPHEALRAKDLNEMFPVTDAEAPPTANPRGFANLLWKQLDHLGNAGFDPALFRVDAYGNVLYLHADSASPLAWDIDHWFPCARGGKTVPSNLRIVQWQVCRKKQNKLEFLMPWWDLQLGVSVNQFLSIFASKNSDFRNRAFAFLFTHGASEELNSLQVVEAHAFPQHFSEMKTKVGLAPAAIVSSRGSDNSVLKSLDANRPLRPSYPLIAAKKFTGDRDENVNLAGQGPNSTKENNNPDADGYISNPYLSIAMARDSLRQREEAKKKQAELTELENEANELKQMNEEERVAIQGLEALLIKRRRRVEKCRRLAEAQSNYKAVLEKMIRDAMHQSVVYKEQLRLNQAATSTLMARLEAQRAMCDSSETELRKKYQHRDDLERQIKPERKRYRVDDGLLEERLSESVKYLSARRLRSSPLKQELRVFLEEDQRYSDAYISLGEEEIGEGTSTRTQAFSNARNEPSKVINFPRRSLSIEQNTVDTERGRTLVREKLEELAIKERQHSRRRETKETMRSRGTGTPLRSRNDKAKATLQKCYESETEKYHVSETVSIPRTSSLPSPPYRAIGMYGTSRYGTDQSMLLQKSEALHHLGFSRPEDDENMNHVGKGNVDKWLHMLMDNQQEDHAVYHSSDEHDNDEENASDEQQMQSRIDEESCRNGVTECSDEIVEVEDEIVSDQGAERGRNSFGIKEREEKKIWFPRSDSTRGFRSLPSSPSKILGMRRGVECMGRKPKVAGDDDCRYGYEDSVSTSSSKFLSRCKQAIKKAVHK

SEQ ID NO: 1675 - DNA, 702 bp, Sorghum bicolor
atggtgaacaccatgggcgtggagccggtgcagcgcggcgccgggctgccgctggcggcgctgaaccacatctccgtggtgtgccggtgcctcgagagctccctccgcttctaccgcgacgtcctcggcttcgtccccatccgtcgcccgggctccttcgacttccacggcgcatggctgttcaactacggcataggcgtccatctcctgcaagccgaggacccggcgagcatgccccccaagaagacggagatcaatcccaaggacaaccacatctccttccagtgcgagagcatggaggcggtgcagcggcggctcaaggagctgggcatccggtacgtgcagcggcgcgtggaggagggcggcatctacgtggaccagctcttcttccacgaccccgacggcttcatggtcgaggtctgcacctgcgacaacctccccatcgtgcccctcgtccccgagggccacgccatcctcggcctgcagcagcctgctgcagcgccagcctgcaagcggccaccagcagccgccctcaggcagcaagcgccggcgccgcttcctgttcccgtggccgtcccaaccccggtgccagctgaacagtgcattccggcgaaggccggcggcggaagctgcgtcggcgaggtcgaggcgagcatccccgcttgcgcgatgagatcttgcccggagcacgcgtgcgtgtag

SEQ ID NO: 1676 - protein, 233 aa, Sorghum bicolor
MVNTMGVEPVQRGAGLPLAALNHISVVCRCLESSLRFYRDVLGFVPIRRPGSFDFHGAWLFNYGIGVHLLQAEDPASMPPKKTEINPKDNHISFQCESMEAVQRRLKELGIRYVQRRVEEGGIYVDQLFFHDPDGFMVEVCTCDNLPIVPLVPEGHAILGLQQPAAAPACKRPPAAALRQQAPAPLPVPVAVPTPVPAEQCIPAKAGGGSCVGEVEASIPACAMRSCPEHACV

SEQ ID NO: 1677 - DNA, 2439 bp, Sorghum bicolor; identical to SEQ ID NO: 727

SEQ ID NO: 1678 - protein, 812 aa, Sorghum bicolor; identical to SEQ ID NO: 728

SEQ ID NO: 1679 - DNA, 579 bp, Sorghum bicolor
atggcgaccacgcgcgaccgtggcgccggcggcggatcggcgtcgagggtcggcgacggggacgtcgacctgggcgagggctgggactggggcgccatcccgcggctcctctcctccgcctgcctcttcctctgctccggaggctgttttggttgctgcgataagactgtaaaacaactgggtgaactgtccagaaacctaatcacccatgaccaaataaccattggagagccatattggagcacaaccaccatcgaggttgaaccagcagatctcaggggtgtttctccaatgagtacatctaactgggcctttgatcagcatggaactggtagcagtcataaccttcctggacttggtaataatggactcatcctgtgggaacagactaggcaggagtggactgaaattagaagtctacggccgaaggtgaagcaggttcgcgaaccagtattgagttggaatgcagcatatgagagtctgcttggatcaaataagccatttcctcaacccattcctcttcatgagatggtcgatttccttgtggacatctgggagcaggaggggctgtatgactag

SEQ ID NO: 1680 - protein, 192 aa, Sorghum bicolor
MATTRDRGAGGGSASRVGDGDVDLGEGWDWGAIPRLLSSACLFLCSGGCFGCCDKTVKQLGELSRNLITHDQITIGEPYWSTTTIEVEPADLRGVSPMSTSNWAFDQHGTGSSHNLPGLGNNGLILWEQTRQEWTEIRSLRPKVKQVREPVLSWNAAYESLLGSNKPFPQPIPLHEMVDFLVDIWEQEGLYD

SEQ ID NO: 1681 - DNA, 1017 bp, Sorghum bicolor
atggggttcggcgtggtgtccctgctcgacgcggtgttccggcgcgcgttcacctccgccggcctccgcccaggctccgccgtcgtcgacgccgacgccggcaccaccgtccacttcttggcccaccgctcgctcctgcttccaccaccgacgacgacgaccgcggaggcggaggagcagaagaagcggccggtggtggtgctcgtgcacggcttcgggccgggccccacgtggcagtgggcggcgcaggtgggcccgctctcgcggcacttcgacctggtggtgcccaccctgctgttcttcggcgcgtcccgcacgcgcgccccggccggctccgtcaccgaggcctcccaggcggccgccgtcgcggcgctcctcgccgggcgccacctcccgggccttcgggtcggccgcccggcggtgcacgtggtgggcgccagctacggcgggatcgtcgcgtaccacctggcccgcgcgctgcagcagcacggcgccggcgtggcgctggggaaggtggtgctgtgcgactccgacgtgaccaaggggcccgaggacgaccgcgccctggcggcgaggggcggcgtggaggaggtgacggagctgatggtgcccgcggacaccaagatgatgcggcggctgacggcgctctccttccaccgcccgcccatgtacctgcccgagtgcatcgcccgcgacctcctccggaaatccatggagggtcagagacaggagaagattgagctcatcaaagggatgaccaccgcggaaggctcccagcttactcctctgcctcaggagatgttgatcatctggggagagttcgaccagattttccctctggagaaagcatacaaagtgaaagagaagctcggggagaaggccacggtgaaggtgatcccaaactcagggcacctgccgtcgcaggaggaacccaagctcttcaaccgcgtcctcctcgagttcctgctgcagccatccatctccaacggcagcgccgccgcagtagctgagaaatag

SEQ ID NO: 1682 - protein, 338 aa, Sorghum bicolor
MGFGVVSLLDAVFRRAFTSAGLRPGSAVVDADAGTTVHFLAHRSLLLPPPTTTTAEAEEQKKRPVVVLVHGFGPGPTWQWAAQVGPLSRHFDLVVPTLLFFGASRTRAPAGSVTEASQAAAVAALLAGRHLPGLRVGRPAVHVVGASYGGIVAYHLARALQQHGAGVALGKVVLCDSDVTKGPEDDRALAARGGVEEVTELMVPADTKMMRRLTALSFHRPPMYLPECIARDLLRKSMEGQRQEKIELIKGMTTAEGSQLTPLPQEMLIIWGEFDQIFPLEKAYKVKEKLGEKATVKVIPNSGHLPSQEEPKLFNRVLLEFLLQPSISNGSAAAVAEK

SEQ ID NO: 1683 - DNA, 1791 bp, Sorghum bicolor
atggtggggccgcagtacgatctcgtcgggaacccactgggcgcggtgcgcgccaccttcgagaggacggctgccgccgcggcggcggagtccggaggagccgaccctgtggcggccttccgggggaaggattggggcgctggcgacctcttccgctccttcctcttcgagcaagacggccttggcaaggttccggtgttggatgcatcaaatcttggattgatcaaaccaaacaccctggtccggtaccggggaatggtccaggatatgcttgggaatgagtactacattggtgctttcaaggatgggtcaacttggaggacaaacaagttcactgacgtctcaccgttctcaatgccgcatccttgtgattcgcatctttgggagcgccatctcttccactgtgtgcctgcacctggacaaaattcttggacactggagtcttcaccaggacctgatgttcgcaggatgacaaactgcttggcacctgaattaagagagaaaaggaagagagatggggatgatgatactatggatgtttcagaaaatgggcacagagagtcttcttcattctgcaagaagccgaaggaaggcgatgctcatgtctcatccagttcaactgaagtggcaggaactgttccagagatgaatggaggcgatcatcatatacctggaagttccttttcatgtctggtgaagatctatgatatgcctgaaagtcaagtgaagctaaatgatgttattgagtttattggtgtatatacatttgacccagaacttgctgctcctagtgacaacccagatgacataatgttagacctcatggaagatgtaacagttcagttgcccccgagcaaggtgccacgtcttcactgtttggtatggagaaaattatcatcccacgattatatttcaaggcctgttgttgagccttcacctagcctgttaaaaggcattcggcaatctttgctctctcacctcaccctcgtgttaggcaatgatgaacttgcagcccagtgcttgctattgcatcttctatccagacttcgcaatagggtggacgtggtcactgttggcagactctccttgaatttcactggcttcaacaaggaaagtgcttccatatttgggaatcaactgtattctttaatccagaaattggtgccatattcacaagccatacctctgtcaattgactatctcaacacagccacacttcaacctagaaaggacaacaagtcaggaaggttggtcacaggagttctgcagctacctcaaggcactcatctgacctttgatgagactcttctgcagacagggtcattgacatctaaaggtgtggaaaataccatgctgctcaagaatctgatggagtcgcagaaggttgactacgattttgagtactacaagctggaaatggcagctgatgtgcagctacttactctctctgagggaaaatcaaacatccttccttcagacttggtagtgcctttccggccatcctctgttcccacagttaatgcaggtgctgaggaaactgagagttggaggtggtatttggccacagtaaggtctcttcctcagtccactgaacctgagacctaccagatgattcaagatgaaatggtcagtgccatgcgtgatgataggagcttgggttgttctgaacttagcaggtggctaacaatggcacaaataatggcctcaagctttggtgagaagagtctttctttggagcattggcagatggtgaaggagcttgagaggcttagaaagcagaggatgcaatga

SEQ ID NO: 1684 - protein, 596 aa, Sorghum bicolor
MVGPQYDLVGNPLGAVRATFERTAAAAAAESGGADPVAAFRGKDWGAGDLFRSFLFEQDGLGKVPVLDASNLGLIKPNTLVRYRGMVQDMLGNEYYIGAFKDGSTWRTNKFTDVSPFSMPHPCDSHLWERHLFHCVPAPGQNSWTLESSPGPDVRRMTNCLAPELREKRKRDGDDDTMDVSENGHRESSSFCKKPKEGDAHVSSSSTEVAGTVPEMNGGDHHIPGSSFSCLVKIYDMPESQVKLNDVIEFIGVYTFDPELAAPSDNPDDIMLDLMEDVTVQLPPSKVPRLHCLVWRKLSSHDYISRPVVEPSPSLLKGIRQSLLSHLTLVLGNDELAAQCLLLHLLSRLRNRVDVVTVGRLSLNFTGFNKESASIFGNQLYSLIQKLVPYSQAIPLSIDYLNTATLQPRKDNKSGRLVTGVLQLPQGTHLTFDETLLQTGSLTSKGVENTMLLKNLMESQKVDYDFEYYKLEMAADVQLLTLSEGKSNILPSDLVVPFRPSSVPTVNAGAEETESWRWYLATVRSLPQSTEPETYQMIQDEMVSAMRDDRSLGCSELSRWLTMAQIMASSFGEKSLSLEHWQMVKELERLRKQRMQ

SEQ ID NO: 1685 - DNA, 1176 bp, Sorghum bicolor
atgtcggagactgaatcggcggcagtggccgcggcgctggacccggcggctacagcggagccgaagcctcggcggctgcgggggcacaagaagggcgccgtcacctgctgcgtcgcctcctccgcccgcccgggcgtcgtcgcgtcctccggcgaggatggatgtctttgctggtttgatctgcgcaccaaagatgtacttttgaccatggaagcagcaaataaaccaatttcttcaatttgctttaaaccaggaaatgaagattgtgtgtatatctctgctggaaatgaaatattgtcctttgatgttcgtatgggagctcaatcaaagccattagagacgtataactacaatagagatgaaatcaatcagattgctgtcagctctaaaggttttctcgctgctgcagatgatagtggggatgttaagattgtcaataccattcagaagtgcctgtataaaagattaagggaagcccacacaagtatttgcagcagcgtgcaattcattccttggagaccttggacagcaattactggtggccttgactcaaagctcgttgcatgggatttctccaaaggacgaacactgttttctattgattatggatcacctgaattgcaaaatggcaattcttccggtagtgcagggcaatgtttcaaccctgcttttgttcattcagtagcagtttctgaagagggtattttgggagggctctacaaggtttgtgctgttgcaaggggggatggtgctgttgatgtgattgatcttgagtatgaactggctcctgcgaaatcgaagggacctcctcgggcagctatttcaaaaaagagttcaaaaggagctgaacttggagatgggagctgtaatcaaagtcaagcgaaaagaatccatcttgactacacgatgggtggccataccgcagctgtatcttgtgtagcattttcagtatttggtgagaaggggaagttcctcgtttctggcggcaatgatgcatcagtgaagctgtgggattggtcgaaaggattttcgtctgaaacaaacagcaaagttgaattggttttgaatattgatgtaaagaaaaaggtaaattggctgtgtactgctccaactgattcagataacttgattgtgtgtgacacatccaaggtggtcaaagtatataatttccggtag

SEQ ID NO: 1686 - protein, 391 aa, Sorghum bicolor
MSETESAAVAAALDPAATAEPKPRRLRGHKKGAVTCCVASSARPGVVASSGEDGCLCWFDLRTKDVLLTMEAANKPISSICFKPGNEDCVYISAGNEILSFDVRMGAQSKPLETYNYNRDEINQIAVSSKGFLAAADDSGDVKIVNTIQKCLYKRLREAHTSICSSVQFIPWRPWTAITGGLDSKLVAWDFSKGRTLFSIDYGSPELQNGNSSGSAGQCFNPAFVHSVAVSEEGILGGLYKVCAVARGDGAVDVIDLEYELAPAKSKGPPRAAISKKSSKGAELGDGSCNQSQAKRIHLDYTMGGHTAAVSCVAFSVFGEKGKFLVSGGNDASVKLWDWSKGFSSETNSKVELVLNIDVKKKVNWLCTAPTDSDNLIVCDTSKVVKVYNFR

SEQ ID NO: 1687 - DNA, 3204 bp, Sorghum bicolor
atgagcgtctggagaggcgagtgctcacgggcatctggaattgggaggaggcagctggataaggctagggatggtacgtcacttattttatcggacgaaattggtcaaatattcattattggtactgggcaaggagagtcccagaaagatgcaaaatacgatcagttcttccttggagactatcggcctctcatccgtgataacaatggaagtgttattgatcaggaaacacagcttgtaccatacaggagaaatatgcaagactttttgtgtgacgctggtatgataccatatccagagcccttccagagtatgtaccagaaacgccggttaggtacccttggtcttgagtggcgacctccctctgtaaattttgctgttggccccacttacaatgcaacaaccggtgaataccaaactatcccaattattgatccggataggtgggaaccgcttccagagataacagacttcattgagcttgaacctgaaaatgaagtgatctctgacgatactgattctgagtacaatggcatggatgagtattcaagtgaaggagaacaggagattatgagtggtgattcctcaggtacttcatattcaagtgcagaaattgatgtggatgaccctaatagtgctcttctccgccgatcaagaagaaagaagaaaaaatctgaggctgatcttgttactttgtctggtcggcgagttaggaaaaaaaatttggatgagcctggtgtagccacagtgtcaaggccacatagaggaaagaaatctaggaatggacgttctagcaaaaggaaaaggtctcctaaatccaggggtttgcgacctcaaagacgtgctgctcgaaacgcattacattttttctcaaagataggagctcgagcttcaacagaagaggatgaagatgactccgagagtttctcagatagtgaattgaacacggatagtactgaagctgaacagttagaatggaatggccatctaagaaccagcagagggattaactcccaatatgacactgaagatgttacagaaccttctcattttactgataataagggaaattctggaactggtaagaaactagttctccgaatacgacggcgtgatttaaaaactccatttccttcaggaagtggaaaagcagaatgctccacacaggataaagcagtgaaatctctttctctagctaacgatgaaccagctgaggaagaactaactattgaaccgggacattcctctgcctgcaaggctgaattaacaactgatggtgatctgcatggtagttctactgttcgtagtaataactcaattaggtggggtgaggttaaggcacgatcctcaaagcgttgcaagtacagtgagccagctggaggtttgtggacctcttcaaataatgctgttctgcaggatattgagggatcgggcagtcagcagatgcctcatgaatatggtgatggcatccagcaaactgttgagcaaaatgcgcaagaagtacaacatggaatagttctagatgacattcaggaaaacaacagtattgatgagtataacagagaaaatacgggggatcaagaaaaaatacctaacaataataagacccatgcagatgtagtgaatgacgcagtacaagttcccaatacttctcagcctcaattaaaattgaagttcaagtcaagtggatctgcagatgcagtaggaaatgtcatgaactccaagcatggtaaagattcagtgcagcatggtgatgattcttccatcaatcaacctagaaatgctgacctttttaatgtgcccagaagtgctcaggaattcccagataaaagcactagtttgcatgattcaaaaaaactgtacttggattcttcaaagaagtacaccgcagtgtacaaaaggttaaagccaaagaacaagaaaaaaatggattcagatgaatatgcaaatgaggatagcacttctatctccaatgacgatggtggataccaacctccagagtacagtcctgttgcagctgcaagtggtagattgagaagaagcacaaggaagtcatttgcatacaatattgatgctacaggacaggatgatatctcagaagtgaaagattcttacagtacccatgaagcatcaactagtggaagacgagttgtcacagatgtgcgtgatgtaatgtggcgacaaaactcaaaaactgttggtttaaggtcttcgaggaacaaaagagaaagtagcaactttcctgatacacatccattgggtagaaggcaccaggtttccttaaagtattcatggttaatgttacttgagcatgaagatagctaccgttatattcctcaactcggtgatgaggttatgtacttggggcagggccatgaggaatatcttaaagaagtgcaatcatctgaatcttgcccttggaaccggataaaaggccttaaagctgtagaactttgcaaaatacagggtcttgattatgccacctacagaggatctggcgaaagctgttgtaaattaaccattgaatttgttgattgcacttccagtggatctggcaatacatttaagatcacattgcgtgagctggttaactttccagattttcttgtggagagaacaaggtatgaagctgctattgagcggaactggacccacagagacaagtgcaaagtttggtggagggatgtagaaggacaggtaggaggaacttggtgggagggacgggtgaccgcagtaagacctaaatcacctgattttcctgagagtccatgggaaaaatatgtcatacagtataaggaggatggttcttttcacgctcatagcccctgggaacttcatgatacaggcaatttatgggatccatggaaacatccgcatatcgatctctcgattcgagatcaattgatatcagaaatggaaaatttacaggaaatgtcacatagggatcaggatcgttatggtgtcttaaagctggacaaggttgcagaaaagtcagattttgtcaacaggtttcctgtccaattttctattgaggtgatcaagacaagattagcgaacaattattacagaactctggaggctgtcagacatgataccactgtgatgctttcaaatgcagaatcttacttttcaaagagcagtgaaatgaccaaaaagatccgcaagctctctgagtgggtcgaccagatcttttcatcactgtag

SEQ ID NO: 1688 - protein, 1067 aa, Sorghum bicolor
MSVWRGECSRASGIGRRQLDKARDGTSLILSDEIGQIFIIGTGQGESQKDAKYDQFFLGDYRPLIRDNNGSVIDQETQLVPYRRNMQDFLCDAGMIPYPEPFQSMYQKRRLGTLGLEWRPPSVNFAVGPTYNATTGEYQTIPIIDPDRWEPLPEITDFIELEPENEVISDDTDSEYNGMDEYSSEGEQEIMSGDSSGTSYSSAEIDVDDPNSALLRRSRRKKKKSEADLVTLSGRRVRKKNLDEPGVATVSRPHRGKKSRNGRSSKRKRSPKSRGLRPQRRAARNALHFFSKIGARASTEEDEDDSESFSDSELNTDSTEAEQLEWNGHLRTSRGINSQYDTEDVTEPSHFTDNKGNSGTGKKLVLRIRRRDLKTPFPSGSGKAECSTQDKAVKSLSLANDEPAEEELTIEPGHSSACKAELTTDGDLHGSSTVRSNNSIRWGEVKARSSKRCKYSEPAGGLWTSSNNAVLQDIEGSGSQQMPHEYGDGIQQTVEQNAQEVQHGIVLDDIQENNSIDEYNRENTGDQEKIPNNNKTHADVVNDAVQVPNTSQPQLKLKFKSSGSADAVGNVMNSKHGKDSVQHGDDSSINQPRNADLFNVPRSAQEFPDKSTSLHDSKKLYLDSSKKYTAVYKRLKPKNKKKMDSDEYANEDSTSISNDDGGYQPPEYSPVAAASGRLRRSTRKSFAYNIDATGQDDISEVKDSYSTHEASTSGRRVVTDVRDVMWRQNSKTVGLRSSRNKRESSNFPDTHPLGRRHQVSLKYSWLMLLEHEDSYRYIPQLGDEVMYLGQGHEEYLKEVQSSESCPWNRIKGLKAVELCKIQGLDYATYRGSGESCCKLTIEFVDCTSSGSGNTFKITLRELVNFPDFLVERTRYEAAIERNWTHRDKCKVWWRDVEGQVGGTWWEGRVTAVRPKSPDFPESPWEKYVIQYKEDGSFHAHSPWELHDTGNLWDPWKHPHIDLSIRDQLISEMENLQEMSHRDQDRYGVLKLDKVAEKSDFVNRFPVQFSIEVIKTRLANNYYRTLEAVRHDTTVMLSNAESYFSKSSEMTKKIRKLSEWVDQIFSSL

SEQ ID NO: 1689 - DNA, 2139 bp, Sorghum bicolor
atgtctttcagaaagcaccaaccttccagtaatggagcttccattagtatagttcctctggattttccaagtcaggaactggagaaggttaatcctgtgaattcagtgatgtcaactgattttgcatccatggatggtgttgatattgatatgagagaagtttactttctcattatgcattttttatctcatggtccattcaaacggacctttggagaactgtgcaatgaactcctggaacatcaactgctacctagaagataccatgcttggtattcacgtggtggtttccatagtggtgaagaaaatgatgatggcatatcactccctttgggttatgtaaaattagctgagaggtacccccacattggtaaagaccacttggtgaagctattaaagcaactgatggctaattcctgtcacccacacagcttaattggaagagtttctccaaatgctgctgatgtcccaacacttcttggctccaactccttttcgcttcttgcatctgacaggcaagataaggaaactcccaggctgccaagttatcttcgttggccacacattcaggctgatcaagttcatggtctaagtttgagagagattggtggtttcactaagcacgcccgtgctccctctgtacgagcatcgtgttatgccatcgcgaagccatctacccttgttgaaaagatgcaaatcataaagagattgagggggcatcaaaatgccgtgtattgtgctacctttgaccgcacagggcgttatgttattactggttctgatgaccgccttgttaaaatatgggcgacggaaacagctttctgcctggctagctgccggggccatgaaggtgatattactgatctcgcagtgagttccaataatgctgtggtagcatcttcgtctaatgatttcattattagagtgtggcgtatgcctgatggaatgccagtctcagtgctcaaggggcatacaggggcagttactgctattgcatttagtccaaggccaggtgctgctttccagctgttgtcgtcatcagatgatgggacgtgcaggatttgggatgccagatactctcaacaacctccacgagtgtatacaccaaagcccccagatgttgcccctggtaagagtggtgatgcatcttccagtgctgctcaagttcagccaacaaatcaccagatcttatgttgtgcatttaatgctaatggaacagtgtttgtcactggcagctcggacacttttgcaagggtctggaatgcttgcaagagttcttctgatgaacatgaacaaccgaatcatgagatggacctattatgtgggcatgaaaatgatgtaaactatgtgcaatttagtggatgtgcagtggcatcaagatctttttcatctgattccagtcatacctctaaggaagaaaataaccttaagttaagaaattcttggttcacgcataatattgttacctgctcccgtgatggcagtgcaattatatgggttccacgatctcggaggtcgcatggaaaaattggacgctggacgcgtgcttaccatcttaaagtccccccacctcctatggcgcctcaaccacctcgaggtggtcctcgtcaaagataccaaccaactcctcgtggtgtcaatatgatagtttggagtctggacaaccgctttgtgcttgctgcaatcatggattgcagaatttgtgtatggaatgcttctgatgggagtttggtgcattcactgattggccataaggaatcaacgtttgttctagatgtgcatccgttcaatcctcgtatagcaatgagtgctgggtatgatgggaagacgatcatctgggatatatgggaaggaaaacctgttcagatctatgaaacagggcaatttaaactagttgatgggaagttctctcccccatcaacagctgactcccccactccctatgcctgctgcctctcttctcctgtaacccttcacggctgccataagcccataacacgcccgcaccgtggtgatgaggtcctctactccaccgctccacagcagttcctgttgaggcgaggcgatgagatcctcgtggacgagcgacagcatgccatgctgctgcagatggtggggctatggttgcgcttgtgctag

SEQ ID NO: 1690 - protein, 712 aa, Sorghum bicolor
MSFRKHQPSSNGASISIVPLDFPSQELEKVNPVNSVMSTDFASMDGVDIDMREVYFLIMHFLSHGPFKRTFGELCNELLEHQLLPRRYHAWYSRGGFHSGEENDDGISLPLGYVKLAERYPHIGKDHLVKLLKQLMANSCHPHSLIGRVSPNAADVPTLLGSNSFSLLASDRQDKETPRLPSYLRWPHIQADQVHGLSLREIGGFTKHARAPSVRASCYAIAKPSTLVEKMQIIKRLRGHQNAVYCATFDRTGRYVITGSDDRLVKIWATETAFCLASCRGHEGDITDLAVSSNNAVVASSSNDFIIRVWRMPDGMPVSVLKGHTGAVTAIAFSPRPGAAFQLLSSSDDGTCRIWDARYSQQPPRVYTPKPPDVAPGKSGDASSSAAQVQPTNHQILCCAFNANGTVFVTGSSDTFARVWNACKSSSDEHEQPNHEMDLLCGHENDVNYVQFSGCAVASRSFSSDSSHTSKEENNLKLRNSWFTHNIVTCSRDGSAIIWVPRSRRSHGKIGRWTRAYHLKVPPPPMAPQPPRGGPRQRYQPTPRGVNMIVWSLDNRFVLAAIMDCRICVWNASDGSLVHSLIGHKESTFVLDVHPFNPRIAMSAGYDGKTIIWDIWEGKPVQIYETGQFKLVDGKFSPPSTADSPTPYACCLSSPVTLHGCHKPITRPHRGDEVLYSTAPQQFLLRRGDEILVDERQHAMLLQMVGLWLRLC

SEQ ID NO: 1691 - DNA, 795 bp, Sorghum bicolor
atgggggcgtcgacgtcgacgtcgcggcaggagacagcgtcggcgtccgactcgtcgcgcgccggagacggccgggccgtggccgtggtggcgagcagcgctgcctctgccactggtagcaacagcaacaaccaggcccagtcgaagagggcgccgcttcctcacaagttccatgagatagtcgcgcaggcggcgacgacgacgacgggcggcactcctgcagctgccgccgaactggaggatcaggtgtacagcacgggggtctaccttgctggcaaaacgaagaagtactgggtgcacgagaaaaccaggtgcaactgcttcatgctgttcgctagggcactgtccatcacttggagcgatgatcccagatactggatctggcatcccgtcaaagaaacaaacagcgacgccgaggtggaggctgcgtcgctgcagaacgtgtgctggctggaggtgcacgggaagctggagctgtcgcacctcacgccggggatcacctacgacgtcgtcttcgaggtgatgctgacggagccggcgtacgggtggacggtgccggtgaacctgcggctcaggttccccgacggcgcggtgcaggagcggaaggagaagctgcaggacaggccaacgaagcagtggctggagctcaaggccggggaggtgaagacggcggcgcagccgggggaagggcacagcggcggcggcgagctggagatctccctgtttgagtacgatggtgggctctggaagaaggggctcctcatcaagggcgtcaagatcgtccccaaggagtga

SEQ ID NO: 1692 - protein, 264 aa, Sorghum bicolor
MGASTSTSRQETASASDSSRAGDGRAVAVVASSAASATGSNSNNQAQSKRAPLPHKFHEIVAQAATTTTGGTPAAAAELEDQVYSTGVYLAGKTKKYWVHEKTRCNCFMLFARALSITWSDDPRYWIWHPVKETNSDAEVEAASLQNVCWLEVHGKLELSHLTPGITYDVVFEVMLTEPAYGWTVPVNLRLRFPDGAVQERKEKLQDRPTKQWLELKAGEVKTAAQPGEGHSGGGELEISLFEYDGGLWKKGLLIKGVKIVPKE

SEQ ID NO: 1693 - DNA, 1524 bp, Sorghum bicolor
atgttgcatgttggtaccttgaaggttgtggcagatcatgttttagtgctgaactcagtaactcgttcactgccgtttccagttacaattgctgatactgtaaaagagaagtttccagaagaaattagattgaggtttagagtgttggacttgcgtcgtcctcaaatgcagtcaaacttgcggttgcgccataatgttgttaaacttatacgccgctacttggaggatgaacatgaatttgttgagattgagactcctgttttgtccaagtctacacctgaaggtgctcgggactatcttgtaccatcgagagttcagccaggaacattctacgcgctccctcaaagccctcagctgttcaagcaaatgttgatggtttctggttttgaaaaatattatcagattgcaaggtgcttccgggatgaagatctgcgtgcggacaggcaaccagagtttacacaacttgatatggagattgcttttacatctatggaggatatgttgaagctgaatgaagatttaatgagacatgtttttcaagtggtaggagatatcaagctgccaaatccttttccaaggttaacatatgcagaggcaatggatcgctatgggacagataggcctgatcttcgattcgattgggagctgaaagatgttagtgatgtatttttgggcagtaacttcaaggtttttgctgatacattggaaaatggaggtgtgataaaggcactgtgtgttcctggtggtgccgctgtgttttcaaacactgacctgaagaaaggaactgtttacactgaagcttccaaagctggagccaagggactgcctttcctcaaagttatggataccggggagcttgaaggaattggtccacttgtatcaagtctgaaacctgaaaagaaagagcagctcgtggaacttctggacgcaaaggcgggtgatcttatcctgtttgcactgggtgaacaatcatcagctaaccggattcttggacggttaagattatttattgctcataagctggaggtgatagacacgtctgcacattcagttctttgggtgacagattttccaatgtttgaatggaacagcgatgagcaaagatatgaggccctccatcatcctttcactgcaccaaatcctgaggatatgaatgatctaccatcagctcgtgctctggcttatgacatgatttacaacggtgtggagattggagggggaagtttgagaatctacaaaagtgatgtacaacaaagaatttttgagatcattggtatctcgcctgaacaggcagaggagaaatttggctaccttttagaatgcttcgacatgggtgctcctccacatggaggcattgcttatggattggatcggttggtgatgcttttggctggtgagagctcgatccgagatgtgattgctttccccaagacgacgactgctcagtgtgcactcaccaaagcaccatcagctgtagacccacagcaactgaaggatctcgccttccccaactctacttcgtga

SEQ ID NO: 1694 - protein, 507 aa, Sorghum bicolor
MLHVGTLKVVADHVLVLNSVTRSLPFPVTIADTVKEKFPEEIRLRFRVLDLRRPQMQSNLRLRHNVVKLIRRYLEDEHEFVEIETPVLSKSTPEGARDYLVPSRVQPGTFYALPQSPQLFKQMLMVSGFEKYYQIARCFRDEDLRADRQPEFTQLDMEIAFTSMEDMLKLNEDLMRHVFQVVGDIKLPNPFPRLTYAEAMDRYGTDRPDLRFDWELKDVSDVFLGSNFKVFADTLENGGVIKALCVPGGAAVFSNTDLKKGTVYTEASKAGAKGLPFLKVMDTGELEGIGPLVSSLKPEKKEQLVELLDAKAGDLILFALGEQSSANRILGRLRLFIAHKLEVIDTSAHSVLWVTDFPMFEWNSDEQRYEALHHPFTAPNPEDMNDLPSARALAYDMIYNGVEIGGGSLRIYKSDVQQRIFEIIGISPEQAEEKFGYLLECFDMGAPPHGGIAYGLDRLVMLLAGESSIRDVIAFPKTTTAQCALTKAPSAVDPQQLKDLAFPNSTS

SEQ ID NO: 1695 - DNA, 1632 bp, Sorghum bicolor
atgccgccgccgcggctcgagtccgcgatcctcgccgccgcctgcaggttcagcaagcctctctccgctctcaggaggcttggcgttcttgcctggcactgtccaccaaccgttcgacgcaatgctgcagaggggtccgtgccttcgctgggcttgccttcaccgtttcaccaggttgtcgttcggagtggaaaccttgttgggtcaccaaggttctgccacgccactgctggcatgtcagatcatctcacagacgtctacgccagtgaagtactgaaggttctcaagtccaccagtgccgacaacgctgatctcagcgatgctcttcgtcggttcgcggtccacatggatgaggatattatcctcacggtcctccagaagcagcggtccaactggcaggtcgccctggcgttcttcaactgggcggcgaccctgccggggtatgcccacgggtcgagggcctacaccgagatgctggacattcttgggcggatgaagaaggtcaggcacatgaggcagctgtttgacgagatccccgaggagcggcgtgtggtggtcgtgacgaataagatgttcgccgtgctgctgaaccggtacgcgggtgcgcacaaggtgcaggaggcgatagaggtgttctacctgaggaaggattacgggtttgagctcgacttggtcgggttccagatactcctgatgtcgctgtgccggtataagcatgtcgaggaggcggaggccctgttccgtgagaagaaagatgagttcccgcatgtcacaaagagctggaacattatactaaacggttggtgtgtcaagggaagcctgagagatgctcaaaggatttggaatgatatcattgcatccaaggttgaacgagacctgttcacatatggtacattcataaacgcactggccaaaaatggcaggattagtgctgcagtgaagctgttcaaaaagatgtgggagacagggattaatcctgatgtcgcgatttgcaattgtatcattgaccagctgtgcttcaagaataggattccagaagcacttgagatttttggtgagatgaatgaccggctttgtcaagccgatgtggctacctacaacactttgataaaatacttatgtaagaaaaaaaggatggagaaagtttatgaacttttggatgacatggaagcaaagggctgctctccaaacaataggacatactcctacgttctgaagacgactgagaaacctaaagatgtcatcgctttgatgcagaggatggagcaaaccggctgtgaattggattctgatacatataacttaatattgaacctttataccaactggaaatatgagaagggggtgcaacaggtatgggatgagatggagaggaatgggtcaggcccagatcaacggtcatttactattatggttcatggccttcattcccaaggcaagctcgatgaagctctgcagtactacacaacaatgaagtctagaggtatgattccagaacctaggaccaagatactggtgaaagctatgcatatgaagaaagatggggctgccactgaagatgactcaacaagtatggcagggaagcatctaaaattggatcgtcgatcaagactattcaatgttcatagatag

SEQ ID NO: 1696 - protein, 543 aa, Sorghum bicolor
MPPPRLESAILAAACRFSKPLSALRRLGVLAWHCPPTVRRNAAEGSVPSLGLPSPFHQVVVRSGNLVGSPRFCHATAGMSDHLTDVYASEVLKVLKSTSADNADLSDALRRFAVHMDEDIILTVLQKQRSNWQVALAFFNWAATLPGYAHGSRAYTEMLDILGRMKKVRHMRQLFDEIPEERRVVVVTNKMFAVLLNRYAGAHKVQEAIEVFYLRKDYGFELDLVGFQILLMSLCRYKHVEEAEALFREKKDEFPHVTKSWNIILNGWCVKGSLRDAQRIWNDIIASKVERDLFTYGTFINALAKNGRISAAVKLFKKMWETGINPDVAICNCIIDQLCFKNRIPEALEIFGEMNDRLCQADVATYNTLIKYLCKKKRMEKVYELLDDMEAKGCSPNNRTYSYVLKTTEKPKDVIALMQRMEQTGCELDSDTYNLILNLYTNWKYEKGVQQVWDEMERNGSGPDQRSFTIMVHGLHSQGKLDEALQYYTTMKSRGMIPEPRTKILVKAMHMKKDGAATEDDSTSMAGKHLKLDRRSRLFNVHR

SEQ ID NO: 1697 - DNA, 255 bp, Sorghum bicolor
atgtcgtgctgcggaggcaactgcgggtgcggctccggctgcaagtgcggcagcggctgcggagggtgcaagatgtacccggacatggctgagcagcaggtgaccaccaccgccaagactctcgtcatgggtgtcgcaccatcgtccaaggggcacgccgagggcgggttcgaggcggcggccggcgccggagctgagaacgacgggtgcaagtgcggccccaactgcagctgcaacccctgcacctgcaagtga

SEQ ID NO: 1698 - protein, 84 aa, Sorghum bicolor
MSCCGGNCGCGSGCKCGSGCGGCKMYPDMAEQQVTTTAKTLVMGVAPSSKGHAEGGFEAAAGAGAENDGCKCGPNCSCNPCTCK

SEQ ID NO: 1699 - DNA, 1848 bp, Sorghum bicolor
atgtcagtgaagcggaaggcctcgctggagcggcgggtcggccagggcgtggagaggagggagagcgcggaggcggagcggagggggtcgaggagcggggaggtggaggtcaccgagtcctcgagctgctcggcgatgcggaggacgaggtcgtcggagacggcgggcgccgcgcgcgccacggaggcggataccggagcggaagagcgacggaagcgaaggagaggcggcggcgcgcggagagcggtggagcaggaggcggcgcacagcggcgacggcgaggacatggcgtccgcgaagcttctcctcgtctgcccagtggctacggtgctggtgccggactgcggagggccctcgtggccgtcggggttggccaaatccgagatcctgacagctgtcgttcgcttcgctttgccttgccccggcaaagcaatggcgctccggctctctgctccgttcctcacctcgcgctttacgccgtcgcaggcgtcggccccgcgcaggcgcacccgggcccgctgtttctctccgtccgccgatgcgcgggccgcgtgtttcaggagaccctacacgtccgttctgattgtccccacgggcgtcggcgcggccgtcgggggcttcgccggcgacgcccttccggttgcgcgagccctcgccggcgtcgccgactgcgtcatatcccacccaaacgtgttgaacgctgcgatgctgtactggccgatgccgaatacactttacgtggaagggtacgcccttgacaggtttgcagaaggatcctgggcactccaacctgttcaccagaacaaggtaggcttggtgttggattctggaatcgaggaagatctccggctgcgccacttgcaggttgcagatgccacgagggcttctcttggccttcctgtagtggagtacattgtcacagatgctcctctggagatcaagacatggtttgatcccaggtgtgggaagtcgacggggagtgttggtaactctgattctcttctgagagcagttgacgcactagtcacacattcagacgtgaatgctgtggcagttgttgcacgctttccggatgacgacccagaagattcagattgttaccgggaaggaaagggtgttgatctattggcaggagttgaagcaattatcagtcatctaattgtgaaagaattcaaaatcccttgtgcacatgctcctgcagtgttacccccatcactcagcccatcagtatgccctagatctgctgctgaagagattggatatacatttctgccttgtgtgcttgctgggttaagcaatgctccacagtatgtcatgaggaagggaagcttggacaatggttgcatagtggctggtgctgtcgacagtgttattcttcccaaagactcttgtggaggagatggtacacttgctttcgctcgagctgcaagaaagaacaagcccttaatcattactgtacaggaaaatgagacagtgcttgatgatactccagacaagttcggcatagaagcgctgaatgtccggaactactgggaagcaattggagtcattgctgctcacaaggcagctgcccccgttgccaaagctgtgaggtggcctggcattggcatgccaggttcgggcaccttaagctccatggactcaaggtgctctctaggggaagctgctgcttccatgtggtgttcgaaagagggaaggcgtgagattgcagcaaagccggagaaacaaggctcgagcggatgcgatcaggcgctggtgaggcaaaaggacggtgcagcggggtgctggcggcgcggtgaagcgttcaagcgcgagcgtcgcaggaaggcctggtgcagcgaggcttaa

SEQ ID NO: 1700 - protein, 615 aa, Sorghum bicolor
MSVKRKASLERRVGQGVERRESAEAERRGSRSGEVEVTESSSCSAMRRTRSSETAGAARATEADTGAEERRKRRRGGGARRAVEQEAAHSGDGEDMASAKLLLVCPVATVLVPDCGGPSWPSGLAKSEILTAVVRFALPCPGKAMALRLSAPFLTSRFTPSQASAPRRRTRARCFSPSADARAACFRRPYTSVLIVPTGVGAAVGGFAGDALPVARALAGVADCVISHPNVLNAAMLYWPMPNTLYVEGYALDRFAEGSWALQPVHQNKVGLVLDSGIEEDLRLRHLQVADATRASLGLPVVEYIVTDAPLEIKTWFDPRCGKSTGSVGNSDSLLRAVDALVTHSDVNAVAVVARFPDDDPEDSDCYREGKGVDLLAGVEAIISHLIVKEFKIPCAHAPAVLPPSLSPSVCPRSAAEEIGYTFLPCVLAGLSNAPQYVMRKGSLDNGCIVAGAVDSVILPKDSCGGDGTLAFARAARKNKPLIITVQENETVLDDTPDKFGIEALNVRNYWEAIGVIAAHKAAAPVAKAVRWPGIGMPGSGTLSSMDSRCSLGEAAASMWCSKEGRREIAAKPEKQGSSGCDQALVRQKDGAAGCWRRGEAFKRERRRKAWCSEA

SEQ ID NO: 1701 - DNA, 708 bp, Sorghum bicolor
atggcgccctgcgcgtccccgtccgccctcgcgctcaccgccagcacgcgggtcagcagcagcctccaactgacgctggcctcgccgcggccgcggccggaggcgcgtgtgccgcgcgcgcccggcgcccagctccgcccgttgaccgcgtgctcttggccgcgccgccccttgctgcccgagctcgcggcggccggcggcggcgcccgtggtaccggcagggcgcagccgctgttccggcctcgcgcattgatgacgacgtctcagattgccagctgtgccttcaccctgggcaccgtcgccgtcctccccttctacaccctcatggtcgtcgcccccaacgccgacatcaccaagcgcaccgtggagagcagcgctccctacgtcgccttaggcctcctctacgcctacctgctctacctgtcctggacccccgacaccctgcgcgccatgttcgccagcaagtactggctccctgagttgccgggcatcgttaggatgtttgcgagcgagatgaccgtcgcctctgcctggatccacctcctagcagtcgacctctttgcggcaaggcaggtgtaccacgacggcctcaagaacaacatcgagacgaggcattcggtctcgctgtgcctgctcttctgcccggttgggatcctggctcatgtggtgaccaaggtattgacaggggcagttggccgctcacattga

SEQ ID NO: 1702 - protein, 235 aa, Sorghum bicolor
MAPCASPSALALTASTRVSSSLQLTLASPRPRPEARVPRAPGAQLRPLTACSWPRRPLLPELAAAGGGARGTGRAQPLFRPRALMTTSQIASCAFTLGTVAVLPFYTLMVVAPNADITKRTVESSAPYVALGLLYAYLLYLSWTPDTLRAMFASKYWLPELPGIVRMFASEMTVASAWIHLLAVDLFAARQVYHDGLKNNIETRHSVSLCLLFCPVGILAHVVTKVLTGAVGRSH

SEQ ID NO: 1703 - DNA, 1998 bp, Sorghum bicolor
atgattagctctcatgcatttcttctctccctgcatggattagccatggtttccacacttataacaaacactgaagggcaagctttttgcccttctttctcctgtgggcatcttcaagacatacgatctcctttccgtatgcaaggtgatccacaaggttgtggttttccagagtatgagctggtttgcattgatagcaaggctataattcacatcaacagtggaagatactttgtgactaacatctcctacactgactctactttctgggttgttgatgccaatttggataatagcagctgtcccattcctgcgagcaaccaacatccctatataaatggtttgcaatccgaaggcagcaccttgctggatcctgatacagtaacttgggctgcctttatcacttgttcagagatgctaagtgatgttacttccttgttcagcagttgctgtagtggtatttacaggcctgtcaattgccgaagtacgaagaattcttttgtttatgtcttcactaccacattcttcccaatggttggatacatcaagccgtcatgtagatacttgtccatgattcctttgggcagtcgacatgtcaagcgaccagataatgcaagttatgaagatattgtaaaatttatgaggaatggcttttctgttgattttccttatagcagtggatggacatatcattggatcattaacttatgcctgaaagaggcaaagggttactacaatgataaaatatctaactcaagcattgtggatcagacttttgccaccgcttttgggatcgaccttcatttcttaagatgtgtaaatgattattcataccgaactaaattattttgggctgtggtcgccatgatatctgctgtggacattgtgaagttcgtgatagtgtttggaatgctatcgaggtttgtgtttgcaccattagctgtattgaccttcctcgcctacaaatactggaaaacaaggatatctattgatgcagttgagaagtttctccaaatgcaacaagctcttagcccaacaaggtatgcctataccgacatcactgcaatcacagggcacttcagagagaagcttggccaaggaggctatggatccgtgtacaaaggcatgcttccaggtgatgtcaatgttgctgtcaaaatgttgggcaattcattgtgcaatggagacgaatttatcagtgaagtgtccaccatcggaagtatccaccatgtcaatgtagtgcgtctcgtgggattttgttcagaagaaatgaagagggctctcgtctatgagtacatgcctcgtggatctcttgataagtacatcttttcttctgagcaaagattttcctgggataagctcaatgaaatagctttaggcattgccagaggaatcaactacttgcaccaaggatgtgaaatgcagatactgcactttgacatcaaaccacacaacatccttttagacaataacttcactcctaaagttgccgacttcgggctagccaaattgtacccgagggacaacagctttgtgccggtgagcgctgcatggggaactatcgggtacatagctcccgagatgatatcccgtaatttcggtgttgtttcatgcaagtcagatgtttacagcttcgggatgctattgctggagatggctggggggcgaagaaacttagaccaacatgcagaaaggagaagccagatgtactacccagcttgggtgtataatcatctaactcggcaagaggtaggcgagatttgcgaagcttttgatatccatgaggtggagaggaagctgtgtgttgttgggttatggtgcattcagatgaaatcacatgatcgaccaacgatgagtgaggtcattgggatgcttgaagctggcgttgatggtcttcagatgcctcccgagccattcttctgtggggatgagcagaattccgtaactggtactttccgtttgtcctcggagttgagtgcaatctcagagaatgaatga

SEQ ID NO: 1704 - protein, 665 aa, Sorghum bicolor
MISSHAFLLSLHGLAMVSTLITNTEGQAFCPSFSCGHLQDIRSPFRMQGDPQGCGFPEYELVCIDSKAIIHINSGRYFVTNISYTDSTFWVVDANLDNSSCPIPASNQHPYINGLQSEGSTLLDPDTVTWAAFITCSEMLSDVTSLFSSCCSGIYRPVNCRSTKNSFVYVFTTTFFPMVGYIKPSCRYLSMIPLGSRHVKRPDNASYEDIVKFMRNGFSVDFPYSSGWTYHWIINLCLKEAKGYYNDKISNSSIVDQTFATAFGIDLHFLRCVNDYSYRTKLFWAVVAMISAVDIVKFVIVFGMLSRFVFAPLAVLTFLAYKYWKTRISIDAVEKFLQMQQALSPTRYAYTDITAITGHFREKLGQGGYGSVYKGMLPGDVNVAVKMLGNSLCNGDEFISEVSTIGSIHHVNVVRLVGFCSEEMKRALVYEYMPRGSLDKYIFSSEQRFSWDKLNEIALGIARGINYLHQGCEMQILHFDIKPHNILLDNNFTPKVADFGLAKLYPRDNSFVPVSAAWGTIGYIAPEMISRNFGVVSCKSDVYSFGMLLLEMAGGRRNLDQHAERRSQMYYPAWVYNHLTRQEVGEICEAFDIHEVERKLCVVGLWCIQMKSHDRPTMSEVIGMLEAGVDGLQMPPEPFFCGDEQNSVTGTFRLSSELSAISENE

SEQ ID NO: 1705 - DNA, 2661 bp, Sorghum bicolor
atggtgaagttctccaagcagtttgaggggcagcttgtcccggagtggaagcatgccttcgtggactattgcctgctcaaaaaggatctgaagaggatgcagcacgcccggctgttgcttggccggcatcatgctgctgaccgttgcgaagcaggcctaaccgacacacaagaaacagccggtcatcacgcggaacgggcctctctctccctgtcccactggctcttggacaggctccctgctgctgctctcttcttcggctccaatgctcgcaacaacgatcatggggtcatacacgtgcaccgccggaagctgctggcggggtcggcgagcagaggcggcggcggcggcggcgacgacgagtacgagacggagctgctagagccgacgccgttggccgacgcggacgcggcagcggcgcgggagttcttcgcgcggctggacgcgcagctcaacaaggtgaaccagttctacaagagcaaggagcaggagttcttggagcgaggccggtccctgcggcggcagatggacattctcgccgacctcagcgcggccagggccagcagggacgaccccttcgtcgcctcagcctccgcctccgcctcctccgaagacgagtccacaaggtatgcgatgacgtcagcatcagacacggaccagctccagctgaacgagcaagaaggaaccacaccgaccaacgacaacgaccccggcgtcacggctcttgctcaagaggaccaccagcagcaggatctagaaggctctggaactttcgcggggaggccgttgagcgggtgcgggaggaagagcctgaagatcaccatccccctgaccaccccctccaggacgatctccgcgctgacggacatcctctgggacgagctcgccagcagccagtcctccaagaaatgcaaccccgacggtggcgtcgggaaacagagcgtcaacaagaccaagctccggcacgcggagaagatgatcaagcgcgccttcgtcgagctctacaagggcctgggctacctcgccacctaccggaacctgaacatgatggcattcgtgaagattttgaagaagttcgagaagattactgggaaacaggtcctgtccgtatatctcaaggtggtcgagacctcctacttcaacagctccgacgaggcacgtgtcctaacatacattttgttctgtcactctgtcagtctaagggtatctgctggagcactgaaactgacgactctgctcttctatccgagttcactgcaggcgctgaagctgatggacgaggtcgaggacatcttcgtccggcacttcgccggcgacaaccggcgcaaggccatgaagtacctgaggcccgcgcagcggagggactcgcacgccgccaccttcttcacggggctcacggccggctgcttcgccgcgctgttcgtgggctactgcgtcatggcgcacatggccgggatgtactactactactccaccccggcgccacggccacggccaccgcgcgcgcgcggtgtcaccgccggcggcggctttggcgactccgtgtcggtgtacatggagaccgcgtacccggtgctgagcatgttcgcgctgctgttcctgcacctgctcctctacgggtgcaacatggcggcgtggcgcaggtgccgcgtcaactacggcttcatcttcgagtcgtcgccgcggcctgccggcggcggcggggagctcgggccccgggacgtgttcctcgtctgcgccgcatccatggccgccgtcgccggcgtcatgttcgcgcacctagccctcgtgctcaggtcgggctaccaccacgcgtcgccgcacgtccaggccatccccggattcttgctcctggtgtttctgctcctgctgttctgcccgatcaacgtcgtgtaccggtccagtcggtttcagttcctcaggatactgaggaacattgtgttgtcaccgctctacaaggttgtgatggtagacttcttcatggccgatcagctttgcagccaggtgcctatgctacgaagcctggagtacctggcgtgctattacatcagtgggagctactggacgcaggagtacggctactgtaccaacaccaagcacatcagagacctggcctacgccgtctccttcctgccttactactggagagccatgcagtgcgcacggaggtggttcgacgagggggacacgagccacctggtgaacctgggcaagtacgtctccgccatgctcgccgccggcgccaaggtggcgtacgagaaggacaagagcctggcgtcgctgtcgctcctcgtcgccgtgtccagcggcgcgacggtgtaccagctgtactgggacttcgtcaaggactggggcctgctccagcccaactccaagaacccctggctcaggaacgacctcatcctcaggaggaaatccatatactacttgtcaatgggactgaacctggtgctgaggcttgcttggctgcagaccgtcatccatccaaattttgggagtttggattctagggtcacttccttctttctagcggccctcgaggtgatcaggcgagggcattggaacttctacaggttggagaatgagcatctgaacaacgcaggcaagtttcgggcggtaaagacggttccactgccttttcatgaagtggacgaggactaa

SEQ ID NO: 1706 - protein, 886 aa, Sorghum bicolor
MVKFSKQFEGQLVPEWKHAFVDYCLLKKDLKRMQHARLLLGRHHAADRCEAGLTDTQETAGHHAERASLSLSHWLLDRLPAAALFFGSNARNNDHGVIHVHRRKLLAGSASRGGGGGGDDEYETELLEPTPLADADAAAAREFFARLDAQLNKVNQFYKSKEQEFLERGRSLRRQMDILADLSAARASRDDPFVASASASASSEDESTRYAMTSASDTDQLQLNEQEGTTPTNDNDPGVTALAQEDHQQQDLEGSGTFAGRPLSGCGRKSLKITIPLTTPSRTISALTDILWDELASSQSSKKCNPDGGVGKQSVNKTKLRHAEKMIKRAFVELYKGLGYLATYRNLNMMAFVKILKKFEKITGKQVLSVYLKVVETSYFNSSDEARVLTYILFCHSVSLRVSAGALKLTTLLFYPSSLQALKLMDEVEDIFVRHFAGDNRRKAMKYLRPAQRRDSHAATFFTGLTAGCFAALFVGYCVMAHMAGMYYYYSTPAPRPRPPRARGVTAGGGFGDSVSVYMETAYPVLSMFALLFLHLLLYGCNMAAWRRCRVNYGFIFESSPRPAGGGGELGPRDVFLVCAASMAAVAGVMFAHLALVLRSGYHHASPHVQAIPGFLLLVFLLLLFCPINVVYRSSRFQFLRILRNIVLSPLYKVVMVDFFMADQLCSQVPMLRSLEYLACYYISGSYWTQEYGYCTNTKHIRDLAYAVSFLPYYWRAMQCARRWFDEGDTSHLVNLGKYVSAMLAAGAKVAYEKDKSLASLSLLVAVSSGATVYQLYWDFVKDWGLLQPNSKNPWLRNDLILRRKSIYYLSMGLNLVLRLAWLQTVIHPNFGSLDSRVTSFFLAALEVIRRGHWNFYRLENEHLNNAGKFRAVKTVPLPFHEVDED

SEQ ID NO: 1707 - DNA, 2448 bp, Sorghum bicolor
atggagtgcaacagagatgaggctgctagagtgaaagctcttgcagaaagaaaaatgctggacaaggattttgttggtgcaaaaaagatgattatcaaggtgcagcaactcgtcaaagaagtggatgaagttgacatttcaaaaatgttaactgtttgtgatgttcattgtgctgctggagctaaggtaaataacgaggttgattggtatggaatactgcaagtacctgtaaatgctgatgacacactgataaagaagcagtattgtaagctttcccttttgctacatccttacaagaacaagtttggaggtgcagaggcagcattcaagttacaacatcagcatcaaacctcaaatcctaaagggctgcaaacagcattttggactatttgtcctgcttgtggcatgagatatcagtactacctctcgatcttgaagaaggctttctgctgtcagaattgtttgaagccatttagtgcacatgatttgaaggaccaaggtattccttctgggacaaatcagcgatctgctggggtttggaaaaatgcaggtgcaccacagaattttacaggccctcaatcaaatggcactggtcagaaaggttggtctgccactctaggagttcatgttaatatcggttcttatcatgctaatgtaaatacaaagagggaaactgatggtaatgcaggtgggctgaaaaacaaaatgaaatctgcccgggccaccaggaatccttcaaaagctccaactgctggattgaaaaggggcaggagggtggcatttgaatctagtgagtctagcatatcagaaaccagcagcgacagtgaggaagaagttctaaaacatggtctttctgaaaatagtacagggccagctcaacaaactcgcagatctagcaggcagaagcaagaagttaggtgtaatgaggatagtgatgatggcgatgttgaagatgatgataacacggttgaggatgattttgttggctctcctgctttgaagaggttaagaagtggcctggttcacggtgattactgtactaaaacagcaaagctgaatgaaggcaccgctggccgtaatggtctgagtaactgcagtaacataaaagatacaaagaacagtggtacaccatgtgaagagaaaacttctgatggagttgagcacatgaagagagaaacaatgcatgctcgagaaaatagtgatggcaaagaagaggcttttccttctgctaatccagaatgcagttctgttagaagtcaggaccgtgactccaaacatgctggtttgtccagtggagatcgcaaaggatccatgaatgtggggcaggggcaacatacaaaatccgtgaatgcagggatccctgcaaagacaccagaggaagagaaaatcaagcataacactcatctgcctgaagttacagatgtcgatgccgatgatgataacatttgccaaacagtgtatgtatgtgctgagtcagaattctttgatttttcagaaataagattgctccaaaggttttcacatgggcagatctgggctctctacagtgatatagataaatttcccaaatattatgcattcatacagaaagtagatctcaagaatgatgaagtacaagttagatggctggatgtctgtcctcatggagaagtggtgaaaagattgtcccaagaagaacggaccattggcattggagcctttaggctttccaatgtccatgagatgatgacttacactggtacagatgccttttctcatcgtgttgaggccagatatgctggcagaaaaggcgaatatgaaatacttcctcgtcttggtgagatatgggcggtttacaaaaactggggagctggatggactgcacaggattttgaaaattgtgaatatgaactggtggagatactttgccgtactgattcctccatacaagttcagcttctgaggaaggtggatggttataagatggtatttatgtcatacagagcagagggttctgtgatgacaataaggaaggatgagtaccccaattcttttcatgaacgcacacacagaaccttcgtcgatttggcatggagttggaggacctgcggcctacagatccatggctggcgagtcgcctcgtcctctatcggcggcgccatcgcctcctccatcgacggcagcgccctcgcctccaccatccacggtggagccgcgcatgcccctaggctgactgctgcatcagggacccgcgaccagagaggagggaggctcgacgcggacgcccgcctgcgcactcgatcggcggcggcgcagctagctggacgcggatgctcgcctgcgtgctcggccgacggtggcgtggcagtccgcttgcacactcgctcgctccacgtcagagatggagaagacaggatgctcgacggggagcacgcccgcgctcggctagctgcgacacggatggcttga

SEQ ID NO: 1708 - protein, 815 aa, Sorghum bicolor
MECNRDEAARVKALAERKMLDKDFVGAKKMIIKVQQLVKEVDEVDISKMLTVCDVHCAAGAKVNNEVDWYGILQVPVNADDTLIKKQYCKLSLLLHPYKNKFGGAEAAFKLQHQHQTSNPKGLQTAFWTICPACGMRYQYYLSILKKAFCCQNCLKPFSAHDLKDQGIPSGTNQRSAGVWKNAGAPQNFTGPQSNGTGQKGWSATLGVHVNIGSYHANVNTKRETDGNAGGLKNKMKSARATRNPSKAPTAGLKRGRRVAFESSESSISETSSDSEEEVLKHGLSENSTGPAQQTRRSSRQKQEVRCNEDSDDGDVEDDDNTVEDDFVGSPALKRLRSGLVHGDYCTKTAKLNEGTAGRNGLSNCSNIKDTKNSGTPCEEKTSDGVEHMKRETMHARENSDGKEEAFPSANPECSSVRSQDRDSKHAGLSSGDRKGSMNVGQGQHTKSVNAGIPAKTPEEEKIKHNTHLPEVTDVDADDDNICQTVYVCAESEFFDFSEIRLLQRFSHGQIWALYSDIDKFPKYYAFIQKVDLKNDEVQVRWLDVCPHGEVVKRLSQEERTIGIGAFRLSNVHEMMTYTGTDAFSHRVEARYAGRKGEYEILPRLGEIWAVYKNWGAGWTAQDFENCEYELVEILCRTDSSIQVQLLRKVDGYKMVFMSYRAEGSVMTIRKDEYPNSFHERTHRTFVDLAWSWRTCGLQIHGWRVASSSIGGAIASSIDGSALASTIHGGAAHAPRLTAASGTRDQRGGRLDADARLRTRSAAAQLAGRGCSPACSADGGVAVRLHTRSLHVRDGEDRMLDGEHARARLAATRMA

SEQ ID NO: 1709 - DNA, 1005 bp, Sorghum bicolor
atggtccacccgagggatgccgggaacatcattgtcaaagggaccggcctcagtcctatctcctcgctgggccacgtcccggggctgccgtcagccagtgcagctcacgagtcatctaggatggcgtcggagaagagcaagatcctagtggtcggcgccacaggccacctcggcaggcacgtcgtggcggcgagcgcgcggcagggccaccccaccttggcgctggtcagggacaccgccccctccgacgcggccaaggcggcgctgctccagagcttccaggacgccggcgtgacgctcgtgaagggcgacctccacgaccaggctagcctgctcagcgccatcgctgaccagaccaggctcatcgacgccatcaaggaggccggcaacgtcaagaggttcatcccgtcggagttcggccttgacgccgaccgctcggccgccgtggagccgacgaggtccatgttcgtcacggccaaggcggcgatccgccgcgccgtcgaggcagcgggcgtcccctacacgtacgtgtggacgggctacttcttcggctacgggctgcccggcatcgggcaggtgctggcccaagcaccacccgtcgacaaggccgtcgtcctcggcgacggcgacaccgatgtgtcgttcgtcgacgagggggacatcggaacctacacggtgctggccgccgacgacccgcgcgcggtgaacaggacgctgtacgtcaagccgccggccaacacgctgtcgcacaacgagctactggcgctctgggagaagaagaccggcaaaacgttccagcgggtgcatctcgccgaggacgccgtcctcaagcagatccaagaacttccgatcccgctggacattctactgtcaattgggcatgcggtgtacatcaagggggaacataagttcaagatcgaccaatcgtcggcggcggacgccggcgagctgtacccggacgtgaagtacaccacggtcgacgattacctcaacaggttactctga

SEQ ID NO: 1710 - protein, 334 aa, Sorghum bicolor
MVHPRDAGNIIVKGTGLSPISSLGHVPGLPSASAAHESSRMASEKSKILVVGATGHLGRHVVAASARQGHPTLALVRDTAPSDAAKAALLQSFQDAGVTLVKGDLHDQASLLSAIADQTRLIDAIKEAGNVKRFIPSEFGLDADRSAAVEPTRSMFVTAKAAIRRAVEAAGVPYTYVWTGYFFGYGLPGIGQVLAQAPPVDKAVVLGDGDTDVSFVDEGDIGTYTVLAADDPRAVNRTLYVKPPANTLSHNELLALWEKKTGKTFQRVHLAEDAVLKQIQELPIPLDILLSIGHAVYIKGEHKFKIDQSSAADAGELYPDVKYTTVDDYLNRLL

SEQ ID NO: 1711 - DNA, 2127 bp, Sorghum bicolor
atgccccaagtgaagtccggctacgatggcgccggcggggactacattaagtggatgtgcggcgccgccggcgggcgtccgggcggcgccatgacccacctccagcgcggcgtcggctccctcgttcgtgacatcggcgacccctgcctcaacccctccccagttaaggtattgatactccatgccggtgccgatgcgaatgtatctcttgctcccttgtcagtgggaaacagaatgctcaaaccagaaagatggcacgcatgttttgacagtgatgggaaggctatatgtttccgtaaagcccttaaattcattgtcttaggaggcgtggatccttctattcgagcagaagtttgggaatttcttattggctgctatgccttaagtagcacgtcggagtataggggaaaactaagagctgctcgaagggagaaatatcgttatttaattaagcaatgccagagcatgcatacaagcatcggtacaggtgagcttgcatactctgttggatcaaagctgatggatgtcaggaccttgcccaaagaaactgaagctggagaagtcagcacaagtcagcaagctgaacatcaagtgccttgcagttcagcagaaaattcgaattcgatttatgggtctggtggcacaactcagcctcagaaaaggaaaatttgtagtaaatcagctgaaacagttggtttcaatgaacataatgatagctctagatgttctggagattatgatgacattggtgaaccaaggtatgacagtgaggccttcatcgattttccttccctaactggtacaaacttgttcgcaaatggtgatggggatagcaatggagttgaagaaaatcattgcagtttcttggttcctgaagataggataaggcctcgtgatgaacgcatgcacagcttccagatcaataataacatagatctcataatagagtcaaatacattatccagtgatatatttcgacctagcagcagtgactcagccatctttcactcggatgcgtataagcatgatagatggttagacaatactagctatagtaaagaaattacagattccttgaggatatctgatgcaccagaagcagatttagttgatggaaccaaatcaaatggttcaatagctgacaaagatagagtctctgaatggctttggacactgcatcgaattgtggttgatgtggtgagaacagatagccaccttgatttctatggagaatcaaggaatatggctagaatgtctgatatacttgctgtttatgcatgggttgatccttccactgggtactgtcaaggtatgagtgatctgctgtcaccttttgttgtcatatacgaggatgatgcggatgccttttggtgctttgagatgctactgagaaggatgcgtgaaaatttccagatggaggggccaacaggagttatgaagcaattgcaagcattgtggaagatcatggaactgacagatgttgaattatttgaacatttgtcagcaattggtgctgaaagccttcattttgcttttcggatgctgctagtgctttttcgtcgagagctgtcttttgaggaatcacttttgatgtgggagatgatgtgggctgctgattttgatgaagaagcagtcaggcgtttagaagagaactgtctagaaccattgctagtagatctgagcaatggcttgtcatgtgaagtcaaagaagtgcatcggaccaacagttccacaagaagaaaacccaagaccaggaaatcccatcttagaaatggtgaaatatgtggagcttgccaccctggaatgaaatccagtacaagaaatcatctctgtggcttgtcaggtgctacaatatgggcaaggcctcagatgccacatccaagtgcaaatgtgctaccaaagagtggagattacgaactgcctatattctgtgtggcggcaatcttgataatcaatcgccacaagataataagagggactcgctcaatagatgatgcaatcaagatgttcaatgataatgtgctcaaaataaatgtaaaaagatgcgtacgcttggccatcaagctgaggaagaagtacttgtacaagtcattgaaaggaggctctagtgatgataaagaaagttga

SEQ ID NO: 1712 - protein, 708 aa, Sorghum bicolor
MPQVKSGYDGAGGDYIKWMCGAAGGRPGGAMTHLQRGVGSLVRDIGDPCLNPSPVKVLILHAGADANVSLAPLSVGNRMLKPERWHACFDSDGKAICFRKALKFIVLGGVDPSIRAEVWEFLIGCYALSSTSEYRGKLRAARREKYRYLIKQCQSMHTSIGTGELAYSVGSKLMDVRTLPKETEAGEVSTSQQAEHQVPCSSAENSNSIYGSGGTTQPQKRKICSKSAETVGFNEHNDSSRCSGDYDDIGEPRYDSEAFIDFPSLTGTNLFANGDGDSNGVEENHCSFLVPEDRIRPRDERMHSFQINNNIDLIIESNTLSSDIFRPSSSDSAIFHSDAYKHDRWLDNTSYSKEITDSLRISDAPEADLVDGTKSNGSIADKDRVSEWLWTLHRIVVDVVRTDSHLDFYGESRNMARMSDILAVYAWVDPSTGYCQGMSDLLSPFVVIYEDDADAFWCFEMLLRRMRENFQMEGPTGVMKQLQALWKIMELTDVELFEHLSAIGAESLHFAFRMLLVLFRRELSFEESLLMWEMMWAADFDEEAVRRLEENCLEPLLVDLSNGLSCEVKEVHRTNSSTRRKPKTRKSHLRNGEICGACHPGMKSSTRNHLCGLSGATIWARPQMPHPSANVLPKSGDYELPIFCVAAILIINRHKIIRGTRSIDDAIKMFNDNVLKINVKRCVRLAIKLRKKYLYKSLKGGSSDDKES

SEQ ID NO: 1713 - DNA, 1209 bp, Sorghum bicolor
atgtcgtcgtggtcgtcgccctcagccgccgccgccgccaacacgggcgcccgattcggccccttcccttgccgagcgctgcggctcgcgccgtatccgtcgctcgcccggggagcccccgcctcgccgccgctcgtcctcaggtcccacccccacccgggcggccgtggccatggcctcctcgcgcgcaccggcggctcctctccctcctcgcggtgccgcgccgtcgccgccgaggtcgagggcctcaacatcgccgacaacgtcacccagctcatcggcaagacaccaatggtgtatctcaacaacgtcgtcaagggctcggtcgccaatgttgctgctaagctcgagattatggagccctgttgtagtgtcaaggacaggatagggtacagtatgataaatgatgctgaagagaggggcttgattactcctggaaagagtgttttggtggaagcaacaagtggaaatacaggcatcggtcttgcctttattgctgcatccaaaggatataagttgatattaacaatgccttcatcaatgagcatggagagaagagtcctactcagagcatttggtgccgaacttgtccttactgatgctgcaaaagggatgaaaggggccgtagataaggctacagagattttaaataagacacctaactcttacatgcttcaacagtttgataaccctgccaaccctaaggtacattatgagactaccggtccagagatctgggaggattcaaaggggaaggtagatatattcattggtggaattggaacaggggggacaatatctggtgctggccgtttcttaaaggagaaaaatcctggaattaaggttattggtattgagccttctgaaagtaacatactctccggtggaaaacctggtccacataagattcagggaattggcgcagggtttgttccaaggaacttggatagcgatattcttgatgaagtaattgagatatcaagtgatgaagctgttgagacagcaaaacagctggctgttcaggaaggattactggtgggaatctcctctggagcagctgccgccgctgccataaaggttgccaaaagaccagaaaatgctggaaagctgatagtggttgtgtttccgagctttggcgagaggtacctttcaactgtcctctatcagtccataagagaagaatgcgaaaacatgcagcctgagccatga

SEQ ID NO: 1714 - protein, 402 aa, Sorghum bicolor
MSSWSSPSAAAAANTGARFGPFPCRALRLAPYPSLARGAPASPPLVLRSHPHPGGRGHGLLARTGGSSPSSRCRAVAAEVEGLNIADNVTQLIGKTPMVYLNNVVKGSVANVAAKLEIMEPCCSVKDRIGYSMINDAEERGLITPGKSVLVEATSGNTGIGLAFIAASKGYKLILTMPSSMSMERRVLLRAFGAELVLTDAAKGMKGAVDKATEILNKTPNSYMLQQFDNPANPKVHYETTGPEIWEDSKGKVDIFIGGIGTGGTISGAGRFLKEKNPGIKVIGIEPSESNILSGGKPGPHKIQGIGAGFVPRNLDSDILDEVIEISSDEAVETAKQLAVQEGLLVGISSGAAAAAAIKVAKRPENAGKLIVVVFPSFGERYLSTVLYQSIREECENMQPEP

SEQ ID NO: 1715 - DNA, 234 bp, Sorghum bicolor
atggctgcatccagattctacgtcacctgcgccctcctcctgatcggtgtcgtgctgctggggcagcaggggatagagggcgccgttgcctgcccccagtactgcctcgaagtggactacgtgacctgcccgtcgtccggctccgagaagctcccggcgaggtgcaactgctgcctggcgcccaaaggctgcacgctccatctctccgacgggacgcagcagacttgctcttag

SEQ ID NO: 1716 - protein, 77 aa, Sorghum bicolor
MAASRFYVTCALLLIGVVLLGQQGIEGAVACPQYCLEVDYVTCPSSGSEKLPARCNCCLAPKGCTLHLSDGTQQTCS

SEQ ID NO: 1717 - DNA, 831 bp, Sorghum bicolor
atggacatggcgaagtcgctcgcgctcctggccctgtccgccttcttcttcttcctcctcggaggctcagtggccgcagctcagtggacacccgccttcgccacgttctacggcggcagcgacgcgtcgggcaccatgggcggcgcgtgcgggtacggcaacctgtacaacgccgggtacggcacgtacgcggacgacggcgctgagcacggcgctgttcaacgacggcgccatgtgcggcgcgtgcttcgccatcgcctgcgacgcgcgccggtcgcggtggtgcaagccgggaaccggaggcgcccgccgccgctccatcacggtgacggcccaccaacctgtgcccgcccaactgggcgctgccgggcgcgcggcgacgcggggccggcttttgaggccatcgccgtgtaccgcgccgggatcgtgcccgtaagctaccgcgccgcgtgccgtgccgcggcaggtccggcggcgtcaggttcaccgtgcggggagacacagctacttcgagctcgtcaccgtcgccaacgtcggcggcagcggcgtcgtggcgcaggcctggatcaggggcggcgccgccacggactggatgcccatgacccgcaactggggcgccaactggcagagcaacgcgtacctcaacgggcagagcctctcgttccgcctcaggtccgacgacacggccgcgtcgtcacggcgtacaacgtcgcgcccgccggatggtggttcggcgccacctacacgtccaatgccccagttctagctattgacctgaccaccgtcctttttgcccggagcggccggcgtgcgttccatcgccgtctctaa

SEQ ID NO: 1718 - protein, 276 aa, Sorghum bicolor
MDMAKSLALLALSAFFFFLLGGSVAAAQWTPAFATFYGGSDASGTMGGACGYGNLYNAGYGTYADDGAEHGAVQRRRHVRRVLRHRLRRAPVAVVQAGNRRRPPPLHHGDGPPTCARPTGRCRARGDAGPAFEAIAVYRAGIVPVSYRAACRAAAGPAASGSPCGETQLLRARHRRQRRRQRRRGAGLDQGRRRHGLDAHDPQLGRQLAEQRVPQRAEPLVPPQVRRHGRVVTAYNVAPAGWWFGATYTSNAPVLAIDLTTVLFARSGRRAFHRRL

SEQ ID NO: 1719 - DNA, 1797 bp, Sorghum bicolor
atgagcaagatgcttcccatggcagcagccctctttttcttctacgccgccgtggccctgctccgagctgcaggcagccaagcggcggtggtcgagcacacctttgttgtaaagcaagtgtatatgcgacacctttgcaatgatacgctggccaccgtggtcaacggccagtttccaggaccaccggtagaggctacggaaggggacacagtgattgtacacctcgtcaacgagtcaccctttgaaataacaattcactggcatggcgtaaagcagcgactaacgtgctgggcggatggcgccggaatggtaacacagtgcccaatccagccaaattccacattcacctaccgtttcaaggtggacggccaggagggtacgctgtggtggcactctcacgtctccatcctccgggcaaccctgcatggcatcatcatcatccgcccaaagtccggctcctaccctttcaagaatcagcctcacatggatgttcctatcatcataagtgaatggtggcagagagatttgatgaaagtggacaagaacttctccaatgggggctcattcagtgataaccccgctggggccaccatcaatggaaaacttggtgatcaatacaactgctccggcgtcgtagaagacaacttcgttctgaacgtggagcgtggcaagacgtacctgctccggctagtgaacggggcgctcttctccgagtactacttcaaggtcgccgggcacaagttcacggtggtcggcgccgacgccaactacatcacgccgtacaccaccgacgtggtcgccatcgcgcccggcgagacgttcgacgtcctcatggtcgccgacgccccgccctgccgctactacatggccgcgctggccaaccagccgccggccccggacccccagatcccggtgttcgcgtccagaggcatagtgcagtacacggacatggacaggtgcagaacccaggcgccgcctccgatgccggagatgcccgaccagcacgacacgacgacgacgttctacttccacggcaacctgtccgggctccccacccacccgctgctgccgcagctccgtggccgcatcgacgagcacctcttcgtcacgctcggcaagggcaccgtctgccgagacgacaagccgtcctgcaagaggggaggcagcgacgaggccgtcgaggtggcctacatgaacaacgtctccttccggctccccgacaagatgtcgctgctggaggcgcggcagtacgagtacggcggcggcggcaacgacgtggcggcggtggtggtggaggagctgccgaccaggccgccgagcgtgttcaacttcaccgacccggcgctgatcccggtcggccccggcgcgccgctggagaagctggaggcgacgcggaaggcgacgacggtgcggcggttcaggcacaacgccacggtggaggtggtgttccagagcacggcgacgatgcagagcgactccaacccgatgcacctccacgggcacgacttcttcgtgctggcgcagggccacggcaactacgaccgggccaggcacgtgaggacctacaacctggtggacccgctgctcaagaacacggtgcaggtgccgaggcttggatgggcggccgtccgcttcgtcgccgacaacccgggggcgtggttcatgcactgccacttcgagttccacatcgccatgggcatggcaacggtgtttgaggtggccaacggagccacgccggaagacactctgcccccgccgccgtcagatcttccaaagtgcatacacaagaaggaataa

SEQ ID NO: 1720 - protein, 598 aa, Sorghum bicolor
MSKMLPMAAALFFFYAAVALLRAAGSQAAVVEHTFVVKQVYMRHLCNDTLATVVNGQFPGPPVEATEGDTVIVHLVNESPFEITIHWHGVKQRLTCWADGAGMVTQCPIQPNSTFTYRFKVDGQEGTLWWHSHVSILRATLHGIIIIRPKSGSYPFKNQPHMDVPIIISEWWQRDLMKVDKNFSNGGSFSDNPAGATINGKLGDQYNCSGVVEDNFVLNVERGKTYLLRLVNGALFSEYYFKVAGHKFTVVGADANYITPYTTDVVAIAPGETFDVLMVADAPPCRYYMAALANQPPAPDPQIPVFASRGIVQYTDMDRCRTQAPPPMPEMPDQHDTTTTFYFHGNLSGLPTHPLLPQLRGRIDEHLFVTLGKGTVCRDDKPSCKRGGSDEAVEVAYMNNVSFRLPDKMSLLEARQYEYGGGGNDVAAVVVEELPTRPPSVFNFTDPALIPVGPGAPLEKLEATRKATTVRRFRHNATVEVVFQSTATMQSDSNPMHLHGHDFFVLAQGHGNYDRARHVRTYNLVDPLLKNTVQVPRLGWAAVRFVADNPGAWFMHCHFEFHIAMGMATVFEVANGATPEDTLPPPPSDLPKCIHKKE

SEQ ID NO: 1721 - DNA, 546 bp, Sorghum bicolor
atgtctaagaagatagttctcaaagctgacctcattggcgaaaaatgccagagtgagatcctagcaattgtttccaagaaccaaggaatcaagtccatggagatcgacgccgagaagtgcacgctgacggtggtcgggacggtcgacccggtgcgcatggtgcagaggctcaagaagaagtgcttcgaggcgaccatcgtgagcgtggaggacgacaagcccaaggagaagaaggacccctgcaaggaggcgtgcgagaagctgtgcaaggagaagtgcgacaagatcacctgctgcaaggagtgtaaggacaagtgcgagaaggagtgcaaggacaagtgcgagaaggcctgcgaggcgtggctcggcaagggctgctgctcctgcagccgctgcaagcccagcccggccggctgctactacgacccctgcgccgtgcgtagctacccctacggctactactacaacgggtgccccagcgggtaccccccctactacggctgctacgaagagaggtcacatgaaggagcgtgcaccatccagtag

SEQ ID NO: 1722 - protein, 181 aa, Sorghum bicolor
MSKKIVLKADLIGEKCQSEILAIVSKNQGIKSMEIDAEKCTLTVVGTVDPVRMVQRLKKKCFEATIVSVEDDKPKEKKDPCKEACEKLCKEKCDKITCCKECKDKCEKECKDKCEKACEAWLGKGCCSCSRCKPSPAGCYYDPCAVRSYPYGYYYNGCPSGYPPYYGCYEERSHEGACTIQ

SEQ ID NO: 1723 - DNA, 324 bp, Sorghum bicolor
atgtctggcgtttgggtgttcaagaacggcgtggtccggctggtggagaacggcgcggcggctggcggcgaggcggtgcggcggcggaaggcgctggtgcacacgccgagcgggcaggtggtgcggtcgtacgcggagctggagtcggagctgcgggcgctggggtgggagcgctactacgaggacccggcgctgtaccagttccacaagcgcggctccctcgacctcatctccctccccgccgacttcaacaggttctcctccgtccacatgtacgacatcgtcatcaagaaccgcgactccttcagggtcgtcgacgtctga

SEQ ID NO: 1724 - protein, 107 aa, Sorghum bicolor
MSGVWVFKNGVVRLVENGAAAGGEAVRRRKALVHTPSGQVVRSYAELESELRALGWERYYEDPALYQFHKRGSLDLISLPADFNRFSSVHMYDIVIKNRDSFRVVDV

SEQ ID NO: 1725 - DNA, 1578 bp, Sorghum bicolor
atgagcacaccgcgtcgcggcggccagcaccacggcgacgagcgcgccgggacacgagcaggggcagcctcccgagacaacggcggacaaggcgcgggcgacctgagcttcgggtccacggcggggccgtggatcgccttcgacccgccgcacccttgggcgccgcccgagcacgcgcgcgctcccgtcttcgcgcagcaggcacctgttgatccgttcccgtggagcacgcccacgtcgttcgcgaacccatttcatggtccatcgacgttgaacgtgccgtggggaccgcccggcgaggtgcccttcgccggcttccccgccgccgggccagcggctccggaaccggaatggcgacaccggcgacaggatgtgttcgctggcatcggccgccgttctgtccccgcggtggtgacggacccggacctcgacggcgcggacggcggcgcgtcgtgcctgccgctcgcgaggcaggccggcgtgcgtgcggcggcgcgcaacaacttcatcgtctcgccgctgtcgttccacgcggcgctcgcgctggtggccgcgggcgcacggggcgagacgcagcgggagctcctgggcttcctgggctccgccgagtcgctgagcgagctgcacggcgccgcggcgacggcgctggtcgccaggctcaacgacctcccgcagacgtccttcgcctgcggcgtctgggtggaccggcgccgggcgctcacgccggagttcagggacgccgccgcgtcgcgctacgcggcggtcgcggactccgtcgacttcgcctcggagcccgaggcggcgaggcggcgagtcaacgccttcgtgggcgaagcgacgagagggctcatcggcgacgtcctgcctcccggctccgtcaactcgtccacggtgctcgtcctcgccaacgctatctacttcaaggggacgtgggctcggcggttcgatcggtcgagaaccttcgccgcgccgttccatctccccggcggcgccaccgtgcgcgcgccgttcatgaccacgagcccgctttccgaggatcagcaggtcgccgtgttccccggcttcaaggcgctcaagctgccctacaagaacgacggcggcgccgcgtggttctacatgcttctactcctccccgacggtgaggctctaaccctcagcgatctctacgataaggccgtctcgacgccgggattcatcaggaggcacacgccggtggacggggtcccggtccggcggttcatggtgccaaagttcaagttcacgttcgagtttgaggcgtccggcgatatccagaagctgggagtcatgcgagcctttgaaggcggcgacttctccggcatggtgtccggtggaaacgggctcttcatctcaggagtgtaccacaaggccaccgtagaggtggacgaggccggcaccgtggccgccgcggccacggccgtgtgcatgcaacagtgtgcaaggatgggtccaccgccggtagatttcgtggcggaccggcccttcttgttcgccatcgtggaggagaggagtggcgccgtgctgttccttgggcatgtggtgaaccctctggttgggtga

SEQ ID NO: 1726 - protein, 525 aa, Sorghum bicolor
MSTPRRGGQHHGDERAGTRAGAASRDNGGQGAGDLSFGSTAGPWIAFDPPHPWAPPEHARAPVFAQQAPVDPFPWSTPTSFANPFHGPSTLNVPWGPPGEVPFAGFPAAGPAAPEPEWRHRRQDVFAGIGRRSVPAVVTDPDLDGADGGASCLPLARQAGVRAAARNNFIVSPLSFHAALALVAAGARGETQRELLGFLGSAESLSELHGAAATALVARLNDLPQTSFACGVWVDRRRALTPEFRDAAASRYAAVADSVDFASEPEAARRRVNAFVGEATRGLIGDVLPPGSVNSSTVLVLANAIYFKGTWARRFDRSRTFAAPFHLPGGATVRAPFMTTSPLSEDQQVAVFPGFKALKLPYKNDGGAAWFYMLLLLPDGEALTLSDLYDKAVSTPGFIRRHTPVDGVPVRRFMVPKFKFTFEFEASGDIQKLGVMRAFEGGDFSGMVSGGNGLFISGVYHKATVEVDEAGTVAAAATAVCMQQCARMGPPPVDFVADRPFLFAIVEERSGAVLFLGHVVNPLVG

SEQ ID NO: 1727 - DNA, 1476 bp, Sorghum bicolor
atgggcggcggcaacggcgatggaaccaccccgctgggggagccgctgctggcgaagaaggggagggcgtaccggccgaggtgccccggatgccgggtggaccgcctgaacgcggagcgggagggggtgttccctctcaaggacctcttcctcatctggctcgtcaccatcacctgcaccttgccgatccagtctctgtttcccttcttgtattttatgataagggatctgcatattgctaaacaaacacaagacattggattttacgctggttttgttggcgcttcatatatgtttgggagagcactctcctcaacaatatggggaatcgtggctgataagtatggaaggaaaccagttatcgtactgacccttgttgcaatagttatcttcaatactctctttggactaagcttaaactattggatggcattaatcacacgatgcctgcttggggtcatgtgtggttatctcgggccaattaaggcttatgctacagaagttgtccgaaaagaatacaaccatctagctttagcagttgtttcttcctcacgaggcattggtctcattattggaccagctattggtggttaccttgcacagcctgcagataaatatccaagcatattctctcagacatccatatttgggaggtttccatattttcttccctgcctgtgtatatcgatccttgcagttattgctctaattgcctgcatctggtttccggaaactttgcataaacacaatgaggataccgttgataattcagttgaaactgtagaagaatctcttgctggtacagacactgaagaaaatggaggtggtggatgtctaacattgtttaaaaactggccgttgatgtcatctattactttatattgtatcttctctcttcaggatgtggcttatgcagagacgttctctctttgggctgtcagtgacagatcatatggtggattaagctttactaccacagatgtgggcaatgtccttgcaatgtcaggtctcttcctttttctgtatcaaatgttgatttatccattgcttgcaaaagcggtggaccacatcacattagttcgtgcagtggcgatattgactctaccacttcttgctagctatccattctttccttcattgaaagggttcgtgcttatgttggtagtaaattgtgcatcttttctgaagaatactttctcggtaactaccattaccgtgttcaacattttgatgaatgaagctgtgactcaggatgtaagagctgcagccaatggcatagctgtaacactaatgtccatctcaaaagctgttgctccagctgttgcaggaattatattttcatgggcccagaggcgtcaaacagcttcgtttcttccaggcgaccacttggtgttcttcatactgaacatcttcacactcaccggtctcatcttcaccttcagaccgttttttgttcgaggcagcgcgaagcactga

SEQ ID NO: 1728 - protein, 491 aa, Sorghum bicolor
MGGGNGDGTTPLGEPLLAKKGRAYRPRCPGCRVDRLNAEREGVFPLKDLFLIWLVTITCTLPIQSLFPFLYFMIRDLHIAKQTQDIGFYAGFVGASYMFGRALSSTIWGIVADKYGRKPVIVLTLVAIVIFNTLFGLSLNYWMALITRCLLGVMCGYLGPIKAYATEVVRKEYNHLALAVVSSSRGIGLIIGPAIGGYLAQPADKYPSIFSQTSIFGRFPYFLPCLCISILAVIALIACIWFPETLHKHNEDTVDNSVETVEESLAGTDTEENGGGGCLTLFKNWPLMSSITLYCIFSLQDVAYAETFSLWAVSDRSYGGLSFTTTDVGNVLAMSGLFLFLYQMLIYPLLAKAVDHITLVRAVAILTLPLLASYPFFPSLKGFVLMLVVNCASFLKNTFSVTTITVFNILMNEAVTQDVRAAANGIAVTLMSISKAVAPAVAGIIFSWAQRRQTASFLPGDHLVFFILNIFTLTGLIFTFRPFFVRGSAKH

SEQ ID NO: 1729 - DNA, 849 bp, Sorghum bicolor
atggcagctgccgccgccgcggccggagctgcatcggccgccgtcgccaaccaagaccctatgaacgcgctccgcacagccgtcctccgccgctccgcgccgcactggtccgcaggcgccgcttccttcttttccccgcccttccgcccccgccgctgccgctgccgccgcgagccagctcctgcagccaccgcgcgtaccccgcggtcccgcgcgagtgccaaggcccgggcgaagctcctggcggaggctgagccccgggacccctggctcgcctccctctcgctgctcccgaccgacgacgtcgccggtgctgacgccgcccccaacgggtgggcgattggggtggatcccgacactcgaggcgccatcgccgtcctctcgcctgacggctcctctcaggtgttcgacaacccgttcgtgcacattgtggtgtcagaggtcatccggaagcgcctggacaccaagtccattatacaactgctccgcggccttgatgtgcctcctggaactacggcatacattgagaagtctagcccatttccaactgatggaaagctgggatggtggagcactggtttctcatatggcttgtggattgcttctctagtggcttctggattttcagttgttccgattgcatcccagacatggaaggctcactttgggctatcccgaagtgaaacaccaaaggatgatagcagacaagctgcttcaattttgttccctgacaaagctcagtccttgaagttgaaaaaacaccatgggcgagcagaggctcttctgttagcagcctatgggaagggccttgtgctgccatcaaggaagttcagcgaaaccccagtttga

SEQ ID NO: 1730 - protein, 282 aa, Sorghum bicolor
MAAAAAAAGAASAAVANQDPMNALRTAVLRRSAPHWSAGAASFFSPPFRPRRCRCRREPAPAATARTPRSRASAKARAKLLAEAEPRDPWLASLSLLPTDDVAGADAAPNGWAIGVDPDTRGAIAVLSPDGSSQVFDNPFVHIVVSEVIRKRLDTKSIIQLLRGLDVPPGTTAYIEKSSPFPTDGKLGWWSTGFSYGLWIASLVASGFSVVPIASQTWKAHFGLSRSETPKDDSRQAASILFPDKAQSLKLKKHHGRAEALLLAAYGKGLVLPSRKFSETPV

SEQ ID NO: 1731 - DNA, 240 bp, Sorghum bicolor
atgagagcggttgtgctgtatgcgattgccatgggggattatgatcaagattgtgctgacccttgtgagaaattgattacaacaagggagggaatacagaccattgctttgtactcctcgtccattgggaggttctctaatgcagaaggcgctttcatttatcctatgtatgggcatggtgagctgcctcaagctttctgtcgctgtgctgcggttaagggcaccctatatgtaagatga

SEQ ID NO: 1732 - protein, 79 aa, Sorghum bicolor
MRAVVLYAIAMGDYDQDCADPCEKLITTREGIQTIALYSSSIGRFSNAEGAFIYPMYGHGELPQAFCRCAAVKGTLYVR

SEQ ID NO: 1733 - DNA, 567 bp, Sorghum bicolor
atggcccggggagagaaccaggaggcgcagagcgggaacgtccccgacgcatcatccgcatccgcgccgaaaccggcgtcgtcgtcatcgtcggcgggggccgggaagggcttggagggccagtcggtggtgcggcggctgcagtcggagctgatggcgctgatgatgggcggcgacccgggcgtgtcggcgttcccggacccggacggggacagcatgctccactgggtgggcaccatcgcgggctccgcggggacgccctacgagggcacctcgtaccgcctcgcgctggccttcaccgccgagtacccctacaagccgccgcaggtgcggttcgataccccctgcttccaccccaacgtcgacgtccacggcaacatctgcctcgacatcctccaggacaagtggtcctccgcctacgacgtccgcaccgtcctcctctccatccagagcctgctcggagagccgaacaacgactcgccgctcaacacgcaggcggcggcgctctgggcgaaccaggaagagttcaggaagatggtgcagaagctctacaagcccgcagcgtag

SEQ ID NO: 1734 - protein, 188 aa, Sorghum bicolor
MARGENQEAQSGNVPDASSASAPKPASSSSSAGAGKGLEGQSVVRRLQSELMALMMGGDPGVSAFPDPDGDSMLHWVGTIAGSAGTPYEGTSYRLALAFTAEYPYKPPQVRFDTPCFHPNVDVHGNICLDILQDKWSSAYDVRTVLLSIQSLLGEPNNDSPLNTQAAALWANQEEFRKMVQKLYKPAA

SEQ ID NO: 1735 - DNA, 1143 bp, Sorghum bicolor
atgaacgcggcggcggcggcggcgcggaaggccgcgggcggcggcatggcgcgcgcgccggcgctggtgctagcgctggtggcggcgggggcgttcctgatctcctacaacttcttcgccatgctgtttcgcggcggcggcggcggaataggcggcgcggcggcgtcctcggggacgagggaccctgtggtggccatgccggcgtggatgcgcgaggcggcggacaccgaggcgcggcggcggccgttccatgtggcgctcacggccacggacgcgccctacagccggtggcagtgccgagtcatgtacttctggtacaagcggatgcaggcgcggccgggcggggaggccatgggcggcttcacgcgcgtgctgcactcgggaaagcccgacgggctcatggacgagatccccaccttcgtcgtcgacccgctgcccgctggcaaggaccatggatacgtggtcttgaatagaccgtgggcatttgtgcagtggcttcagaaagcaaagattgaagaagagtatatactaatggcagaaccagatcatatatttgtgaaacctttaccaaatttggcccatgacgatgatccagcagcatttcccttcttttacattacaccatcagaacatgaacaaattatccggaaatactatgccaaagaaagaggtcctgtcacagatattgatcctattggaaattctcctgtaatcattaagaagacacttcttgagaagattgcccccacatggatgaatgtgtcaattcaaatgaaagaggatgaagagacagataaaatttttggatgggtgctggaaatgtatgcatacgctgttgctagcgcattgcatggggttcagcatatccttcgtaaagatttcatgatccagccaccctttgatacaaagctcgggaatacatttataatccacttcacttatggatgtgactattcactaaagggtgaactgacctatgggaaagttggtgaatggcgatttgacaaaagatcattcccagatgggccaccaccaagaaattttacattgccccctcctggagtcccagaaagtgtggttactctagtaaaaatggtcaatgaagctagtgcaaacctacctcggtgggatgatggaatataa

SEQ ID NO: 1736 - protein, 380 aa, Sorghum bicolor
MNAAAAAARKAAGGGMARAPALVLALVAAGAFLISYNFFAMLFRGGGGGIGGAAASSGTRDPVVAMPAWMREAADTEARRRPFHVALTATDAPYSRWQCRVMYFWYKRMQARPGGEAMGGFTRVLHSGKPDGLMDEIPTFVVDPLPAGKDHGYVVLNRPWAFVQWLQKAKIEEEYILMAEPDHIFVKPLPNLAHDDDPAAFPFFYITPSEHEQIIRKYYAKERGPVTDIDPIGNSPVIIKKTLLEKIAPTWMNVSIQMKEDEETDKIFGWVLEMYAYAVASALHGVQHILRKDFMIQPPFDTKLGNTFIIHFTYGCDYSLKGELTYGKVGEWRFDKRSFPDGPPPRNFTLPPPGVPESVVTLVKMVNEASANLPRWDDGI

SEQ ID NO: 1737 - DNA, 735 bp, Sorghum bicolor
atggggtccttaggcttgctggttctagcgatcgctgcctttctggagctcaccagagccgactcctggcatggtggccgcgccacgttctacggcggcggtgacgcctctggtactatgggaggagcgtgtgggtatggcaacttgtacaatgccgggtacgggaagaacaccgcggcgctgagcaccgcgctgttcaacaacgggcagagctgcggcgcgtgctttgagatccggtgcacgggcagtggcagctgccggtctggttccgccactgtgacggccaccaacttctgcccgcccaactatgcgctcgccaacaacaatggtggatggtgcaacccaccacagccgcacttcgacctctccgagccggtcttcacccagatcgccattgccggtgccggcgtcgtgcctgtccaatacaggagggtggcgtgcgtcaagcagggtggcatccggttcaccatcaacggccactcctacttcgtcctggtgctcatcacaaacgtgggcggcgctggcgacttgacggcggtgtcggtgaagggatcggggacgggctggcagacgatgagccacaactggggcgccaactggcagaacggcgccctgctcgacggccaggcgctgtcgttccaggtcaccggcagcgatggccgcaccctcacgtgcgacaacgccgcaccagttggctggagctacggccagacctacaccggcaaacagttttaa

SEQ ID NO: 1738 - protein, 244 aa, Sorghum bicolor
MGSLGLLVLAIAAFLELTRADSWHGGRATFYGGGDASGTMGGACGYGNLYNAGYGKNTAALSTALFNNGQSCGACFEIRCTGSGSCRSGSATVTATNFCPPNYALANNNGGWCNPPQPHFDLSEPVFTQIAIAGAGVVPVQYRRVACVKQGGIRFTINGHSYFVLVLITNVGGAGDLTAVSVKGSGTGWQTMSHNWGANWQNGALLDGQALSFQVTGSDGRTLTCDNAAPVGWSYGQTYTGKQF

SEQ ID NO: 1739 - DNA, 1518 bp, Sorghum bicolor
atgtcgaccatcgccgcctcccgccgctcgtcctcgtcctcgtccgcggccgccaagcgccccgcgatttcggagggcgccgggggacccaaggtggccgccgcgcaggccaagaagcgcgtggcgctcggcaacatcaccaacgttgccgcgcgaggagggagggccgtcgttggcggcggccttgggaatgccgcgccacccaccaccagcgcgaaattgaatccagcggtacccttgaagaagccatctttggcaagtgctcggagtgtgagctccattcggggtcaagctgtcaagtcggcttccatcaagccagctccaccagtgtcacgccatggcagtgcaattcaaaaacataatgttcctcctcctaaagtgcctaccattgccgatgtgccaagtcacgctcctgccttggtaccctgcaccggcttggtgtctcctggacgctcaggagattttgtttcgattgatgatacgatgtcgacttgcgactccatgaagagcccggactttgagtacatagacaatcaggattcctcgatgctggcttcattgcagcgacggacaaatgaacatctgcgaataacagaggatagagatgttgaagaaaataagtggaagaaaaatgccattgccccaatggaaattgaccgcatttgtgatgttgacaacgaatatgaggacccacagttgtgtgctactctggcttctgacatttacatgcacctgcgggaggctgagacgaagaaaagaccatcaactgatttcatggaaacaattcaaaaagacatcaacccaagcatgagggcaattttgatcgactggcttgtggaagtttctgaagaatatcgtcttgttcctgatactttgtacctgacagttaactacattgaccgttatctttctggtaacgaaattaaccgccaacggttgcaattacttggtgttgcttgcatgcttatagctgcaaaatatgaggagatatgtgcaccccaagtagaagaattctgctacataacagacaatacatacttcagagatgaggttctagatatggaaacttctgtactgaaatacttgaagtttgaaatgacagcacctacagcaaagtgctttttgaggaggtttgctcgtgctgcacaagcgtgtgacgaggatcctgctttgcatctcgagttccttgccaattacatcgctgagctatcactactggagtacaatctactctcttaccctccatcactaatagctgcatcggctattttcttggcgaggtttatactacagccaacaaagtatccttggaattccacacttgctcattatacacagtacaagccgtccgagttgagtgactgtgtaaaggcattgcatcgcctgtgcagtgttggttctgggaccaaccttccagcaatcagagaaaagtacagtcaacataagtacaaatttgttgcaaagaagcagtgtccaccacagatacctactgaattctttcgggatgccacatgctag

SEQ ID NO: 1740 - protein, 505 aa, Sorghum bicolor
MSTIAASRRSSSSSSAAAKRPAISEGAGGPKVAAAQAKKRVALGNITNVAARGGRAVVGGGLGNAAPPTTSAKLNPAVPLKKPSLASARSVSSIRGQAVKSASIKPAPPVSRHGSAIQKHNVPPPKVPTIADVPSHAPALVPCTGLVSPGRSGDFVSIDDTMSTCDSMKSPDFEYIDNQDSSMLASLQRRTNEHLRITEDRDVEENKWKKNAIAPMEIDRICDVDNEYEDPQLCATLASDIYMHLREAETKKRPSTDFMETIQKDINPSMRAILIDWLVEVSEEYRLVPDTLYLTVNYIDRYLSGNEINRQRLQLLGVACMLIAAKYEEICAPQVEEFCYITDNTYFRDEVLDMETSVLKYLKFEMTAPTAKCFLRRFARAAQACDEDPALHLEFLANYIAELSLLEYNLLSYPPSLIAASAIFLARFILQPTKYPWNSTLAHYTQYKPSELSDCVKALHRLCSVGSGTNLPAIREKYSQHKYKFVAKKQCPPQIPTEFFRDATC

SEQ ID NO: 1741 - DNA, 1392 bp, Sorghum bicolor
atggcgtccaagaagcaggcggggccgggattcgcggttcccgctcaggaaccgaagaacggcggcgatgcggccagactcgtcaggaagccaatggctacatttccacagcaagcggcggcaagaggccgtagggcacttgtcgacgttggcaatcttatgaatggccggccttctcttgtgaaccgacagaagcaagcggttgcagcaacagcaaacagccataaagcagtcgacgttggcagcaagaagccactggttcctcaggcagcagcaagaagccggcgatcacttgccgatattaagaatcctaggatcaatgaccgtgctgctcctgcaaatcgtcagaggccactggctgctgtgtctaaaaggaatgggaaagcagtaatgctgaaggaatgcaaggtgaagcctgaagtcattgtgattagtccagataccgagaaggagaagaaagccaaaacctcagggggcccgagagtctgtaggagggtaccaacactttttggtaatttgacaaaatgcagcagggcttctgatggggttgtcagcagcccgaagaagacagatccatatgacattgatacacctgattcttgcaatgagctggcagtggttgaatatgttgaggacatctacagattctacaagagcactgagggcacctgcctgcccctcagcagctacatgagctcgcagactgaaatcagcgagagaatgagagctatccttatcgactggattatcgaggtacagtacaggcttattctaatgccagagacactttacttgaccgtctacatcatcgatcagtacttgtccatggagagtgttccaagaaaggagctacagctcgtcggcataagtgccgtgctgatagcaagcaagtatgaagagacatgggctccactggtcaaggatttgctgtgcatttgtgacaatgcctttaccagagaccaggttctgaccaaggaaaaagccatcctggacaggctccattggaacttgacggttccaacaatgtacatgttcattgttcggtatctgaaagccgcaatgggcgacaaaaagcttgagaacatggcattcttctactctgagctggcattggtccagtacacgatgctggtttaccctccatcagtgaccgcagctgctgccgtctatgctgccaggtgtacccttggaatgaatccactgtggactgatattctggagcatcacactggcttaagtgagccacagttactggattgcgctaggcggctgatcaacttccatgccctggctccggaaagcaagcagaaggcggtgtacaagaaatactccagccccaagctcggggccgtcgcgcttcaataccctgacaagaagctgttgccagtttga

SEQ ID NO: 1742 - protein, 463 aa, Sorghum bicolor
MASKKQAGPGFAVPAQEPKNGGDAARLVRKPMATFPQQAAARGRRALVDVGNLMNGRPSLVNRQKQAVAATANSHKAVDVGSKKPLVPQAAARSRRSLADIKNPRINDRAAPANRQRPLAAVSKRNGKAVMLKECKVKPEVIVISPDTEKEKKAKTSGGPRVCRRVPTLFGNLTKCSRASDGVVSSPKKTDPYDIDTPDSCNELAVVEYVEDIYRFYKSTEGTCLPLSSYMSSQTEISERMRAILIDWIIEVQYRLILMPETLYLTVYIIDQYLSMESVPRKELQLVGISAVLIASKYEETWAPLVKDLLCICDNAFTRDQVLTKEKAILDRLHWNLTVPTMYMFIVRYLKAAMGDKKLENMAFFYSELALVQYTMLVYPPSVTAAAAVYAARCTLGMNPLWTDILEHHTGLSEPQLLDCARRLINFHALAPESKQKAVYKKYSSPKLGAVALQYPDKKLLPV

SEQ ID NO: 1743 - DNA, 1341 bp, Sorghum bicolor
atgagggagatcctccacatccagggcggccagtgcgggaaccagatcggttccaagttctgggaggttgtctgcgacgagcatggtatcgaccccaccggacgctacgtcggcacctccgacctccagctcgagcgcgtcaacgtctactacaacgaggcctcatgcggccgcttcgtgccgcgcgccgtgctcatggacctcgagcccggcaccatggacagcgtccgcaccggcccgtacggacagatcttccgccccgacaacttcgtcttcggccagtctggcgcggggaacaactgggccaagggccactacaccgagggcgctgagctcatcgactccgtgcttgacgtcgtgaggaaagaggctgagaactgcgactgcctgcaaggcttccaagtttgccactcccttggaggaggcactggatctggaatgggcacccttctcatctcaaagatcagggaggagtaccctgatcggatgatgctcaccttttctgtgttcccctcacccaaggtgtcggacactgttgtggagccatacaatgccacactgtctgttcatcagttggttgagaatgctgatgaatgcatggttctggacaacgaggcgctttatgacatttgcttccgaactctgaagcttacaacacctagctttggagacttgaatcacttgatcagtgcaacaatgagcggagtcacttgctgcctgcgcttcccaggacagctgaactctgacctgcgcaagcttgcagtcaacctgatcccattccctcgcctgcacttcttcatggttggctttgcgccactcacctcgcgtggctcgcagcagtaccgtgctctcaccgtccctgagctaacccagcagatgtgggatgccaagaacatgatgtgcgccgctgacccgcgccatggccgctatctcacagcctctgccatgttccgtggcaagatgagcaccaaggaggtggacgagcagatgatcaatgtgcagaacaagaactcgtcctacttcgtcgagtggatccccaacaacgtcaagtccagtgtctgcgacatcccgccgcgtggcctttccatggcctccaccttcattggcaactccacctccatccaggagatgttccgccgtgtgagcgagcagttcactgctatgttcaggaggaaggctttcttgcattggtacactggtgagggcatggatgagatggagttcaccgaggctgagagcaacatgaatgatctggtgtccgagtaccagcagtaccaggatgccactgccgatgaggaggcagagtacgaggacgaggaggatggcatccaagacgagtaa

SEQ ID NO: 1744 - protein, 446 aa, Sorghum bicolor
MREILHIQGGQCGNQIGSKFWEVVCDEHGIDPTGRYVGTSDLQLERVNVYYNEASCGRFVPRAVLMDLEPGTMDSVRTGPYGQIFRPDNFVFGQSGAGNNWAKGHYTEGAELIDSVLDVVRKEAENCDCLQGFQVCHSLGGGTGSGMGTLLISKIREEYPDRMMLTFSVFPSPKVSDTVVEPYNATLSVHQLVENADECMVLDNEALYDICFRTLKLTTPSFGDLNHLISATMSGVTCCLRFPGQLNSDLRKLAVNLIPFPRLHFFMVGFAPLTSRGSQQYRALTVPELTQQMWDAKNMMCAADPRHGRYLTASAMFRGKMSTKEVDEQMINVQNKNSSYFVEWIPNNVKSSVCDIPPRGLSMASTFIGNSTSIQEMFRRVSEQFTAMFRRKAFLHWYTGEGMDEMEFTEAESNMNDLVSEYQQYQDATADEEAEYEDEEDGIQDE

SEQ ID NO: 1745 - DNA, 186 bp, Sorghum bicolor
tgcctgagaaaagaagatatattgatccaaaaaaacttcagtgaagccaaacaaactagaaaactgcactggctgtcaagaaatgtttcttgtaaccagattccatctaccacctacattttacacaaaactttggagcatcttagctcgctaaagctagccgtcctgccaccaaatctgtcttga

SEQ ID NO: 1746 - protein, 61 aa, Sorghum bicolor
CLRKEDILIQKNFSEAKQTRKLHWLSRNVSCNQIPSTTYILHKTLEHLSSLKLAVLPPNLS

SEQ ID NO: 1747 - DNA, 174 bp, Sorghum bicolor; identical to SEQ ID NO: 479

SEQ ID NO: 1748 - protein, 57 aa, Sorghum bicolor; identical to SEQ ID NO: 480

SEQ ID NO: 1749 - DNA, 1206 bp, Sorghum bicolor
atgggagccggggctgaggtcatgcatcaggtcgtgccgctgctggagccgccgttccaccggtgcgtcgttaagagcgtcgatgtcatggaggaggtggtcaccgtggcgcctgggcaggtgcagccggcgacgtcgccgaaggcggtggtggaggttgccgtagaggtgcccgatctggagttcaagagagcttctaatgctgggagtagtgtatctgcagaacaactgcaatttgtccctagcattagatctggtagctttgctgatattgggcctaggcggttcatggaagacgaacatattagaattgatgatctttctggtcatcttggctcactgttgatggtctctgcacctagcgccttctatggggtgtttgatggtcatgggggttcagatgcagcagcctacatgaaaacacatgcaatgaggttgttctttgaagatgctgacttccctcaaacatcacaagaagatgaaatatatgctggatctgttgaggattcagtccgcaaagctttcttgcgggctgaccttgctcttgctgatgattccgtcatcaaccgttcttctggcaccacagcgctgacagcattggtcctcgggaggcaattgttagtagcaaatgttggggattgccgtgcagtcctgtgtaggaaaggaacagcggtggagatttcaaaggatcacaggccgacatatgacgcagagcgtcaaagggttatcgagtgtggtggatacattgaggatggctacctcaacggtgtactctctgtgacccgggctttaggggactgggatatgaaactgccccaaggctctccatcgcctcttatcgctgagccagagatacactggaccaccctgacagaggaagatgagttcctcatcattggctgcgatggcatatgggacgtgatgagcagccagcacgcggtgagcacggtccgaaaggggctccggaggcacgatgaccctgagcggtgtgctcgggagcttgccatggaagcgaagaggcttgagacctttgacaacctcactgtgatcatcgtgtgctttgtccctgacctcgcgggggctgcctcagcagctgcgccttcttcagagcaggctccggctcccgctggaaggatcaggtgctgcaagagcctgtcgccggaggcactctgcaagctgaggagatggcttgagtctgaccattag

SEQ ID NO: 1750 - protein, 401 aa, Sorghum bicolor
MGAGAEVMHQVVPLLEPPFHRCVVKSVDVMEEVVTVAPGQVQPATSPKAVVEVAVEVPDLEFKRASNAGSSVSAEQLQFVPSIRSGSFADIGPRRFMEDEHIRIDDLSGHLGSLLMVSAPSAFYGVFDGHGGSDAAAYMKTHAMRLFFEDADFPQTSQEDEIYAGSVEDSVRKAFLRADLALADDSVINRSSGTTALTALVLGRQLLVANVGDCRAVLCRKGTAVEISKDHRPTYDAERQRVIECGGYIEDGYLNGVLSVTRALGDWDMKLPQGSPSPLIAEPEIHWTTLTEEDEFLIIGCDGIWDVMSSQHAVSTVRKGLRRHDDPERCARELAMEAKRLETFDNLTVIIVCFVPDLAGAASAAAPSSEQAPAPAGRIRCCKSLSPEALCKLRRWLESDH

SEQ ID NO: 1751 - DNA, 1551 bp, Sorghum bicolor
atggcgtccaaacctttctccaaatccttcttcgccttctaccgatttgttcgacgaaggctagggaatccaccatgtcagcaccatcattgggaaagaacgagtgggatatctacctatcctgttgtcatccaggggtgcccactagccttccaagttgatgatcaccttcagaaccaagctctagttctagatatagaagggctactgaggtcttcgtctttcttcccctacttcatgcttgttgccatagaagcagaagtacaatcaagagtcatggtcatggtatgcttcttggggttaagggaggagaaggtggctagagtggctagggcaacgttgccaaagcatttcctagaggatatagggagggaagggcttgagatagtgagagggttcaaaagggtggtaggattgagtaggatgatccctagggatatggtggaggatttcctcaaagagtacatgggggtggagatggtggtgggaagggaggtaaagatggtgagagggcattatgttggtttgttggaaatggagagcgagataaagtttgggctggagaagattgaagggacagagatggtagggtttggaagctgcacgggctattttagccatgattatcaccagctcttcacttgttgcaaggaagtttatttggtgaccccagaacaaaagaaacaatggtcgaccttgccaagagaccaatacccgaggcccctgatcttccatgatagcaggctagctttcagacctacccctcaagccaccctagccatgttgatgtggctcccgcttgctgtccccctcaccgtgctccgaacactcgtctttgtgaaccttccatactctatctcactcccaattgggagtgtgaccggagtcacaacacgggtcatcaactccccaatctctagcaatggcaacacaaaccatggagctcttgcccagcccaatccgcggggtcacctatacgtaagcaaccatcgcacacttctcgacccagtttacatctcagcgatgctgaacaagaaggtctcagcaatgacatacagtgtcagccgtatcagtgagctcatgtcacccatccagaccatccgactgactcgaaaccgcgatgaggatcgcaggagaatggaaaactcactgcagaagggggacgtggtgatttgccctgagggtaccacatgcagggagccatacctgcttcggttcagcccgctatttgtcgagctcgtccatgaggtatacccagtggcactgatgaactggtccagtatgttctatggaatgtctactggcaggtccaagtacctagaccacttctactacttcatgaacccacatccagcgtatgttgtccagttcatggaaaggatgaaaacccatgtggtgatcaacggcaggagatgcgagagctatgaggtggcaaacatggtgcagggcgagattggtagggctcttgagtttgaacccactaaactaactcgcaaggacaaatacctgattctagcaggaaatgaaggggttgtggatacaaagcagtaa

SEQ ID NO: 1752 - protein, 516 aa, Sorghum bicolor
MASKPFSKSFFAFYRFVRRRLGNPPCQHHHWERTSGISTYPVVIQGCPLAFQVDDHLQNQALVLDIEGLLRSSSFFPYFMLVAIEAEVQSRVMVMVCFLGLREEKVARVARATLPKHFLEDIGREGLEIVRGFKRVVGLSRMIPRDMVEDFLKEYMGVEMVVGREVKMVRGHYVGLLEMESEIKFGLEKIEGTEMVGFGSCTGYFSHDYHQLFTCCKEVYLVTPEQKKQWSTLPRDQYPRPLIFHDSRLAFRPTPQATLAMLMWLPLAVPLTVLRTLVFVNLPYSISLPIGSVTGVTTRVINSPISSNGNTNHGALAQPNPRGHLYVSNHRTLLDPVYISAMLNKKVSAMTYSVSRISELMSPIQTIRLTRNRDEDRRRMENSLQKGDVVICPEGTTCREPYLLRFSPLFVELVHEVYPVALMNWSSMFYGMSTGRSKYLDHFYYFMNPHPAYVVQFMERMKTHVVINGRRCESYEVANMVQGEIGRALEFEPTKLTRKDKYLILAGNEGVVDTKQ

SEQ ID NO: 1753 - DNA, 1239 bp, Sorghum bicolor
atggacaatcccacacctcccgtggccgccgccgctgcccgctgtttcgacttcgacttgatagtcctgggcgccggcatcatgggtagctgcacggcacacgcggcggcgtcccgaggcgcgcgcgtcttgctcctggagcgcttcgacctgctgcacggcctgggctcctcgcacggcgagtcgcgcaccttccgcgacgcctacccggacgcgtggtacccgccgatggtgcgcctccccggccgcctctgggcggacgctgaggccgagtccggccaccgcgtactcaccgcgattccgctgctcttgatgggcccgcgcagcaacgcctcggtcctcgccgccgccagaaacgccggtgcggaggaggtggacgatgtgtccgcgaggtggggaggcgcgttccggctccctgatgggtgggttgccgcggtgagcgaccacggctccggcgtgctgcacacgaccgaggctgtcaaaatgttccaggatctcgccgtccacaagggtgctatggtgagggacaacgcggaggtcgtcgagatcctgaagagaccggagggaggcatcgcggtgaggacgagcaccggcgaggagttccacagcgcgaagtgcgtcgtcacggtgggcgcgtggaccagcaggctcatcaagtccgccgccggtgtggagctcccgctccccatccagccgctgcacacgctggtcctgtactggcgcatcgagcccggccgagagggagagctgacggcggagtccggcttccccacgttctcgagctactgcgacccgctgtacgtgtacagtatgccgtcgctggagcgcccgggcatgatcaagatcaactatcacggcggaccaccgtgcgacccggacctggtctctggcggcggcgacgtcgtggagcgggtggcccgctggattgacgagttcatgcctggacacgtggagaccgcgggcgggccggtcgaccggctggcgtgcatgtactccatgacgccagacgaggacttcgtgatcgacttcctcggcggggagttcgggcaggacgtggtggtcggggctgggttttccgggcatggcttcaagatgggtccggcggtagggatgatcctggcagagatggctttggacggcgagacgaggactgcggcggaggccggcgtggagctcggtcacttcaggatcaaccggttcgagagtaaccccttggggaatgcctccaaggaggattag

SEQ ID NO: 1754 - protein, 412 aa, Sorghum bicolor
MDNPTPPVAAAAARCFDFDLIVLGAGIMGSCTAHAAASRGARVLLLERFDLLHGLGSSHGESRTFRDAYPDAWYPPMVRLPGRLWADAEAESGHRVLTAIPLLLMGPRSNASVLAAARNAGAEEVDDVSARWGGAFRLPDGWVAAVSDHGSGVLHTTEAVKMFQDLAVHKGAMVRDNAEVVEILKRPEGGIAVRTSTGEEFHSAKCVVTVGAWTSRLIKSAAGVELPLPIQPLHTLVLYWRIEPGREGELTAESGFPTFSSYCDPLYVYSMPSLERPGMIKINYHGGPPCDPDLVSGGGDVVERVARWIDEFMPGHVETAGGPVDRLACMYSMTPDEDFVIDFLGGEFGQDVVVGAGFSGHGFKMGPAVGMILAEMALDGETRTAAEAGVELGHFRINRFESNPLGNASKED

SEQ ID NO: 1755 - DNA, 1254 bp, Sorghum bicolor
atgacggatcggccgtcgtttccggctctcattgctctcgccgttcttgtggtgggcagctactgctgcgtggcgacctcggccgcctcgccggcggtggaagatgatgagctgcgtggtcggacgatgcggcggcgccgcgcggcgtcggtgatggtgcccatcaccatcctcaagtccgcagtcagcgacggagctgtgtgcatggatggaacgccacctgcttacaacttggatcctggctccggaacgggtagcagaagctggattgtgaacttagagggaggtgcatggtgcaacagcgccaagacatgccggcttaccaagagctccgggcgcggctcgtcggaccacatggataaagagatccccttcaccggcatcatgagcagcagcagcgccgtcaatcctgatttctacaattggaaccgggtaaagattcgctactgcgacggtggatcttttgccggcgaggcctttgataagaacactgggatttatttccgagggcagcgcatctggaacgcggtcatccggcacctcctctccattgggatggcctctgctgatcgtgtgctgctcaccggctgctcctcggggggtctggcggtgatcctgcactgcgaccagttgcgcgccttcttcccgtccggcaccaccgtcgtcaagtgcatctccgacggcggcctctacctcgacgccgtggatgtctccggtggccggagcctgagatcctacttccgtgacatcgtggccatgcaaggaatagctcagaacctgccgccggcttgcaccgcccgtctcgacgccacctcgtgcttcttcccgcaaaacataatcgatggcatcaagaccccactgtttctgctaaatgcagcatacgacttcattcagattgtgctcagcctggcgccagacagagctgacccaaacggcgcttggcgagcctgcaagtccaaccgcacggcctgcagtgcatcccagatgagtttcctgcaagatttcagggaccagatggtagcatccgtcagaggcttctccggttccaggagcaacgggctcttcataagctcctgcttcgcgcactgccagtcggagcagctgggcacctggaacaccaaaccaggtggctcccccaccattcaaaacaaggggattgcaaaatccgttggtgactggtactttgatcgagctgaagtgaaggcgatcgactgccgctatccctgcgacaacacttgccaccatatcatatga

SEQ ID NO: 1756 - protein, 417 aa, Sorghum bicolor
MTDRPSFPALIALAVLVVGSYCCVATSAASPAVEDDELRGRTMRRRRAASVMVPITILKSAVSDGAVCMDGTPPAYNLDPGSGTGSRSWIVNLEGGAWCNSAKTCRLTKSSGRGSSDHMDKEIPFTGIMSSSSAVNPDFYNWNRVKIRYCDGGSFAGEAFDKNTGIYFRGQRIWNAVIRHLLSIGMASADRVLLTGCSSGGLAVILHCDQLRAFFPSGTTVVKCISDGGLYLDAVDVSGGRSLRSYFRDIVAMQGIAQNLPPACTARLDATSCFFPQNIIDGIKTPLFLLNAAYDFIQIVLSLAPDRADPNGAWRACKSNRTACSASQMSFLQDFRDQMVASVRGFSGSRSNGLFISSCFAHCQSEQLGTWNTKPGGSPTIQNKGIAKSVGDWYFDRAEVKAIDCRYPCDNTCHHII

SEQ ID NO: 1757 - DNA, 3027 bp, Sorghum bicolor
atggccatggcgcctcacgcctcggcggccaccgcagccgctacccctgcgctgcgctttccccacactttgtccgccacgggcctctcctcgtcgcctctcgctgggggctgcggcggctgccgggttcggttccgccccagccggcgcggaccgggtatgcaggggcgccgagaaggtggctcccacttggcgcgcgtggggggcctgctgggcagcgtattcggcgggggcggccgcgacgacggggaggccacgcggaagaagtacgccgacaccgtggcgcgcatcaactccatggagcccgaagtctccgcgctctcagacgccgacttgcgcgcacgcaccgccgcgctccaggaccgcgctcgcaccggggaatccctggattcccttctccccgaagcatttgctgttgtgagggaggcttccaagagagttctaggtctccgtccctttgatgtgcagttgattggtggcatggttctgcacaagggggagattgcagaaatgaagactggagaggggaagactcttgtggccattctgccagcattcttaaatgctttgagtgggaaaggagtgcatgttgtcactgtaaatgattatcttgcaagacgtgattgtgagtgggttggtcaagttccccgatttctaggactgcaggttggcttaattcaacagaacatgacacctgagcaaaggagggaaaattactcatgcgatattacttatgtcacaaacagtgagcttggttttgattatctaagagataaccttgcaatgactgtagatgaacttgtcttgaggaacttcaattactgtgtgatagatgaagttgattcaatccttattgatgaagcaagaacacctcttataatatcaggcctagctgaaaagccaagcgaccggtattacaaagcagcaaaaatagctgatgcttttgagcgagacattcattacacggtggatgaaaagcaaagaaatgttttacttacagaagaaggttatgctgatgctgaagaaatactggacataaatgatctatatgatcctcgtgaacagtgggcttcgtatgttctaaatgcaatcaaggctaaggagctcttccttaaagatgtcaattacattgttcgtagcaaggaagtgcttattgtagatgagtttactggcagagttatgccgggcaggcgatggagtgatggtctccatcaagcaattgaagcaaaagaaggtgtatctatacaaaatgaaaccataactctcgcatcaataagttaccaaaacttctttcttcagtttcccaaactctgtggcatgactggaactgcagctacagagacccaagagtttgagagcatatataaacttaaagttactgttgttccaacaaacaagccaatgatacggaaggatgattcagatgttgtttttagagcaacaaatggaaaatggcgtgctgttcttgtggagatatcaagaatgaataaagttggccgtcctgtgcttgttggtaccaccagtgttgagcaaagtgaatctttatcagagcaattgcgtgaagctgggattcctcatgaggtcctgaatgctaagccagagaatgttgagagggaggcagagatcgtagctcagagtggacgccttggtgctgtgacaattgccaccaatatggcaggacgtggaactgatattattcttggtggcaatgcagaattcatggccaggttgaagttgcgtgagatccttatgccaagagttgtcaatccaatagatggtgttattgtatccaaaaagcagatgccaccacgaaagacatggaagacgaatgaaagcttgttcccatgtgaactttcaaaagaaacattatcatccgtcaaagatacagttgaaatggctgtcaaagaatggggagagaaatcattaactgaactggaagcagaagagcggttgtcctactcatgtgagaagggaccaacacgtgatgaagtaatagcaaatttgagaaatgcatttatgaagatagcagacgaatataaagttttcactgaggaggaaaagaagaaggtcattacagcaggcggacttcatgtagtaggaacagagcgccatgaatcgcgcagaattgacaatcagctccgtggtcgaagtggaagacaaggggatcctggaagctctcgcttctttcttagtctcgaggataatattttccggatctttggaggtgacaggatacagggtctgatgcaagcatttcgagttgaagatctgcctattgaatcgaaaatgctaacaagggctctagatgaagcacaacgaaaagttgagaactacttttttgacatcaggaagcagttgtttgagtatgatgaggtattgaatagccagagagatcgtgtatatgcagaaagaagacgtgctcttgcatctgacagtcttgagtcacttattgtggaatatgctgaattgacaatggacgacatattagaggctaacataggccctgatactccaaaggaaaattgggacctgagcaaacttatagctaagctgcaacagtattgctatctgttggatgatttgacaccagaattgttggagggcaaaagctcaagctatgaggatttgcgggagtacctccgtaagcgaggacgtgaagcttacttccaaaaaactgaaattgtggagaagcaagctccaggattgatgaaggaggctgagcggtttctaattctcagcaatatcgataggctgtggaaagaacacctgcaggcactaaaatttgtccaacaagctgttggtttaaggggttatgcccaacgagatccccttattgagtataaacttgagggatataatcttttcttagacatgatggctcaaatcaggaggaatgttatttattctgtatatcagttcaaaccagtagtgaagaaccaagaagaggaagcatcccaaaagaaggtgtcaaaaaagaaactggacaaaggagctaacaaacttggtgctgcccaagcagcgtcatga

SEQ ID NO: 1758 - protein, 1008 aa, Sorghum bicolor
MAMAPHASAATAAATPALRFPHTLSATGLSSSPLAGGCGGCRVRFRPSRRGPGMQGRREGGSHLARVGGLLGSVFGGGGRDDGEATRKKYADTVARINSMEPEVSALSDADLRARTAALQDRARTGESLDSLLPEAFAVVREASKRVLGLRPFDVQLIGGMVLHKGEIAEMKTGEGKTLVAILPAFLNALSGKGVHVVTVNDYLARRDCEWVGQVPRFLGLQVGLIQQNMTPEQRRENYSCDITYVTNSELGFDYLRDNLAMTVDELVLRNFNYCVIDEVDSILIDEARTPLIISGLAEKPSDRYYKAAKIADAFERDIHYTVDEKQRNVLLTEEGYADAEEILDINDLYDPREQWASYVLNAIKAKELFLKDVNYIVRSKEVLIVDEFTGRVMPGRRWSDGLHQAIEAKEGVSIQNETITLASISYQNFFLQFPKLCGMTGTAATETQEFESIYKLKVTVVPTNKPMIRKDDSDVVFRATNGKWRAVLVEISRMNKVGRPVLVGTTSVEQSESLSEQLREAGIPHEVLNAKPENVEREAEIVAQSGRLGAVTIATNMAGRGTDIILGGNAEFMARLKLREILMPRVVNPIDGVIVSKKQMPPRKTWKTNESLFPCELSKETLSSVKDTVEMAVKEWGEKSLTELEAEERLSYSCEKGPTRDEVIANLRNAFMKIADEYKVFTEEEKKKVITAGGLHVVGTERHESRRIDNQLRGRSGRQGDPGSSRFFLSLEDNIFRIFGGDRIQGLMQAFRVEDLPIESKMLTRALDEAQRKVENYFFDIRKQLFEYDEVLNSQRDRVYAERRRALASDSLESLIVEYAELTMDDILEANIGPDTPKENWDLSKLIAKLQQYCYLLDDLTPELLEGKSSSYEDLREYLRKRGREAYFQKTEIVEKQAPGLMKEAERFLILSNIDRLWKEHLQALKFVQQAVGLRGYAQRDPLIEYKLEGYNLFLDMMAQIRRNVIYSVYQFKPVVKNQEEEASQKKVSKKKLDKGANKLGAAQAAS

SEQ ID NO: 1759 - DNA, 1185 bp, Sorghum bicolor
atggcggctgagagcttcctcttcacctcggagtccgtgaacgaggggcaccccgacaagctgtgcgaccaggtgtcggacgccgtgctcgacgcctgcctcgcgcaggaccccgacagcaaggtggcgtgcgagacctgcaccaagaccaacatggtgatggtgttcggcgagatcaccaccaaggccaccgtggactacgagaagatcgtccgggacacctgccgcgagatcggcttcgtctccgacgacgtgggcctcgacgcggaccgctgcaaggtgctggtcaacatcgagcagcagtcccccgacatcgcgcagggcgtgcacgggcacttcaccaagcggcccgaggagatcggcgccggcgaccagggccacatgttcgggtacgccaccgacgagacccccgagctgatgccgctcagccacgtgctggccaccaagctcggcgcgcgcctcaccgaggtccgcaagaacggcacctgcgcctggctcaggcccgacggcaagacccaggtcacggtggagtacgtcaacgagggcggcgccatggtgcccgtccgcgtccacaccgtcctcatctccacccagcacgacgagaccgtcaccaacgacgagatcgccgccgacctcaaggagcacgtcatcaagcccgtcatcccggagaagtacctcgacgagaagaccatcttccacctcaacccgtcgggccgcttcgtcatcggtgggccccacggcgacgccggcctcaccggccgcaagatcatcatcgacacctacggcggctggggtgcccacggcggtggcgccttctccggcaaggaccccaccaaggtggaccgcagcggcgcctacatcgccaggcaggccgccaagagcatcgtggccagcggcctcgcccgccgctgcctcgtgcaggtctcctacgccatcggcgtgccggagcccctgtccgtgttcgtcgactcgtacggcaccgggagcatcccggacaaggagatcctcaagatcgtcaaggagaacttcgacttcaggcccggcatgatcaccatcaacctcgacctgaagaaaggcggcaacaggttcatcaagaccgccgcctacggccactttggccgtgacgacgccgacttcacctgggaggtggtgaagcccctcaagttcgacaaggcatccgcttaa

SEQ ID NO: 1760 - protein, 394 aa, Sorghum bicolor
MAAESFLFTSESVNEGHPDKLCDQVSDAVLDACLAQDPDSKVACETCTKTNMVMVFGEITTKATVDYEKIVRDTCREIGFVSDDVGLDADRCKVLVNIEQQSPDIAQGVHGHFTKRPEEIGAGDQGHMFGYATDETPELMPLSHVLATKLGARLTEVRKNGTCAWLRPDGKTQVTVEYVNEGGAMVPVRVHTVLISTQHDETVTNDEIAADLKEHVIKPVIPEKYLDEKTIFHLNPSGRFVIGGPHGDAGLTGRKIIIDTYGGWGAHGGGAFSGKDPTKVDRSGAYIARQAAKSIVASGLARRCLVQVSYAIGVPEPLSVFVDSYGTGSIPDKEILKIVKENFDFRPGMITINLDLKKGGNRFIKTAAYGHFGRDDADFTWEVVKPLKFDKASA

SEQ ID NO: 1761 - DNA, 987 bp, Sorghum bicolor
atggcggcggcggcggcggatacctcggaggcgtccgcggccgggatcgcgctcgcggaggccaacatcaactgggagaggttggacaagacgaggtttcatgtgattggagctatcctgtttacggcccagcaaggtgctctgcacccaacagctgttgtgaagactaggatgcaggttgctgaaggggggcttgcacatatgtccgggtttgctgtttttaggaggatattgagaagcgatggcatccctggcattttcagaggatttggtacctctgctgttggagctctgcctgggcgagtgctagctctaacatcactggagatctctaaagaaatgatgtttaagtattgtgaacattttgatatgtcagaggcgtcacgaattgctgtagcaaatggggttgcaggcctgatgtcgagtatctgttcatgctcatattttgttcctctagatgtgatttgccaaaggctcatggttcaaggattgccggggatggcaacatacaggggaccatttgatgtgataaataaggttgtcagaacagaagggatccgggggctttaccgaggttttggaatcactatgttaactcagtcgccagcttcagccctttggtggagtgcatatggtggtgctcaacatgctatttggaggagtttgggttatggaaatgactcaccaacaaaaccatctcaatcagaacttgttgctgtccaagctacagcaggaacaattgctggtgcttgctcgtcgattatcaccactccaatagatacaatcaagactcggcttcaggttatggacaactatggtaagggtaggccttctgtcatgaaaactaccaggctgctgcttgatgaagatgggtggagggggttttatagaggttttggaccgaggtttcttaacatgtctctctggggcacatcaatgatcgtgacatatgagctcataaagaggctatccgtgaagtctgaatga

SEQ ID NO: 1762 - protein, 328 aa, Sorghum bicolor
MAAAAADTSEASAAGIALAEANINWERLDKTRFHVIGAILFTAQQGALHPTAVVKTRMQVAEGGLAHMSGFAVFRRILRSDGIPGIFRGFGTSAVGALPGRVLALTSLEISKEMMFKYCEHFDMSEASRIAVANGVAGLMSSICSCSYFVPLDVICQRLMVQGLPGMATYRGPFDVINKVVRTEGIRGLYRGFGITMLTQSPASALWWSAYGGAQHAIWRSLGYGNDSPTKPSQSELVAVQATAGTIAGACSSIITTPIDTIKTRLQVMDNYGKGRPSVMKTTRLLLDEDGWRGFYRGFGPRFLNMSLWGTSMIVTYELIKRLSVKSE

SEQ ID NO: 1763 - DNA, 483 bp, Sorghum bicolor
atgctgttgcgccactctgatgtcggcggcagctcctccacggcccagtcgcgccagcacttttcgcatgacgcccagctcctcgcccatgcacgcgccgtggcccccaagccccgcgctggcttacccgcgcagccgttgctgaggttgaccggccttgccatcgacctccagcgccatcgcctccctgggctatgcgccctcgatgttgtcctcacgagcacgatggggacggagcatcggcgccgatgcgtgaccgccccatgccgccaccgtcggatcaagcatggcgacggccgccaaaccctagccacgccggggatgtggtgtccgcagcgtcgggctccggcggcgggcgtctgcggccgcggcgggagcgcgtggcgtaaaaatgctgcagggactggggcggcggtggtgggggaggatggaggggagcacctgacgcgttacgagggaagccgggagaaagggtcgaggtga

SEQ ID NO: 1764 - protein, 160 aa, Sorghum bicolor
MLLRHSDVGGSSSTAQSRQHFSHDAQLLAHARAVAPKPRAGLPAQPLLRLTGLAIDLQRHRLPGLCALDVVLTSTMGTEHRRRCVTAPCRHRRIKHGDGRQTLATPGMWCPQRRAPAAGVCGRGGSAWRKNAAGTGAAVVGEDGGEHLTRYEGSREKGSR

SEQ ID NO: 1765 - DNA, 1032 bp, Sorghum bicolor
atggcggcgaggagggcgccgctgctcgtcgctgtcctcctcctgcaccaaacggtgtccgcgcttgctggaaagagctactatgaaatactgcaagtgtcaaagggtgcatcggaggataaaatcaagcgggcctaccgcaagcttgcgctaaaataccaccctgacaagaaccccaacaatgaggaagccgacaggcagtttaccgagatcaacaatgcctacgaggtcttgacgaatcaggagaagaggaaagtctatgactggtacggtgaggagggtttggagcaatcccatggcaggcatagtgatggtgatggtcatgctatgaacatcgaacacgtgtttagcaatggtggaagtatggaagaggaggaagaacgaactttaaagggtgatgatgtcattgttgaactggatgcttcgctagaagacttgtatatgggtggttccttaaagatttggagggagaaaaatgttataaaaccagctcctggcaacaggcgatgcaaatgtaggaatgaaattcgtcaacgagaaattgctcctggtgttttttatcaaatgagtgagcaggtttgtgatacatgcccaaatgtgaagtacgtaagagaaggcgatttcattaatgttgatattgaaaaggggatgcaagatggacaggaaattttattttacgaggatggtgaacctaagattgatggagagtctggtgatttgaagtttaacattcggacagcacggcatgagcgcttcagaagagaaggcaacgacctacatacaacagtggaaatctcactgtcagaagctcttgttggatttgagaagaacataaagcaccttgacaaccatgccgtggaaatcgggaccaaggtgatcacgaaaccaaaagaagttaggaagtctgaaggagagggcatgccactgtaccatagcaacgagaagggagacctgtacgtcattttcgaggtagtcttccctaaagacctaactgatgatcaaaaggccaagctgatgaacatttttatttga

SEQ ID NO: 1766 - protein, 343 aa, Sorghum bicolor
MAARRAPLLVAVLLLHQTVSALAGKSYYEILQVSKGASEDKIKRAYRKLALKYHPDKNPNNEEADRQFTEINNAYEVLTNQEKRKVYDWYGEEGLEQSHGRHSDGDGHAMNIEHVFSNGGSMEEEEERTLKGDDVIVELDASLEDLYMGGSLKIWREKNVIKPAPGNRRCKCRNEIRQREIAPGVFYQMSEQVCDTCPNVKYVREGDFINVDIEKGMQDGQEILFYEDGEPKIDGESGDLKFNIRTARHERFRREGNDLHTTVEISLSEALVGFEKNIKHLDNHAVEIGTKVITKPKEVRKSEGEGMPLYHSNEKGDLYVIFEVVFPKDLTDDQKAKLMNIFI

SEQ ID NO: 1767 - DNA, 1251 bp, Sorghum bicolor
atggctcagcctcccaatcccaagagaaggtcgtccctacctctccctgactggagatccggcctgccagaggaactcctccagtccatcgcgcaacgtctcgcgtcgggccacgacgcggcgtccttccgatccgcttgctccccgtggcgcgccgccgtcccgttcgcgaccttcgggccgctcctgctgctgccgttcgaccccgactcggaccgcgtcgacttctactgcgcctcggaggagaaggtcttctccaagacgctgcccgacgtgcgcggcaaggtggcgtgcggctcgtcgtgcgggtggctggcgctcatggacgaggcggcgtccgtgacgctgctaaatccgttcgccggtgcccgtgcccgtgcccgtgcgcaacgcgttgagctcccgccggcaggcgaacacgtcgcggcggcgtcctcgtcggaacccgtgtctaaggtccacggccggtgggtcgtccatcccaccaacaacggctacgggaacgcggatgctgcgggcagaggcatcaagctagaagacatgagggacgtgttcttccgtgagatcgtgctctccgcgccgcctgacgccgacggcggcagcgagtgcgtggccatggccatgcttgggtgctccacggaggtcgcgttctgccgggttggagtcgacagcgcatggacgctgctcgacaccaaactggactgctccgtggcctccgtcgtccactgccaggacaagttcttggcgatcgactacactggagaaatctccatctgcagcatcagcaacgccgccgccggtgcaacaccaaccgcgacgctgctgccgtcgctgtcgccacctgcggggctctgccaccgcagctacctggaatcaaacggtgagctgcacattgtgggtgccatggtgagcacgttccacgagacacagagcttcgcctacagcagcgcgatctacaagtgcaacctccacgaccgtacgccggagtggtccagggtgagggacatcggtgatcggacactgttcgtgtctaaacatttcaagggaggcttcagtggaacaagtgtatccatgtataaagagaacaaaatctacatgtctgaacccttgtatggggatccatacgacttggtccatcgtttggagatcgttgatatttctaccggcacatctgaagtgaagcccgtccacgaaaagacgatgcagggttccgaggctctaggttggattcgacccaatctctggaaggga

SEQ ID NO: 1768 - protein, 417 aa, Sorghum bicolor
MAQPPNPKRRSSLPLPDWRSGLPEELLQSIAQRLASGHDAASFRSACSPWRAAVPFATFGPLLLLPFDPDSDRVDFYCASEEKVFSKTLPDVRGKVACGSSCGWLALMDEAASVTLLNPFAGARARARAQRVELPPAGEHVAAASSSEPVSKVHGRWVVHPTNNGYGNADAAGRGIKLEDMRDVFFREIVLSAPPDADGGSECVAMAMLGCSTEVAFCRVGVDSAWTLLDTKLDCSVASVVHCQDKFLAIDYTGEISICSISNAAAGATPTATLLPSLSPPAGLCHRSYLESNGELHIVGAMVSTFHETQSFAYSSAIYKCNLHDRTPEWSRVRDIGDRTLFVSKHFKGGFSGTSVSMYKENKIYMSEPLYGDPYDLVHRLEIVDISTGTSEVKPVHEKTMQGSEALGWIRPNLWKG

SEQ ID NO: 1769 - DNA, 1977 bp, Sorghum bicolor
atgtcggcgaggctaagggtggaggagctccgcgcggcgctgctgagccgcggcctcgatgtctccggcaccaagaacgctctcgtgcggaggctggacgccgcaatctgcaaggacgagaagatcgcggttgctgctgcggcaaccgaggtggcagatgggtatggcgtagccgtagatggtgtgctcgtggatggcaaagggaacggcaggaacaacaagaggaaaaggtccggggatggggatgaagaggggaacggcgatacgtctatagacctggcaaaactagagggcatgagctatcgcgagctgcagggattggctaaggcacggggactcgcagcaaatgggggcaagaaggatgttatccagaggttgctctcagcgactgttgatcctgttgcagttgctgatggtggtcctcagggcgaaaaggaagtcataaaaggtggtgatgaggaggctgaggtgaaaaaggagaagattgttacagccacgaagaagggagctgcagtgctggatcaacacattcctgatcacataaaagtgaactatcatgtcttgcaagtgggtgatgaaatctatgatgccaccttgaaccagactaatgttggagacaacaacaataagttctatatccttcaagttttagaatctgatgctggtggaagcttcatggtttacaatagatggggaagagtaggggcacgaggtcaagataaactacatggtccctttttaacacgagaccaagcaatatatgaatttgaggggaagttccatgacaaaactaataatcattggtctgatcgcaagaacttcaaatgttatgcaaagaaatacacttggcttgaaatggattatggtgaaactaataaagaaatagagaaaggttccattactgatcagataaaagagacaaaacttgaaactagaattgcgcagttcatatccctgatctgcaatattagcatgatgaagcaacaaatggtggaaataggttataatgctgacaagcttccccttggaaagctaagcaaatctacaatacttcagggttatgatgttttgaaaaggatatccaatgttatttcaaaggcagacaggagacagcttgagcaattgactggggaattctacaccgtgattcctcatgactttggtttcagaaagatgcgtgaatttattatcgacactcctcagaaactaaaagctaagctggagatggttgaagcccttggtgagattgaaattgcaactaaacttttggaggatgattccagtgaccaggatgatccgctatatgctcgatacaagcaacttcattgtgatctcgcacctcttgaagctgattcggatgagtactctatgataaaaacatatttgaggaatacacatggaaaaacacactctggttatacggtggacatagtgcaaatatttaatgtttcaaggcatggtgaaacagagcgatttcagaaatttgctagtacaagaaataggatgcttttgtggcatggttctcggttgagcaactggactgggatcctttctcagggtctgcgaatcgctcctcctgaagcacctgttagtggttacatgtttggcaagggtgtttactttgctgacatgttttcaaagagtgcaaactattgctgcgcttcagaagcatgtagatctggagtactgcttttatgtgaggttgcattgggcgatatgaatgagctactaaatgcagattacgatgctaataacctgcccaagggaaaattaagcacgaagggagttggtcaaacagcacctgacatggtcgagtctaagatcactgacgatggtgtggttgttccccttggcaaacctaaacaggaaccttccaaaaggggtggcttgcgttacaatgagtacattgtgtacaacgtagatcagataagaatgcggtatgtcctgcttgttaacttcaacttcaagagacggtag

SEQ ID NO: 1770 - protein, 658 aa, Sorghum bicolor
MSARLRVEELRAALLSRGLDVSGTKNALVRRLDAAICKDEKIAVAAAATEVADGYGVAVDGVLVDGKGNGRNNKRKRSGDGDEEGNGDTSIDLAKLEGMSYRELQGLAKARGLAANGGKKDVIQRLLSATVDPVAVADGGPQGEKEVIKGGDEEAEVKKEKIVTATKKGAAVLDQHIPDHIKVNYHVLQVGDEIYDATLNQTNVGDNNNKFYILQVLESDAGGSFMVYNRWGRVGARGQDKLHGPFLTRDQAIYEFEGKFHDKTNNHWSDRKNFKCYAKKYTWLEMDYGETNKEIEKGSITDQIKETKLETRIAQFISLICNISMMKQQMVEIGYNADKLPLGKLSKSTILQGYDVLKRISNVISKADRRQLEQLTGEFYTVIPHDFGFRKMREFIIDTPQKLKAKLEMVEALGEIEIATKLLEDDSSDQDDPLYARYKQLHCDLAPLEADSDEYSMIKTYLRNTHGKTHSGYTVDIVQIFNVSRHGETERFQKFASTRNRMLLWHGSRLSNWTGILSQGLRIAPPEAPVSGYMFGKGVYFADMFSKSANYCCASEACRSGVLLLCEVALGDMNELLNADYDANNLPKGKLSTKGVGQTAPDMVESKITDDGVVVPLGKPKQEPSKRGGLRYNEYIVYNVDQIRMRYVLLVNFNFKRR

SEQ ID NO: 1771 - DNA, 3606 bp, Sorghum bicolor
atggcggccgaacccgccgctgcggccgctgcgtcggcggcggccgcgatctccgccgtgatggactggcgctcatcccccgacgcccgcgccgccgccttcgcgtacctcgaatcggttaagagtggagacgtccgagccttggcaagcacatcgtttctcttggttcggaaggaccagacgtcagagatccgcctgcacgggttcaagatgttgcagcacctggtaagattgaggtgggaggagctcagtgctgcagagcggaatgaatttgctaatttgacaattaatttgatatcggatgttgttggccctcatgaggtgtgggccttgaagagtcaaacagctgctttagtagcagaggtagttcgaagggagggagttgatttgtggaatactttacttccatctattgtttctctctctaacagtggccctattgaggctgagttagttgccatgattctaaggtggcttccagaggatatcactgttcataatgaagatttggagggtgataggcggagatctctgttacgcggccttactgagtcactgtcacaaattctgcctctattatattctctacttgagaaacattttgttgctgctttaagtgagcatgcaaagcagcaaatggatttggctaaacaacatgcagggacagtgacggcagttctaaatgctgtcaatgcatatgctgaatgggctcctgtgacagatctagccaaatatggtttaattcatggatgtggttccttgctttcttacagcgattttcgcctccatgcttgtgagttttttaaagtgatatgccagagaaaaagacctgtggatgtggcagttgctgagtatgatgctgcaatgtgcaacattttccaggtgttgatgaacatttcacaacaatttttgaccagatctggcatgcagcccagctctattgatgagagcgaatatgagtttgcatcgtgtgtttgtgagacaatggttgctctagggtcttcaaacatgcaatgcatactagccgatggacccaggactttccagttcttacaacaaatgctggagtattaccaacattacaaaatcgcgcttcatttccagtctttattattttggctggtggtattgagagaaccatcgaaagctaagtctgttgcacgtgtttctggtgataattctgctgctggtaattctgcatctactggtgacttatcaacagaaaaggagaagaaaggtgtatcagtatttgtcactgatgaaatgtacagtacaattttggatgtttctttcaagagaatgctcaagaacagtggaagtgcaacttctgggttgttagaactatggagcgaagagcttgaggggaaaagtgacttctgcaactaccgcaccaaattgttggatctcattaaagtcattgcttctcaaagatctgtgattgctgcagcaagtgttgtccagagaataaatgttgtctttggagatgctaatcaagcaactaaatccccccaggatcttgacgcaatggaaggggctcaactggggcttgaagcagttgtcagtgctatttttgatggctcatttgattgtggaaaaactgatttggagacgaaatcccaactgcacaagatttttgaaggcttacttcaacagcttctttctttgaagtggacagaacctaaccttgcagttattcatggtcattatttggatgctttgggccctttcttgaaacattatccagatgcagttgccagtgttgttaataagctttttgaactgttgacatctctcccaatcacatttcaggatccatcaaacaattctcgcctagcaaggttgcagatctgctcatcattcattcgtatatcgagagctgctgataaagctcttctgcctcatatgaagaacattgctgataccatggcttaccttcaaggagagggccgcttactacgtggtgaacataatcatttatgtgaagcatttcttgtgatggcgtcctctgctgggattcaacagcaacaagaagttcttgcctggttacttgaacctcttaataaaatgtggactcaagtggaatggcaaactgcatacttgtctgacccttctggtttgacaaacatgtttgccgatagccaattcatgtggtcaatttatcacacggttacattctttgaaaaggcgctcaagagaagtggaaccaaaaagtcttcagcagctctacaagcacccaccacaacagtacctggttatctgcatccgatgtcttcacatcttgcatggattgtgccccctctcttaaggctgctgcgatgcatacatgctttttggtctgagccatttgcccagtctcagacaggggaaatcaaagcagcaaaaagcatgactgttgcggagcaggccagccttctaggagagacagggaaacttaccaaaggtcaggttgctcctgctgatggattgctggatgttcagagagatggagaatcaaaagaaaacaatataaaaaactggttgcgtgggatccgagacagcgggtacaatgttttaggattagcagctactcttggggaaccattctttcgatgcatagagggttcttctgtcacccttgctcttatggagaatatgcaagttatggagtttcggcatctgcgccaacttatccaccttgtcattattccatttgttaaatattgccctgccgatctatggcatgtatggctagtgaaccttttgcagccattatttgtccactgtcagcaagctcttaattattcatggtccagtcttcttcatgagggtcgggctaaggttcctgacagcattggtaatcttcctgggtcagaactgaaggtagaggtaatggaagaaaagttgctacgtgacttgactcgtgaagtatgttctgtgctttgggctttatcatcaccaggcttaaataatggacttccatccttggaacaacttggaccttctaaccggatggattctgttctgaagaatctggagtcctttgcttcaagttctctaactggatttcttatgcttcatattggcacagctcttcctgcattgaggatatcagttgaagtgttcacttggacagatagtgaagctgtgactaaagttatccccttttgtggtgctttgatccacctagccattgcttcaaaccaggctgagttgaggcagtttgttgcaaaggatttattttcctctataatacatggtttatctgttgaatcaaattcagtcatgagtgctgaacttgttggactttgtcgggagatatatgtctatctgtccgatagagatcctgcacctaggcaggttcttctttccctcccgcacataaagcaggaagatttactagcatttgatgactctttgagtaaaactgctagtccaaaagagcaaaagcaacatatgcgaagcttacttctgctggctacagggaacaaactaagagcccttgttgctcagaagacaactaatgtgattaccaatgttacaacacgaaataggagctctactggtcaccatggatcaagtgccgaagaagatggccatattgggttggccgcactatcatcgacatga

SEQ ID NO: 1772 - protein, 1201 aa, Sorghum bicolor
MAAEPAAAAAASAAAAISAVMDWRSSPDARAAAFAYLESVKSGDVRALASTSFLLVRKDQTSEIRLHGFKMLQHLVRLRWEELSAAERNEFANLTINLISDVVGPHEVWALKSQTAALVAEVVRREGVDLWNTLLPSIVSLSNSGPIEAELVAMILRWLPEDITVHNEDLEGDRRRSLLRGLTESLSQILPLLYSLLEKHFVAALSEHAKQQMDLAKQHAGTVTAVLNAVNAYAEWAPVTDLAKYGLIHGCGSLLSYSDFRLHACEFFKVICQRKRPVDVAVAEYDAAMCNIFQVLMNISQQFLTRSGMQPSSIDESEYEFASCVCETMVALGSSNMQCILADGPRTFQFLQQMLEYYQHYKIALHFQSLLFWLVVLREPSKAKSVARVSGDNSAAGNSASTGDLSTEKEKKGVSVFVTDEMYSTILDVSFKRMLKNSGSATSGLLELWSEELEGKSDFCNYRTKLLDLIKVIASQRSVIAAASVVQRINVVFGDANQATKSPQDLDAMEGAQLGLEAVVSAIFDGSFDCGKTDLETKSQLHKIFEGLLQQLLSLKWTEPNLAVIHGHYLDALGPFLKHYPDAVASVVNKLFELLTSLPITFQDPSNNSRLARLQICSSFIRISRAADKALLPHMKNIADTMAYLQGEGRLLRGEHNHLCEAFLVMASSAGIQQQQEVLAWLLEPLNKMWTQVEWQTAYLSDPSGLTNMFADSQFMWSIYHTVTFFEKALKRSGTKKSSAALQAPTTTVPGYLHPMSSHLAWIVPPLLRLLRCIHAFWSEPFAQSQTGEIKAAKSMTVAEQASLLGETGKLTKGQVAPADGLLDVQRDGESKENNIKNWLRGIRDSGYNVLGLAATLGEPFFRCIEGSSVTLALMENMQVMEFRHLRQLIHLVIIPFVKYCPADLWHVWLVNLLQPLFVHCQQALNYSWSSLLHEGRAKVPDSIGNLPGSELKVEVMEEKLLRDLTREVCSVLWALSSPGLNNGLPSLEQLGPSNRMDSVLKNLESFASSSLTGFLMLHIGTALPALRISVEVFTWTDSEAVTKVIPFCGALIHLAIASNQAELRQFVAKDLFSSIIHGLSVESNSVMSAELVGLCREIYVYLSDRDPAPRQVLLSLPHIKQEDLLAFDDSLSKTASPKEQKQHMRSLLLLATGNKLRALVAQKTTNVITNVTTRNRSSTGHHGSSAEEDGHIGLAALSST

SEQ ID NO: 1773 - DNA, 2109 bp, Sorghum bicolor
atgcccgtcgcggcgctccaccctcccccggtcgctgtcggcgcgggacgccgcagttgccgacgccaggcgcggtggttcgccctccgcgcgagctccctcgaggcgtcgtcggcggccgtgacggtggcagtgaatgggacggcggcggcaggggccgcggtggagaaggtgcaggaggataacgagggcctgtcggtgaaggaggatcaggacgagagggggctggaggtcctctacgacgacggcttcggctccgtgaccgtcaaggactacttcgcggcggccaaggtcctgtgcagcagggacgacggcgggccgccgcgctggttctcccccgtcgagtgcggccgcccggcagtggacgacgcgccgctgctgctcttcttgccaggaatggatggcgtcggcacggggctcatcctgcaccacaagtctttgggcaaagtattcgaggttcggtgtttgcatataccagtcaatgatcgtacaccattcgaagggttagtagaaactgttgaaaaatcgatcgagcatgagcatgatttatcacccgacagaccgatatatctagtcggagattcatttggtgggtccctggcagtggcagtggcggctcgtaatccacaaattgatttggttctcatactagtaaatccagctacatcgtttgcaaagactccattgcagccagtattgcctctactggaatcaatgccaagcgagtttcatgttacagtgccttatcttctcagttttgtcatgggtgatccactgaagatggctgcagttagcattgaaaacaacctatctcctccagaaactctacagaaattgtcagacagtctcacatcaatgcttcctttgctttcagaattgtctgatattataccaagggatactcttttgtggaagctcaaacttcttaaggcaggagcagcctatgcaaattctcgtcttcatgctgtgcaagccgaagttctacttcttgccagtggtaaggacaatcttctacctagtggagaagaagcggatcgactcttcaaggcactgaaaaactgcagagttcgatacttcaaggacaatggtcatacactactcttggaggatggtgtcaatctgttatctgtcataaaaggagcaaacatgtatcgccgtggaaggcaaagggattttgtaaccaattatctcccccctactttaagtgaattcaagcaaacatttgatgtggatcacaaactgtttcaccttgcactgagcccagtcatgatgtctaccctgaagaatggaaaagttgttcgcgggctttctggtgttcctgataaaggtcctgtcttgtttgtgggctatcatgcgctgatgggtattgagttgagtcctctgtatgaagagttccttagggagaagaagacagttgttcgtggcatggctcatccatttctgtttggaaacaaatttgactcatcgcgccaggagatatctcggatcgatactgtttctatgtatggtggattaccggtcaccccaatcaatatgtacaggttattcaagaggaatgactttgttctgctttatcctggcggagttcgggaagctctgcataggaagggtgaagaatacaagttgttttggccagatcaaccagaattcgtaagaatggccgcgcgctttgatgttactatcataccctttgggtgtgtaggagaggatgacgttctagagttggttctcgattacaatgatcagaagaacattcccggacttcgggagtggatagagtcaatcaacaaagaagccgagagagtgagggacagcgtaaaaggggaggatggaaatcaagacatgtacttgccagctcttctcccaaaagtacctggtcgattctactatctattcggccaaccgattgaaatgaaagggatgaacaaccttgtcagagatagaaagaggaccaacgaggtgtatttacgtatcaaatcagaagtggaggagataatgtcatatctcaagaggaagagagaggaagacccttacaggagtatagcgcagcgtgcgctgtaccaggcaacatggggcgcctctgctcaggtcccaacttttgagccatga

SEQ ID NO: 1774 - protein, 702 aa, Sorghum bicolor
MPVAALHPPPVAVGAGRRSCRRQARWFALRASSLEASSAAVTVAVNGTAAAGAAVEKVQEDNEGLSVKEDQDERGLEVLYDDGFGSVTVKDYFAAAKVLCSRDDGGPPRWFSPVECGRPAVDDAPLLLFLPGMDGVGTGLILHHKSLGKVFEVRCLHIPVNDRTPFEGLVETVEKSIEHEHDLSPDRPIYLVGDSFGGSLAVAVAARNPQIDLVLILVNPATSFAKTPLQPVLPLLESMPSEFHVTVPYLLSFVMGDPLKMAAVSIENNLSPPETLQKLSDSLTSMLPLLSELSDIIPRDTLLWKLKLLKAGAAYANSRLHAVQAEVLLLASGKDNLLPSGEEADRLFKALKNCRVRYFKDNGHTLLLEDGVNLLSVIKGANMYRRGRQRDFVTNYLPPTLSEFKQTFDVDHKLFHLALSPVMMSTLKNGKVVRGLSGVPDKGPVLFVGYHALMGIELSPLYEEFLREKKTVVRGMAHPFLFGNKFDSSRQEISRIDTVSMYGGLPVTPINMYRLFKRNDFVLLYPGGVREALHRKGEEYKLFWPDQPEFVRMAARFDVTIIPFGCVGEDDVLELVLDYNDQKNIPGLREWIESINKEAERVRDSVKGEDGNQDMYLPALLPKVPGRFYYLFGQPIEMKGMNNLVRDRKRTNEVYLRIKSEVEEIMSYLKRKREEDPYRSIAQRALYQATWGASAQVPTFEP

SEQ ID NO: 1775 - DNA, 891 bp, Sorghum bicolor
atgtccgccgccgcagccgactcctcctcctcttcctccatcggaataccgcgtgatgcggcggttagctcgctctcgcccgagagcgtcagcaacaacgatctgctcatcgttgggccgggcgtgctcggccggatcgtcgccgagatgtggaaacaggaatatccaggttgcaaggtttgtggccagactgcaaccacagatcatcacagtgaattaactgacattggtatcattccctccttgaagaggtccgtagcgggtcccaaatttccaaatgttattttctgtgctccaccatatcgttctgaggattatgctggagatctgagaatagcagcttcgaattggaatggagaaggttctttcctattcacctcgagtactgctgtgtatgactgcagtgacaatggattctgcggtgaggattctccttgtgtatcgattggtcagagccctcgtactgatgtgcttctaaaagctgaaaatgttgtccttgaggcagggggctgtgttcttaggctagcaggactttacaaatcagatcgaggtcctcatgtctattggttgtcaaaaggaaccttggatgtgcgtcctgatcatatactcaatctgatacattatgaagatgcagcctctcttgcaattgccatcatgaaaaagagattacggagccgcatctttgtgggctgtgacaatgagcctctgtccaggctagagattatggaccgtgtcaacagaagcgggaaatttgagacacagtttcagggcttcactgggactgatggtccgctggggaagaggatggagaactccaaaactcgggcagagctcggatggcagcccaagtatccgagctttacagagttccttggtctcagcaatctctaa

SEQ ID NO: 1776 - protein, 296 aa, Sorghum bicolor
MSAAAADSSSSSSIGIPRDAAVSSLSPESVSNNDLLIVGPGVLGRIVAEMWKQEYPGCKVCGQTATTDHHSELTDIGIIPSLKRSVAGPKFPNVIFCAPPYRSEDYAGDLRIAASNWNGEGSFLFTSSTAVYDCSDNGFCGEDSPCVSIGQSPRTDVLLKAENVVLEAGGCVLRLAGLYKSDRGPHVYWLSKGTLDVRPDHILNLIHYEDAASLAIAIMKKRLRSRIFVGCDNEPLSRLEIMDRVNRSGKFETQFQGFTGTDGPLGKRMENSKTRAELGWQPKYPSFTEFLGLSNL

SEQ ID NO: 1777 - DNA, 984 bp, Sorghum bicolor
atggcttccttgttgcgttggaaggacaggtacgtgaaggagaggctgctaggcctctctggcctgtcctgctcctccgcggcgtccacctccgtcgtcgcctccactggccgcgccatcgaccgccactctccgcgccttcgtgactctcaccggcgtcttccgccatccctgcccaagccaccctgctctcctttcagtagtgccaaagattcctccacctccatgaagcagcagcagctttgccactacgacgacgatggcaaagacagaaggaagaagaagagcacagaagcagacgctggtagtggcaggggttgctcgtcgacgacgccgtcgtcagagcataggaaaaacaagaagaaggaggtgcagctccagcaggtgagccccgcgagctcgtccaggttcctgctcaactcctccaggctcatgatgcagtccgacgacgaaatcaccgtcgtcgactccttgccgccacttccgtccccgcggccctccttcattaaggacgccgacgacgacatcgaaatattcccaaccagccacggcgatgccgtgatgccggctggtccatcgaggcctcagctcctggcgccgccagtggaattattcgccgagccgtctgcatcaggtgcagggtcctcctcgtcatcgtcagaaataggaagaggccatgtcgttgccggtgacaacactgtcgtggtgagatcatgttccacgagaacaggccagaaccaggtggtggttttgagggtatctctacactgcaaggggtgtgctggcaaggtgaagaagcacatctccaagatggaaggggttacttcttttgacatcgacatcgcgacgaagaaggtgacggtggtgggagatgtaacaccgctaggcgtcctcaacagcatctccaaggtcaagagcgctcagttctggacggacactcgctcgtatttgtccacgccgccgcgagcctccgccaccttctga

SEQ ID NO: 1778 - protein, 327 aa, Sorghum bicolor
MASLLRWKDRYVKERLLGLSGLSCSSAASTSVVASTGRAIDRHSPRLRDSHRRLPPSLPKPPCSPFSSAKDSSTSMKQQQLCHYDDDGKDRRKKKSTEADAGSGRGCSSTTPSSEHRKNKKKEVQLQQVSPASSSRFLLNSSRLMMQSDDEITVVDSLPPLPSPRPSFIKDADDDIEIFPTSHGDAVMPAGPSRPQLLAPPVELFAEPSASGAGSSSSSSEIGRGHVVAGDNTVVVRSCSTRTGQNQVVVLRVSLHCKGCAGKVKKHISKMEGVTSFDIDIATKKVTVVGDVTPLGVLNSISKVKSAQFWTDTRSYLSTPPRASATF

SEQ ID NO: 1779 - DNA, 109 bp, Sorghum bicolor
gagcactcatcttggggtgggcttactacttatatgctttcagcagttatcctctccacacttggctacccagcgtttaccgtaggcacgataactggtacacccagag

SEQ ID NO: 1780 - protein, 37 aa, Sorghum bicolor
  misc_feature (37)..(37): Xaa can be any naturally occurring amino acid
EHSSWGGLTTYMLSAVILSTLGYPAFTVGTITGTPRX

SEQ ID NO: 1781 - DNA, 1242 bp, Sorghum bicolor
atggcttccgcaagcaatgctctcagggtgttcttcatcctagcgatcctatgcgcggtatgcacagcgaaaaggaccggagcaaagacgggagactcggcagcagactctgctgcttctggagccagcgggacgttcgacatctccaagctcggcgcgacgggcgacggcaagacggactccacaaaggcggttcaagacgcgtggacgtcagcgtgcagagcgaccggaagcgccacggtgctcatccccaagggcgactatctggtcggccctctcaacttcgttggcccgtgcaagggcgccatcaccatccagctcgatggcaacctgctgggatccaacgacctggccaagtacaaggcgagctggatcgagttgtcgcacgtcgacaacatcgtcatgactggctcgggcacgctcgacggccagggcaccgccgtttataaaaaggccaaaaccggcactgtgaaggcgatgcccaacacattggtgctgttctacgtgaccaacggcactgtctctggaatcaaactactcaactccaagttcttccacatcaatatcgacgcttcaaagaacatcacggtgaaggacgtgaacatcaccgcgcctggggacgttgagaacacggacggcgtccatgttggaatgtccaccaaggtgagcatcaccaactcaaccatcggcactggcgacgactgcatctctgttggccccgggagcgacggcgtcatggtgaacaacatcatctgcggccccgggcagggcatcagcatcggctgcctaggccgctacaaggatgagaaggacgtgaccgacgtgacggtgcgggactgcgtgctcaagaagaccactaacggcgtgcgcatcaagtcgtacgaggacgccgagtctgtgctgacggcgtcgcatctgaccttcgagaacatcaggatggaggaggtggcgaaccccatcatcatcgaccagtacttctgccccgagaaggtgtgccccggcaagaagagcgactcctctcatgtcatcgtcaaggacgtcacgttccgcaacatcacgggcacgtcgtccacgccacaggccatcagcctgctctgctcgcagtcacagccatgcagcggcgtgtcgctcatcgatgtaaacgtggagtacgccggcaagaacaacaagaccatggccgtgtgcagcaacgccaagggcaccgccaagggcagcgtcgaggccctggcatgcctggcctga

SEQ ID NO: 1782 - protein, 413 aa, Sorghum bicolor
MASASNALRVFFILAILCAVCTAKRTGAKTGDSAADSAASGASGTFDISKLGATGDGKTDSTKAVQDAWTSACRATGSATVLIPKGDYLVGPLNFVGPCKGAITIQLDGNLLGSNDLAKYKASWIELSHVDNIVMTGSGTLDGQGTAVYKKAKTGTVKAMPNTLVLFYVTNGTVSGIKLLNSKFFHINIDASKNITVKDVNITAPGDVENTDGVHVGMSTKVSITNSTIGTGDDCISVGPGSDGVMVNNIICGPGQGISIGCLGRYKDEKDVTDVTVRDCVLKKTTNGVRIKSYEDAESVLTASHLTFENIRMEEVANPIIIDQYFCPEKVCPGKKSDSSHVIVKDVTFRNITGTSSTPQAISLLCSQSQPCSGVSLIDVNVEYAGKNNKTMAVCSNAKGTAKGSVEALACLA

SEQ ID NO: 1783 - DNA, 3624 bp, Sorghum bicolor
atgggatcgctgcggggcgcggcagccccgtccccggcgccgcgcgcgggcgacctggtgaccacgcaggttagcctgggcggatttgacgccaccgtcaaggcgctcgatcttgccgactttctcgagttgaaggcgggcttggtctggcgctgccgcgtcaagacctcctggaccccgccggacgcctatcccgacttccttctccccaccgtcacctccgccgccgcgcagccgccacagtacgatcgcgtgcctccgcacgccttcgtccactttgcgcgcccggagggcgcgcgcgccgccgccgacgcagcggggcggtccgagctcatcctctccgggaaacccctgcgcgccgcctccgcgcaggagagctcccttcgggcctcccgccgccgcagtgtctcgccattccgcttccctggctcacgcctcgaggtcggggatctcccggccaaggacgccttcctcgccgcctggcgcggtccggcctctgggctcgagttctccgtcgatccgttcgacgggtcttgccgcctcatcttcgcccgcgacaccgcattcaaagtccgggagttccgcgagtctgtggtcatgcgctgcgacgtcaagctcgagttccccgtacgcgacgtcgccgaagtcagggtgttccggctcgactgctcgctgctgatccggctgtcggcggcaccgctggtttattaccgcacggcggacgacgacatccacgagtccgtgccgttcgacctgctcgacgacgatgacccgtggatacggaccacggacatcacccccagtggcgcgattgggcggtgcggcgcgtatagaatcacattctcgccgcgcttctggccaaagatggaacgcgcgctggcgtacatgagggataggagggtgccgatcgttgattgcggtggtggttggggggccaggaggggcctcaccgtgcgagatgagcctgagtttggggagcgaatgcaggacctgttcttctgcgtgcagcactccgagggtctcaagtttccggtgttgttcctcgtgaatgctctggtgcacaagggagtaataaatcaacaccacctcacgcctgaattcttcggcttgctccagaggaaggaggatgatgtgaatgtggctgctttgagggaattttggggggacaaatttccagtttttgatgcatgtggcaggctgaagaatctgcaagatagggttgccaggtaccccaaacttcttcgcaacaagattggggatgacaattcagaggtgaggaggctggtagtcacgcccaccaaagcttattgcctgccaccagaagtggagcgctctaatcgtgtcatccgtcattatcgtgaagtcacagacagatttctcagggttacttttatggatgagggtatgcagctactgaacagtaatgtgctgaatttctctgctgcgcaaattgtcaaagatttgatgtcaaactcgttcctgcataagacaacagtgtacaagcgtattaaaacatttttgacagagggattccacatgtgtggtaggaagtactcatttcttgcattctcatcgaaccagctgagggacaggtcagcttggttcttcgcagaggacagaatgagaacagtggaaaccattaggaaatggatggggcggttcacaagtaagaatgtagcaaagcacgctgctcggatggggcagtgcttctcatctacatatgctacagtggtgatgcagccgcatgaggtcaatgagtgtctcgaggaagttgaacgcaatgggtacattttctctgatggaattggcaagattacgtgtgaccttgcacttgaagttgctcagaagctgcgattgacagataatcccccatccgcttaccagattaggtatgcaggcttcaagggtgttatagctgtctgggaaggagaaaatgatgggatacgactttccctgaggccgagcatgcacaagtttgagtctaaccataatgtgttagaggtggtctcatggacaaagtttcagccaggattcttaaaccgtcagattattacattactgtcctccttgaatgtcccggatgctatcttttctcaaatgcaggaagccatgttgtctaatctcaataatattttgtcggacactgatgttgcttttgacattgtaaccacctcttgtgctgagcaaggaaacactgcagcactgatgttgagtgctggcatttcacctggaactgagccacacctgaaagcaatgctgttagctataaggtcctcacagctactgggtcttttggagaagacaaggatttttgtgccgaaggggaggtggttgatgggctgccttgatgaacttgggatccttgagcaaggacagtgctttatccgggcgtcatctccatcactcaataattgtctggtaaagcatggaccaagattttcctcagcaaacaaaaatgcagagaccattgtgggtactatcgtaatggcaaagaatccatgccttcatccaggggatgtccggatccttgaagctgttgatgtgcctgaactgcatcaccttgttgattgcttggtcttccccaagaaaggtgagaggccacatgccaatgaagcatctgggagtgatcttgatggggatctctactttgtgacatgggatgaaaaccttataccacctggcaaaaagagttggaaccctatggactactccccaactgaagcaaaacaactaccgcgcgcagtatccccacatgatattgttgatttcttcttgaagaacatggtaaatgagaaactgggtccaataagcaatgctcatgttgttcacgctgatatgagcgagtatggagcaatggatgagaagtgcattcagttggcagaactagcagcaactgctgtagacttccccaagactggcaaaattgtgtcaatgccaccatcccttcggccaaaattatatcctgacttcatgggaaaggaggatgccatctcctataaatcagagaagatccttggaaggctttatcggtcaatccaagaagcctccagtggtgatttggttccagaagaaacttgcacattaaacgatttgccttatgatgcagatatggaagttcctggtgcaactgattttctctcaagtgcttgggagtgcaagtgctcatatgaaacacaactgaatgcactgctcaaccaatatggtgtgcgcactgaagcagagcttgttacagagcacatatggtcgcttcccaaatacagcagcagaaaacagggggacataaaggagagattgaagaatgcatactctgctctccacaaggacttcaggagcattttcgaaagctttgttacagatcaaactgagatctctgatgatgagaaaattcggttttatgagatgaaggcctctgcatggtaccaggtaacctaccaccccaaatgggtccaaaagtcaagggaaatgctcaaacctgactttgaggacatgccagcaaggcttagctttgcatggatcggggtcgagcacctggcacggattaagataaggtgccatggagaagtgaaagtggacagccgaaggcccgttgagaggctcgcagcctacatatctgggagcatgtga

SEQ ID NO: 1784 - protein, 1207 aa, Sorghum bicolor
MGSLRGAAAPSPAPRAGDLVTTQVSLGGFDATVKALDLADFLELKAGLVWRCRVKTSWTPPDAYPDFLLPTVTSAAAQPPQYDRVPPHAFVHFARPEGARAAADAAGRSELILSGKPLRAASAQESSLRASRRRSVSPFRFPGSRLEVGDLPAKDAFLAAWRGPASGLEFSVDPFDGSCRLIFARDTAFKVREFRESVVMRCDVKLEFPVRDVAEVRVFRLDCSLLIRLSAAPLVYYRTADDDIHESVPFDLLDDDDPWIRTTDITPSGAIGRCGAYRITFSPRFWPKMERALAYMRDRRVPIVDCGGGWGARRGLTVRDEPEFGERMQDLFFCVQHSEGLKFPVLFLVNALVHKGVINQHHLTPEFFGLLQRKEDDVNVAALREFWGDKFPVFDACGRLKNLQDRVARYPKLLRNKIGDDNSEVRRLVVTPTKAYCLPPEVERSNRVIRHYREVTDRFLRVTFMDEGMQLLNSNVLNFSAAQIVKDLMSNSFLHKTTVYKRIKTFLTEGFHMCGRKYSFLAFSSNQLRDRSAWFFAEDRMRTVETIRKWMGRFTSKNVAKHAARMGQCFSSTYATVVMQPHEVNECLEEVERNGYIFSDGIGKITCDLALEVAQKLRLTDNPPSAYQIRYAGFKGVIAVWEGENDGIRLSLRPSMHKFESNHNVLEVVSWTKFQPGFLNRQIITLLSSLNVPDAIFSQMQEAMLSNLNNILSDTDVAFDIVTTSCAEQGNTAALMLSAGISPGTEPHLKAMLLAIRSSQLLGLLEKTRIFVPKGRWLMGCLDELGILEQGQCFIRASSPSLNNCLVKHGPRFSSANKNAETIVGTIVMAKNPCLHPGDVRILEAVDVPELHHLVDCLVFPKKGERPHANEASGSDLDGDLYFVTWDENLIPPGKKSWNPMDYSPTEAKQLPRAVSPHDIVDFFLKNMVNEKLGPISNAHVVHADMSEYGAMDEKCIQLAELAATAVDFPKTGKIVSMPPSLRPKLYPDFMGKEDAISYKSEKILGRLYRSIQEASSGDLVPEETCTLNDLPYDADMEVPGATDFLSSAWECKCSYETQLNALLNQYGVRTEAELVTEHIWSLPKYSSRKQGDIKERLKNAYSALHKDFRSIFESFVTDQTEISDDEKIRFYEMKASAWYQVTYHPKWVQKSREMLKPDFEDMPARLSFAWIGVEHLARIKIRCHGEVKVDSRRPVERLAAYISGSM

SEQ ID NO: 1785 - DNA, 5388 bp, Sorghum bicolor
atggcgagcggcggcgccggcccgtcggggccggtgcggtccacctcccaaacccggcagcggacgatggggcggatacccacgcgcgcctacaccatgcgcccggacggattgtccggtgaggacggccccggttttgaggaggaggagctcgtgccctcgtcgctcgcgcccattgtacccatcctccgggccgccaatgagatcgaggaggagaacccgcgcgtcgcctacctatgtcgctttactgcattcgagaaggctcatcttatggacccaatctcaggtggacgtggagttcggcaattcaaaacatacctcttgcataggcttgaaaaggatgaacatgagacaaatcgcaggcttgctacaactgatgcaaaggagatacaaaggttctatgagcaatactgtaaaaaatatctagaggaaggtcatgacaagaggaaaccggaggagatggctagacactatcagattgcatctgtcctatatgatgttctgaaaactgttacacctggcaagaatgagtatgataagtatgctaaaggggttgaaaaggagaaagcatccttctcacagtacaatattctaccacttaatatttctactccaagacaaccaataatggaaattcctgagatcaaagcagcagtggcgctccttcgtcagatggatgaccttccaatgccaaggattgaattaacacaaagctctgatggaaaaacagtgcctgatgaaatggacaaacctttggtccaggatttgcttgattggctttggcaaacatttggatttcagaaaggcaatgtcgagaaccaaaaggagcatttgattttgctccttgcaaacattgacatgagacaacagggtacttcccaccatagtgggagacatgttcacgtgatacatagtagcacggtgatatatttgatggacaaaattttccagaattacaactcctggtgtcgatatttgcatctggattcaaacattataatcgcaagcgatgcctccacacaacggccagagcttctatacataggactgtatttactgatatggggtgaagcttccaacgttcgcttcatgcctgaatgtctttgctacatcttccaccatatggcaagagatttacatgacataatatctgatagaagagaaggaccatttgagccaccattccagcgagaggggagtgatgatgcatttctgcagctagtaattcagcccatctatagtgttatgcagaagttaactctaactcactttaattccttcttcatacttgcatctatcttccttagcacaggacaaaaaagttttgatcgtatgtgggccttctttatattggctttccaggccatggtaattattgcctggagctcttctggggcactttcttctatatttgaaccagaagttttcagaaatgtattaacaatctttataacagcagcattcctcaacttccttcaagccacgctagagataattctcaactggaaggcttggaagagcctggagtgctcacaaaggatacgatatatcctgaaatttgctgtagctgttgcctggttgataattcttcctactacatactcaagctctattcaaaatcccacaggccttgtgaagttcgtcagcaattggataaatttgcagaatgaatcaatttataattatgctgttgccctttacatgttaccaaacatattcagtgccctgtttttcatgtttctaccaattcgacgggtcttagagcgctcaaattctcgcattataaggtttcttttatggtggacccagccaaagttatatgttgctcgaggcatgtatgaagacacttgctcacttcttaagtacactacgttctggattctactgcttatatgcaagctcgccttcagttattatgttgagattgcacctctagttgaaccaaccaggataatcatgtcactggaaaggccgccttacgagtggcatgaattcttcccaaacttgcggcataatttaggtgttgtggttactgtatgggctccaattgtcatggtatacttcatggacacacaaatatggtatgccattttctccacaatttgtggtggagtatatggtgcattcagccgcttgggtgagatacgaacccttgggatgttaagatccagatttgaggcaattccaagagcattcggcaaaaaacttgtacctaatcatggtagtcgcttgaaacgagatgaggaggacaaaaacccaccctttgataagtttgctgacatatggaatgcgtttattaactcattgcgagaagaggacttactaagcaatagggagaaaaatctattggttgttccatcatctggtggtgaaacaagtgtttttcagtggcctcctttccttcttgccagtaagattccaattgcacttgacatggcaaagagtgtcaagaaaaaagatgaagaactcatgaagaggataaagcaggatccttatactgagtatgctgtaatagagtgttacgagacattattagatatcctttacagcattatagttgaacaaagtgataagaactggtattgcatttcacgttgctatagagttgttgatagaatatgtgaaagcatcaaagatagcatccaccggagatcactcgtgaaagaattccgattggatgagcttcctcagctaagtgttaagtttgataagttgctagatctactgaagaaatatgatgagaacgatcctgtaaacaataacacacagattgccaatctgttacaggatataatggaaattatcacacaggatattatgaaaaatggacaaggtgttttaactccatatttcaaagaggaggtgctcttttccccagaagatcttcgtaagaaaaatgaggatggtatatcaatactgttctacctacggaaaatatatccagatgaatttaggaacttccttgagaggatagattttaaaccaaaggatgaagaagaacttaaagataggatggatgagatctgtccttgggcgtcttataggggtcaaacactcaccagaacagtgagaggaatgatgtactacaggaaggcacttgaaatccaatgccttcaagatacgaaagatcctgctaaatttgaccaagacggattaatagaatcctatcgagagttgcaatctagtattgaaatggcacaagctattgctgatatcaaattcacctatgttgtctcatgtcaagtctatggcatgcaaaagacgtccaaggattcaaaagacaaaagccgctatcagaatatcctcaatctcatgataataaacccatcactacgagttgctttcattgatgaggtcgaagctccaaccggaaatggagcaactgagaagacgtattattccgttcttgtcaaaggtggtgaaaagtatgatgaggaaatttaccgcataaagcttcctggcaaaccaacagatattggagagggaaaacctgaaaaccagaatcatgctataatcttcaccaggggagaagcacttcaggccattgatatgaatcaggataattatatcgaggaagcatttaaaatgagaaatgtgctggaggagtttgagagtagaaagtatgggaagagcgaacccactatattaggcctacgtgagcacatttttactggaagtgtttcttcactggcttggtttatgtccaatcaagagaccagttttgttactatcgggcaaagagttctggcaaatcctctcaaggttcggttccattatggccacccagatatttttgatagactcttccatatcaccagaggaggcataagtaaagcttcaaagactataaatctgagtgaagatatcttttcaggttttaattcaaccatgagaggaggaaatgttacacatcacgaatacatgcaagttggtaaggggcgtgatgtggggatgaatcagatttctagcttcgaagctaaggtggccaacggcaacggtgaacaaacattaagccgtgacatttatcggcttggacgcagatttgacttctacagaatgttatctttctattttactacagttgggttctattttagcagcatggttactgtgcttactgtctatgtgtttttgtatgggaggctttatctggttatgagtggtctggaaagatctattatgctggatgcacggaatcagcagaatgtcaaggctctcgaaaatgcactggcttcacagtctattttccagctaggtttgctgcttgtcctccctatggtcatggaagttggcttagagaaagggttccgcacagcgttaggagagtttgtaatcatgcagcttcagttggcctctgtgttcttcacattccagcttggcaccaaaacccactactatgggagaacaatactccatggtggtgcaaaatacagacctacaggccgtggattcgttgtgtaccatgcaaagtttgctgaaaattatcgtatgtactcccggagccactttgttaaaggactggaactcttgatacttttggttgtatatctagtctacggaagatcctatcgcagctcaagcctatacctatttgtcacctgctccatgtggttccttgttgcttcatggctcttcgcgccatttatcttcaatccatcgtgctttgagtggcagaagactgttgatgactggacagattggaggaagtggatgggtaaccgagggggtattggcatgtctgtggaacagagctgggaagcttggtggttaagtgagcaagatcacctcaggaagactagcatccgagcccttctgttggaaatcatcctttcacttcgatttttgatctaccagtatggtattgtctaccatctgaacatagcagatcaccacaaaagcattatggtatatggagtgtcatgggtggttatgctccttgttctagtagtgctgaagatggtttcaatagggcgacagaaatttggaacagacctgcagcttatgttccgcattctcaagggccttctcttccttggctttgtctctgtgatggcagtcctatttgtcgtcttacaccttactatttctgatgtcttcgctagtatccttggatacttgcctactggatggtgtcttcttctgattggacaagcatgctcaccattgattaggaggaccatgctatgggactccatcatggagctcggaaggtcatacgagaatataatgggtctcatcctcttcctgcccatcggtttcctgtcatggttccccttcgtctctgaattccagacacggctgctgtttaaccaggcatttagccggggcctccagatctcaaggatccttgctggtcaaaagggtattggcgagttcgagtttgagtga

SEQ ID NO: 1786 - protein, 1795 aa, Sorghum bicolor
MASGGAGPSGPVRSTSQTRQRTMGRIPTRAYTMRPDGLSGEDGPGFEEEELVPSSLAPIVPILRAANEIEEENPRVAYLCRFTAFEKAHLMDPISGGRGVRQFKTYLLHRLEKDEHETNRRLATTDAKEIQRFYEQYCKKYLEEGHDKRKPEEMARHYQIASVLYDVLKTVTPGKNEYDKYAKGVEKEKASFSQYNILPLNISTPRQPIMEIPEIKAAVALLRQMDDLPMPRIELTQSSDGKTVPDEMDKPLVQDLLDWLWQTFGFQKGNVENQKEHLILLLANIDMRQQGTSHHSGRHVHVIHSSTVIYLMDKIFQNYNSWCRYLHLDSNIIIASDASTQRPELLYIGLYLLIWGEASNVRFMPECLCYIFHHMARDLHDIISDRREGPFEPPFQREGSDDAFLQLVIQPIYSVMQKLTLTHFNSFFILASIFLSTGQKSFDRMWAFFILAFQAMVIIAWSSSGALSSIFEPEVFRNVLTIFITAAFLNFLQATLEIILNWKAWKSLECSQRIRYILKFAVAVAWLIILPTTYSSSIQNPTGLVKFVSNWINLQNESIYNYAVALYMLPNIFSALFFMFLPIRRVLERSNSRIIRFLLWWTQPKLYVARGMYEDTCSLLKYTTFWILLLICKLAFSYYVEIAPLVEPTRIIMSLERPPYEWHEFFPNLRHNLGVVVTVWAPIVMVYFMDTQIWYAIFSTICGGVYGAFSRLGEIRTLGMLRSRFEAIPRAFGKKLVPNHGSRLKRDEEDKNPPFDKFADIWNAFINSLREEDLLSNREKNLLVVPSSGGETSVFQWPPFLLASKIPIALDMAKSVKKKDEELMKRIKQDPYTEYAVIECYETLLDILYSIIVEQSDKNWYCISRCYRVVDRICESIKDSIHRRSLVKEFRLDELPQLSVKFDKLLDLLKKYDENDPVNNNTQIANLLQDIMEIITQDIMKNGQGVLTPYFKEEVLFSPEDLRKKNEDGISILFYLRKIYPDEFRNFLERIDFKPKDEEELKDRMDEICPWASYRGQTLTRTVRGMMYYRKALEIQCLQDTKDPAKFDQDGLIESYRELQSSIEMAQAIADIKFTYVVSCQVYGMQKTSKDSKDKSRYQNILNLMIINPSLRVAFIDEVEAPTGNGATEKTYYSVLVKGGEKYDEEIYRIKLPGKPTDIGEGKPENQNHAIIFTRGEALQAIDMNQDNYIEEAFKMRNVLEEFESRKYGKSEPTILGLREHIFTGSVSSLAWFMSNQETSFVTIGQRVLANPLKVRFHYGHPDIFDRLFHITRGGISKASKTINLSEDIFSGFNSTMRGGNVTHHEYMQVGKGRDVGMNQISSFEAKVANGNGEQTLSRDIYRLGRRFDFYRMLSFYFTTVGFYFSSMVTVLTVYVFLYGRLYLVMSGLERSIMLDARNQQNVKALENALASQSIFQLGLLLVLPMVMEVGLEKGFRTALGEFVIMQLQLASVFFTFQLGTKTHYYGRTILHGGAKYRPTGRGFVVYHAKFAENYRMYSRSHFVKGLELLILLVVYLVYGRSYRSSSLYLFVTCSMWFLVASWLFAPFIFNPSCFEWQKTVDDWTDWRKWMGNRGGIGMSVEQSWEAWWLSEQDHLRKTSIRALLLEIILSLRFLIYQYGIVYHLNIADHHKSIMVYGVSWVVMLLVLVVLKMVSIGRQKFGTDLQLMFRILKGLLFLGFVSVMAVLFVVLHLTISDVFASILGYLPTGWCLLLIGQACSPLIRRTMLWDSIMELGRSYENIMGLILFLPIGFLSWFPFVSEFQTRLLFNQAFSRGLQISRILAGQKGIGEFEFE

SEQ ID NO: 1787 - DNA, 1302 bp, Sorghum bicolor
atggaccccaagatgcagccaaggttcgcccatgtggccatagagatagctaggatgctgggcgtatgtttcatttgtgcaaactacaatgcttctttgttgagggacaactttgacatccacttttggtgcaaggttctaatgttcttaagacggctcatccaggaaaatatctccaaatatggtggtcatccatatgatctaataagccagaatagacctggacagttttggagaatggccacaccgtctgaagatgttgtgccttattgtcagtctcaatgctattcacatgagaaggttccagatataagaatccaagatgtgttcagcttcgacttctcacagcaagacccgccacaaagcgtcaaccaggtgccaggaagagaagagcaaacaccgaaggagacaacgaaatccaaacacgacaccttcaggaaggtcgcagcaccgatggcgccaccatcgcacgtccaaactggacagggctttcgcccttggatgacagtgaggagatacacgacgccctcaacagggaaagcggcacccataggcgtcgccatcgccaagctttcgcccaaggagtcctctagcacgagacgtcgggccaagaagccaggccccttgccggccaacactaccttcatcgttgtcccgctgctccacatcaaccccttcagaggagtctcaatacgccggctgcacgcagcagccgcacagctgcatcggtcgccacccccgccgaccgggcaacgcagagcgggacctgactttgctgctcgcgtaacaccagccaccattgctggctctctgcacgtgctgccgatactgctgacccatcgccagccgccaccagacacgtcccaccctatgggcgccgccccttgcccagggggcgtcagaaccgtagtgccgacacccttggctagcgccaccgcctccgtcttggccacccacaaccgtcgccagccctcgaagtgtgcaccggatctagccgccaaagttccggatctggccgtgcggacaccggatttggccttccaggacctagctccggcgacttgggcaagcgtcgtcgatgccgtcagggccggaggaagggacaagcggaggagaagaagatccgccctgcccccacccgcagcggacgcgccgtcgggctccacgcagcctgcacgggaggccaccggctcgctgccgcatgtgccaccaaatcacgaggagaggagaggccccgccaccgccatcccagcgagccgcgtggccatgccggcggccagcttcggcggcggcacggcatag

SEQ ID NO: 1788 - protein, 433 aa, Sorghum bicolor
MDPKMQPRFAHVAIEIARMLGVCFICANYNASLLRDNFDIHFWCKVLMFLRRLIQENISKYGGHPYDLISQNRPGQFWRMATPSEDVVPYCQSQCYSHEKVPDIRIQDVFSFDFSQQDPPQSVNQVPGREEQTPKETTKSKHDTFRKVAAPMAPPSHVQTGQGFRPWMTVRRYTTPSTGKAAPIGVAIAKLSPKESSSTRRRAKKPGPLPANTTFIVVPLLHINPFRGVSIRRLHAAAAQLHRSPPPPTGQRRAGPDFAARVTPATIAGSLHVLPILLTHRQPPPDTSHPMGAAPCPGGVRTVVPTPLASATASVLATHNRRQPSKCAPDLAAKVPDLAVRTPDLAFQDLAPATWASVVDAVRAGGRDKRRRRRSALPPPAADAPSGSTQPAREATGSLPHVPPNHEERRGPATAIPASRVAMPAASFGGGTA

SEQ ID NO: 1789 - DNA, 450 bp, Sorghum bicolor
atggcttggatggctgcggccaccctgtgctgccgcctcctccgccttccctccgcccgccgccctccctcgtcccggactcggtgttccgctgcgcagagccccgacgccgtggacaaggagtacgccgacctcaacctccggcctctgtaccccaacaggggccatcacatgcgcatacggcagcacgtgaacccgctcagctcatccttctcggagcccacggagccgccagagtggaaggaggtgttcgacgaccccctgctccccctcatggtcgacatcggctgcgggagtgggaggttcttgatttggcacgcgaagaattctgacaagaggcagaactaccttgggttagaaatccgcgaaaagtttaagagagaaaagagagttcaaaacagttttagaaacaaagcactgggaacctcaagcagtccacccaaagcgtga

SEQ ID NO: 1790 - protein, 149 aa, Sorghum bicolor
MAWMAAATLCCRLLRLPSARRPPSSRTRCSAAQSPDAVDKEYADLNLRPLYPNRGHHMRIRQHVNPLSSSFSEPTEPPEWKEVFDDPLLPLMVDIGCGSGRFLIWHAKNSDKRQNYLGLEIREKFKREKRVQNSFRNKALGTSSSPPKA

SEQ ID NO: 1791 - DNA, 1167 bp, Sorghum bicolor
atggcgctgctgagcccgcgcgtgccgcggctgccgccctccaccttcaccttcaccttcgccgccgcggccggtgccccgtgctttggccgtgccgcgaggtgccaggcgacggcggcgggcggcgtggcggccgcggggcccccgtcgtcggagctggaggccgtccagtggggcagcgccaagctgcagggcgttcgcgacgagatggaggatgagatcttgctccgcccgggctccctcctcgacggcttctccttcgccgccgtcttggatggacacgccggcttctccgccgtccagttcctcagggacgagctgtacaaggagtgcgcagccgcgttggacggcggcgcggtgctcagcactaagaacctcgacgctatcacggtctccatccagcgtgccttcgccgctgtcgacgccaagctctccacctggctcgagcaagcggacaaggacgacgactctggtgctacggccactgccatgtttctcaggaacgatgtccttgttgtctcgcacattggggactcttgcttggtgatatcacgcggtggaagacctgaagctttgaccagctctcatcgaccatatgggaacaacaaaacgtcccttgaagaggtcaagaggatcagagcagcaggtggatggattgttgatgggcgcatatgtggagacatatctgtatctcgtgcttttggggacataagatttaagacgcgaaagaatgaaatgctggtgaaaggagttaaagagggaaggtggactgataagttcatctcacgaataaaatttaaagatgatctaataatctcgtcacctgatgtatctctggtagagcttggaccagatgtggaatttgttctattagcaactgatggtctttgggattacataaaaagctctgaagctgtagcttttgtcagagatcaactacgtcaacatggtgatgtccagttggcctgtgaggcacttggtcagaaagctctggatcaacggtcaaaagacaatattagcatagtcatagctgacttggggaggacaaattggaaggcgttgcccgatgaaagaccaaacatgttcttggaactaagtcaagcagtcgcgactgtaggggttgtctcaataggaatttggttttcgtcgttccttggattacagtag

SEQ ID NO: 1792 - protein, 388 aa, Sorghum bicolor
MALLSPRVPRLPPSTFTFTFAAAAGAPCFGRAARCQATAAGGVAAAGPPSSELEAVQWGSAKLQGVRDEMEDEILLRPGSLLDGFSFAAVLDGHAGFSAVQFLRDELYKECAAALDGGAVLSTKNLDAITVSIQRAFAAVDAKLSTWLEQADKDDDSGATATAMFLRNDVLVVSHIGDSCLVISRGGRPEALTSSHRPYGNNKTSLEEVKRIRAAGGWIVDGRICGDISVSRAFGDIRFKTRKNEMLVKGVKEGRWTDKFISRIKFKDDLIISSPDVSLVELGPDVEFVLLATDGLWDYIKSSEAVAFVRDQLRQHGDVQLACEALGQKALDQRSKDNISIVIADLGRTNWKALPDERPNMFLELSQAVATVGVVSIGIWFSSFLGLQ

SEQ ID NO: 1793 - DNA, 2349 bp, Sorghum bicolor
atgacgaggggaggcggtggaggaggagacggcaagggcccgctgttcccgcggctccacgtcagcgacgcaggcaagggcggcggcccgcgggctccgcccaggaacaagatggcgctctacgagcagctcaccgtgccgtccaaccgcttcagctcccccgcccccgcccccgcccgcgccgcgggggccaaggccagcctcgtgccctccacgtcggctgcccaggtttatggttatgacaggactctgttccagccctttaatgtgccttcaaatgaacctgctcgttcatctgaaaagttcaaaggaaactgtatcaatgggcagtctaatagtacaagaagagaatctctgaggatgtcctcacagaccaagagcaaggatgtttgtgcttcaaaatcaattgccgggtgcacctcacagcatagagggggcaacaccatcaagtcttctgggaagaaagtggtcaatgatgatgaatttatggttccttccatctgttctcctagaatttatcgatattctactcaagaacatgcagacaaatccaaaccccaatctactacaaatccacacaaaagtccttcaatgtccaaatcatctgcaaagtgctatagtactgtgaataagcacttggacagaatgaatgaagctgatatgaggttaatgaattctccaaaggttaaggagaaagaagcagtgcaagtaccaaaaggtgtggaagttaaagaaaaggattcatcaattcaggcatcagaaaagttcaaagacaaatatgctaaactatgtcaaatgaggaataaggtgagtaatattaatcgttctgacaataacagttgccaacctacaagcgtgaatggaaaatccacagaagcaaagaaccctacagcaactagaaatccatcatcctgtaaaccatgtactgatgtagatagctctaactggaattctaatttactggaaagaagcccacgggaaggtggtgcaaagagaaaacgacaacatcacagtggagagcaaaatgatgatttatctgacgactcagtggaatgcatacctgggtgggagctctctccagatgaaattgctggagcaattggtccaaagcatttctggaaggcgagaagagctattcagaatcagcagagggtttttgctgtccaagtgttcgagctgcataagctgataaaagtgcagaagttaattgcagcatctccacatctccttattgaaggtgatcctgtccttggcaatgccttaatgggaaaaaggaacaagcttcctaaaggaaatttgaaagttcagaccctgtcaatcacaaacaaagatgatatccagccaactctagagcaaccagagctatcaaaacaaaacacagaaggaaacccatcgcaccattctcgtgatgatggacttgacgacaaccatcatgatcaagctgcagcaaacgaaacctttacaagcaaccctccagctattcctgttgctcctgacaacaaacagaataactggtgcatgaatccgccacagaatcagtggcttgtcccagttatgtcaccttctgaaggtcttgtctataagccttatgctggcccttgtcccccagttggaaatctcttgacaccattttacgccaactgtactccattaagactgccttctacaccatatggtgttcctatgcctcaccagccacagcagatggtccctcctggtgctcctgccatgcatatgaactacttcccacctttcagtatgccagtgatgaatccaggaacaccagcatctgcagtggagcaagggagccatgcagctgcaccacagcctcaagggcacatggaacagcagtcgctgatctcatgtaacatgtcacacccgagtggcatttggagatttcttgcatcaagggacagcgagccacaagccagcagcgccagcagccctttcgataggcttgaagctcaaggtgacggaagtggcccagtgtcattctttcccaaagcttcagttctgaatgcccagcctcagccctcatctggaggccgggatcagcagaaccatgtaatcagggttgttccgcgtaacgcacagactgcttcagttccgaatgcccagcctcagccatcatctggaggccgagaccagcagaaccatgtaatcagggttgttccgcgtaacgcacagactgcttcagttgcgaatgcccagactcagccatcatctggaggccaggaccagtggaaccatgtaatcagggttgttccgcataacgcacagactgcttcagagtcagcagcacggattttccggtcaatacaaatggagaggaagcaaaatgattcgtag

SEQ ID NO: 1794 - protein, 782 aa, Sorghum bicolor
MTRGGGGGGDGKGPLFPRLHVSDAGKGGGPRAPPRNKMALYEQLTVPSNRFSSPAPAPARAAGAKASLVPSTSAAQVYGYDRTLFQPFNVPSNEPARSSEKFKGNCINGQSNSTRRESLRMSSQTKSKDVCASKSIAGCTSQHRGGNTIKSSGKKVVNDDEFMVPSICSPRIYRYSTQEHADKSKPQSTTNPHKSPSMSKSSAKCYSTVNKHLDRMNEADMRLMNSPKVKEKEAVQVPKGVEVKEKDSSIQASEKFKDKYAKLCQMRNKVSNINRSDNNSCQPTSVNGKSTEAKNPTATRNPSSCKPCTDVDSSNWNSNLLERSPREGGAKRKRQHHSGEQNDDLSDDSVECIPGWELSPDEIAGAIGPKHFWKARRAIQNQQRVFAVQVFELHKLIKVQKLIAASPHLLIEGDPVLGNALMGKRNKLPKGNLKVQTLSITNKDDIQPTLEQPELSKQNTEGNPSHHSRDDGLDDNHHDQAAANETFTSNPPAIPVAPDNKQNNWCMNPPQNQWLVPVMSPSEGLVYKPYAGPCPPVGNLLTPFYANCTPLRLPSTPYGVPMPHQPQQMVPPGAPAMHMNYFPPFSMPVMNPGTPASAVEQGSHAAAPQPQGHMEQQSLISCNMSHPSGIWRFLASRDSEPQASSASSPFDRLEAQGDGSGPVSFFPKASVLNAQPQPSSGGRDQQNHVIRVVPRNAQTASVPNAQPQPSSGGRDQQNHVIRVVPRNAQTASVANAQTQPSSGGQDQWNHVIRVVPHNAQTASESAARIFRSIQMERKQNDS

SEQ ID NO: 1795 - DNA, 525 bp, Sorghum bicolor
atggatgctttcagttcagtgatggacaaggtgaagagccacccagaagtgatggaaaaggtcagtgcagtgatggacaaggtgaagagccacccagaagtggtggaaaaggtcaaggacgaggtgaagagccttgctgatgctctccatctgcggagacatggcaaagataaagaacctgagtctgaagagaaggcagaagaaggcgaggtggcgcagagcgtcgatgagagtgcctctgctgacaagactgaagaacctaatgtgttggagcaagcagtagaagagattcaggctgtcgccacagctttgcagcagcaggcagccccagcagctgaaactgaaactgaaattccagttgagactgctgctgctgctgaaacttcagctgcaggagacaagcctgaagaaacaaacaggggggaggtggagaaagatgacccgaagaagcggctcgatttcgctgggttcttcgccatgctgtttgagaggttctgctccccgggcaacaagaagaaagattaa

SEQ ID NO: 1796 - protein, 174 aa, Sorghum bicolor
MDAFSSVMDKVKSHPEVMEKVSAVMDKVKSHPEVVEKVKDEVKSLADALHLRRHGKDKEPESEEKAEEGEVAQSVDESASADKTEEPNVLEQAVEEIQAVATALQQQAAPAAETETEIPVETAAAAETSAAGDKPEETNRGEVEKDDPKKRLDFAGFFAMLFERFCSPGNKKKD

SEQ ID NO: 1797 - DNA, 2280 bp, Sorghum bicolor
atgccggtctaccgcatccgcggcgtcgacgtcgacttccccttcgacgcctacgactgccagatcacctacatggaccgcgtcatcgagtccctgcaacagggaaagaacgcgctgctagagagtcctacggggacggggaagacactgtgcctgctgtgtgcgtcgctcgcgtggcgccgcaccttcggcgagttcctgcgggtcgggcgcgggggcggcggcggcgggactcagcagttgccctacgggagccagccgtccgttagccagcagtcagaggattccacgtctcagcagcagcagtcgcggtacccagtcatcatctacgcctcacggacccacagccagcttcggcaggttatcaaggagctcaaggccaccagctacaggccgaagatggctgtgctgggttcccgtgaacagatgtgcatccacaacgaagtgagcaaactccgcggaagagcacagaacaatgcctgccacttcctctgcaagaaacgacggtgccctcataataaccatgtttctgagttcatgaaaaacaaacctgagcttgggaatgagccttttgacatagaagatttgattaatattgggcggcgtaagggcccgtgcccatattacatctcccgggaactttcaaagtcggttgatatcttgtttgctccttacaactatcttattgacccgggaaaccgtcgttccttgaatggcataccatgggacaatgcagttcttatatttgacgaagcacacaacttggagagtatatgtgcagatgcagcctcttttgatttatttccgaataacctcacagcttgtatagcggaagctcatgaatgcatcaaactgtgtgcagcaaagaggtccatcgaaaaatctgctgataaacaatttgatcctgaaaattatgcaatactcaaagctctcttaatggcacttgagaaaaaaattggtgagctgttaattgcatccaaggagttgggctacacaaaagctgggagttacatatatgattttctttctgaactgaacattacatcagacacatccaaaaaactgattgagacaattgatggtgcttctctgctactagaggaaggaaattctgctgaaactgggcgaggggtccaggcaaaggccacagtgtctagattggagtcaattagggacatgttagacataatttttaggggtggtggtcaaaaccatgcaaaatattatcgatttcatgtgaacgaatctcaacaaacatctggagatgcattgaaagttctgggtaagtcttcaaggacccttagttggtggtgtttcaacccggggctggcaatggaagaatttctcaagttgggtgtgcgctccattatattaacctcaggcaccttgtctcccttggattcactagccatggaactaaaccttgaattcccagttagactagaaaatccgcatgtcatttcctcagaccaaatctgggttggagttgtgcctgtcggcccttctggacatgctcttaattcttcttatcgcatgcgtaatactatacagtataaacaagagttgggcactgcaatagtaaacttcgcacgcattgtgccagatggactccttgttttctttccttcatattctatgatggatatgtgtgttgaattctggaaaaataggaaccattcaaattcagcgtctgagaacacaatttggcagcggatctgtaagcacaagcagccagttatagagcctaggcagtcatcaaactttcaaagtgcaattgaggattatagagccaaattacatgattcttcttctggggcaatattttttgcagtgtgtcgtggcaaagttagtgagggtcttgattttgctgatcgtgctgggagggcagtgatagttacgggaatgccctttgctactccaactgatgccaaggttcggctcaagcgtgagtatttggataagcaggggacaccatctaataaaaacacaaagacattgacaggagaagaatggtatgtgcaacaagcagcaagagctgtcaatcaggctgttggacgtgttatcagacatcgccatgactatggagctattctttattgtgatgaaaggtttgcgtggccaaattatcaatctcagatgtcatattggcttcgacctcatataaagtgctactcaaagtatggggaagtagtccaaggattgacccgtttttttcgagataaagcttcttcagatcctttgtcgctagagccaacagattgtaataaaatatatcattaa

SEQ ID NO: 1798 - protein, 759 aa, Sorghum bicolor
MPVYRIRGVDVDFPFDAYDCQITYMDRVIESLQQGKNALLESPTGTGKTLCLLCASLAWRRTFGEFLRVGRGGGGGGTQQLPYGSQPSVSQQSEDSTSQQQQSRYPVIIYASRTHSQLRQVIKELKATSYRPKMAVLGSREQMCIHNEVSKLRGRAQNNACHFLCKKRRCPHNNHVSEFMKNKPELGNEPFDIEDLINIGRRKGPCPYYISRELSKSVDILFAPYNYLIDPGNRRSLNGIPWDNAVLIFDEAHNLESICADAASFDLFPNNLTACIAEAHECIKLCAAKRSIEKSADKQFDPENYAILKALLMALEKKIGELLIASKELGYTKAGSYIYDFLSELNITSDTSKKLIETIDGASLLLEEGNSAETGRGVQAKATVSRLESIRDMLDIIFRGGGQNHAKYYRFHVNESQQTSGDALKVLGKSSRTLSWWCFNPGLAMEEFLKLGVRSIILTSGTLSPLDSLAMELNLEFPVRLENPHVISSDQIWVGVVPVGPSGHALNSSYRMRNTIQYKQELGTAIVNFARIVPDGLLVFFPSYSMMDMCVEFWKNRNHSNSASENTIWQRICKHKQPVIEPRQSSNFQSAIEDYRAKLHDSSSGAIFFAVCRGKVSEGLDFADRAGRAVIVTGMPFATPTDAKVRLKREYLDKQGTPSNKNTKTLTGEEWYVQQAARAVNQAVGRVIRHRHDYGAILYCDERFAWPNYQSQMSYWLRPHIKCYSKYGEVVQGLTRFFRDKASSDPLSLEPTDCNKIYH

SEQ ID NO: 1799 - DNA, 891 bp, Sorghum bicolor
cccccgccccgcgccacctctatggccgccggcggaggcggaggtggggacatcagcgccgactcggagcggcgcctcaagaaggccatggacaagctctaccacttccccaagcccaagtcgagtagcaccggcggctccaagccctcttcgtcggcctcggctgcaagctccgggagagcggtggggaaagcagcggccgaggcggcgagaaggctcggggtggtgcgcgggtcgcggctcccgcctcaggtgtcggccatgtcagcgatctcgccgccaccgccgtgccgcccctgggaccgcgccgacctcatgcgtcggctcgggtcattcaaggccatgacctggttcgccaagcccaaggttattagtcctgttaactgcgcaagaagaggatggactaacattgagccagatgttataacatgtgaagcttgtggggcacgactcctgttctccactccttcctcatggacaacacagcaagttgaaaaggctgctgctgttttcagcctgaagctggacactgggcacaaactactgtgcccgtggattgataatatatgtgatgaatcacttgctttatttccaccaacgccacctcctgttttagttgggaactactatgaacttttagcctctctgatgcgacttttagcactcccaagaatttcctgctcttctcttgagaccatgaaaaagcggagtccacagctagagcagtttctatcagaaccattctcttcatcagttgttctcaaagggagatttatgcttactgaggactctacaattaaggatttggatgatgcttttcaagatgctgacacatattatcaggcacttaagataataagtttgtgtggatgggaaccccgcctacttcct

SEQ ID NO: 1800 - protein, 297 aa, Sorghum bicolor
PPPRATSMAAGGGGGGDISADSERRLKKAMDKLYHFPKPKSSSTGGSKPSSSASAASSGRAVGKAAAEAARRLGVVRGSRLPPQVSAMSAISPPPPCRPWDRADLMRRLGSFKAMTWFAKPKVISPVNCARRGWTNIEPDVITCEACGARLLFSTPSSWTTQQVEKAAAVFSLKLDTGHKLLCPWIDNICDESLALFPPTPPPVLVGNYYELLASLMRLLALPRISCSSLETMKKRSPQLEQFLSEPFSSSVVLKGRFMLTEDSTIKDLDDAFQDADTYYQALKIISLCGWEPRLLP

SEQ ID NO: 1801 - DNA, 552 bp, Sorghum bicolor
tcgtttgctcggccgtacccgtaccaactccactcccatccgttcgtcaccgcgcaccggccgggcggggagctgagggcctgtgccctgaggctgagctcatcagctggccgggctcgggcggacgcggacgcggacgggagaggaggcacggcgcatggccggtcatcgttacgatgcgtgcgggaggccaggcaaggcggcatcggcaaggccagggcagcaactccatctgcctccggccgccgccaatccgaggcgaacccgaaggacgtgcggacaagcgggacgtccgtcgtcctcacatggggaaaatccgcgggggatccggacaacctcaccgtcgtcgtcgtcgccaaaaaaatttcgcgcttgaagaacgcgcacctgagggcactccccggcgcggcggagaggctggcgctgtgcaaggccgacctgctcgactacgacacgatgcggtcggccgtcgccggctgccacgacgtcttccacaccgcatcgcccgtcaccgaccatccgcaattgacgaagaacgggcagttccagtga

SEQ ID NO: 1802 - protein, 183 aa, Sorghum bicolor
SFARPYPYQLHSHPFVTAHRPGGELRACALRLSSSAGRARADADADGRGGTAHGRSSLRCVREARQGGIGKARAATPSASGRRQSEANPKDVRTSGTSVVLTWGKSAGDPDNLTVVVVAKKISRLKNAHLRALPGAAERLALCKADLLDYDTMRSAVAGCHDVFHTASPVTDHPQLTKNGQFQ

SEQ ID NO: 1803 - DNA, 210 bp, Sorghum bicolor
atgtcggcgaccacggcggccgtgcccttctggcgggcagcggggatgacctacataggatactccaacatctgcgctgcgctggtccggaactgcctcaaggagcccttcaagtccgaggccgcgtcccgcgagaaggtccatttctccatctccaagtgggcggacggcaagcaagagaagcccactgtccgcacagaagatgaataa

SEQ ID NO: 1804 - protein, 69 aa, Sorghum bicolor
MSATTAAVPFWRAAGMTYIGYSNICAALVRNCLKEPFKSEAASREKVHFSISKWADGKQEKPTVRTEDE

SEQ ID NO: 1805 - DNA, 1677 bp, Sorghum bicolor
atggcaatcgagtgcctcgtgctaggggcggggcaggaggtggggaaaagctgcgtggtggtgaccatcggcgggaagcgcgtcatgttcgactgcggcatgcacatgggctaccacgaccaccgccactacccggactttgcgcgcgcgctcgctgcctggggagcgcccgacttcaccaccgccatctcctgcgtcgtcatcacgcatttccacttggatcatatcggggcgctgccctacttcactgagatctgcgggtaccacggccccatctacatgacgtatcctacaaaggctttagctccatttatgctcgaggactatcggaaagtaacgatggatcagagaggggaggaagagcaatatagctatgaagatattcttaggtgtatgaagaaagtcataccaatggacttgaagcagactattcaagtagataaagacctagtgatccgtgcctattatgctggacatgttataggggctgccatgatttatgcaaaagttggggatgctgctatggtttacaccggggattacaatatgacaccagatagacatcttggggccgcacaaattgatcacctgaagttggatctcttgataacagaatcaacatatgctaaaactatacgtgactcaaagcatgcccgagagagggagttcttaaaagcggtacataaatgtgtttctggtggaggtaaagttctaattccaacgtttgctctgggaagagctcaggaactatgcatgttactggatgactattgggagaggatggacttgaaagttcctatttatttttcagctggtttaaccattcaagctaacgtgtactacaaaatgttgatcggatggactagccaaaagatcaaggacagccatgcagtgcataacccctttgacttcaagcatgtttgccactttgagcgttccttcattaacaaccctggtccctgtgtactttttgcaacacctggtatgattagtgggggattttctcttgaggcgtttaagaaatgggcaccatcagagaagaatctgattacacttcccggatattgtgtttctggaaccattggtcataagttaatgtgtgggaaacctacaaggattgattacaaggacattcatattgatgtcagatgtcagattcatcagctagcattcagtcctcatacagactccaaagggattatggatctgacagaattcctgtcacccaaacatgtaattctcgttcatggtgaaaagcctcagatggcttttctgaaggagaggatcgaatctgaattggggatgccttgctattacccagggaataatgaatccgtctccattccgacaacccagaaccttaaaatgagtgccacagaaaggttcattacaagctgtgctgtggagcaaggtaaacgtagcctgcacaagcggaacctgatttgtggtacaggtttgtcagaagtgattggcagcgatgaggaggcggcggagggcattcttctgatggagaaacacaagtctccgaaaattctttgtgaggatgagctccttgaagtgctgggcatggagcagcatcttgtccagtttgaaccaatggtctccagaattgtagctgatgttgaatcggagttgcagcgggctaaggcagcggatttagatagcgatgggaaatga

SEQ ID NO: 1806 - protein, 558 aa, Sorghum bicolor
MAIECLVLGAGQEVGKSCVVVTIGGKRVMFDCGMHMGYHDHRHYPDFARALAAWGAPDFTTAISCVVITHFHLDHIGALPYFTEICGYHGPIYMTYPTKALAPFMLEDYRKVTMDQRGEEEQYSYEDILRCMKKVIPMDLKQTIQVDKDLVIRAYYAGHVIGAAMIYAKVGDAAMVYTGDYNMTPDRHLGAAQIDHLKLDLLITESTYAKTIRDSKHAREREFLKAVHKCVSGGGKVLIPTFALGRAQELCMLLDDYWERMDLKVPIYFSAGLTIQANVYYKMLIGWTSQKIKDSHAVHNPFDFKHVCHFERSFINNPGPCVLFATPGMISGGFSLEAFKKWAPSEKNLITLPGYCVSGTIGHKLMCGKPTRIDYKDIHIDVRCQIHQLAFSPHTDSKGIMDLTEFLSPKHVILVHGEKPQMAFLKERIESELGMPCYYPGNNESVSIPTTQNLKMSATERFITSCAVEQGKRSLHKRNLICGTGLSEVIGSDEEAAEGILLMEKHKSPKILCEDELLEVLGMEQHLVQFEPMVSRIVADVESELQRAKAADLDSDGK

SEQ ID NO: 1807 - DNA, 1107 bp, Sorghum bicolor
atggcgtgcgatggaggcggcgtgaaggagcaggagggccccagcgcggcgtctccggccccaagtcctgcggctgtggctagggcgagggcgagggcggcgcggcctccgaggcccaggagccgcaaggggctcggcgtgcggaaccagctgaagccctgccgaatccttgcagccctccagagggcgaatgccagggtgagggaagcgggggaggcgaccctcgtggcagccctcgcggcggcgcaaaaggagagcgaaagggagaacgaggtggtgcccgatgtgtgcggcggctggaagagtgaggatggaagtttaaattgtggatactcaagcattcgaggtagaagggcaaccatggaagacttctatgacataaaatcttctagaattgatgataaacaaataaaattttttggagtatttgatggtcatggaggtacccgcgctgctgggtatttgaaacaacacttatttgaaaacctcctgaaacatccagggttcattggtgatactaagtccgcaatgagtgagtcctataaaaaaactgacgcggatttcttggatgctgaaggcaatattcaagttgggtctactgcatcaacagcagttttgattgacaaccatctgtatgtggcaaatgttggtgattcaagggctgtaatgtcaaaggcaggcaaagctattgcactctctgatgaccataaaccaaacagaagtgatgagcaaaaacggattgaggatgctggaggagttgttgtttggtctggaacatggagggtaggtggtatacttgcaatgtctagggcatttggcaatcgtttgttgaagcagttcgttgttgcagaccctgagattcaggatctagaaatagatggtgatgtggagtttcttattttggctagtgatgggctctgggatgtggtgccaaatgagcatgctgttgcatttgtgaaggacgaggatagccctgaggctgcagcccggaagcttacggagatcgccttcaggcgtgggagcactgacaacattacatgcattgttgtagaattttgccacgataagatgattgatggttctctcccgtcaaccaatcagagttga

SEQ ID NO: 1808 - protein, 368 aa, Sorghum bicolor
MACDGGGVKEQEGPSAASPAPSPAAVARARARAARPPRPRSRKGLGVRNQLKPCRILAALQRANARVREAGEATLVAALAAAQKESERENEVVPDVCGGWKSEDGSLNCGYSSIRGRRATMEDFYDIKSSRIDDKQIKFFGVFDGHGGTRAAGYLKQHLFENLLKHPGFIGDTKSAMSESYKKTDADFLDAEGNIQVGSTASTAVLIDNHLYVANVGDSRAVMSKAGKAIALSDDHKPNRSDEQKRIEDAGGVVVWSGTWRVGGILAMSRAFGNRLLKQFVVADPEIQDLEIDGDVEFLILASDGLWDVVPNEHAVAFVKDEDSPEAAARKLTEIAFRRGSTDNITCIVVEFCHDKMIDGSLPSTNQS

SEQ ID NO: 1809 - DNA, 1344 bp, Sorghum bicolor
atggcgcggcggtgcccgtgcaggctgctgctagccgtcgtcgtgctcgtgctcgtgtccgctgcagcgcaggcgcaggcgcaggagacgtgctcgggggccgtgccggcgccgccgcggcgcggggcgcgggtgtccgtggccagcttcggcggcgcgggcgacgggcggacgctcaacacggcggcgttcgcgcgcgccgtcgccaccatcgagcgccgcgccgtgcccggcggggcggagctctacgtgccgccaggggtgtggctcacggggcccttcaaccttacctcgcgcatgacgctcttcctcgcgcgcggcgccgtcgtccgcgccacgcaggacacatcaagctggcctctgatcgaaccactgccctcatatgggagaggacgagagctgcccggcggaagatacatcagtttaatccatggcagtgggcttcaggatgttgtcatcacaggtgagaatggaactattgatggtcaaggcaccccatggtgggatatgtggaagaagggcacactgctctacacaaggcctcaccttcttgagctgatgagctcttctcatatcatcgtctccaatgttgtctttcaggattcaccattctggaacattcatcctgtttattgcagcaatgttgtgatcagaaatgtgactatcctagctccacatgactcccccaacacggatggaattgatccagattccagcagcaacatctgcattgaggattgctacatttcgacgggtgacgatgccattgccatcaagagtggctgggatgagtatggaatcgcttatggccgccccagctccgacatcaccgtccgccggatcacaggctcctccccttttgccggcttcgctgttggaagcgaaacatcaggtggcgtggagaacgtccttgcagagcacctgaacttcttcagctcagggttcgggatccacatcaagaccaacaccggcaggggaggcttcatccggaacgtcactgtctccgacgtgaccctggataacgtccgctacggcctgcggatcgtcggcgatgttggcaaccaccccgacgagcgctacaaccggagcgcgctcccaatcgttgacgccctgacgataaagaatgtccagggccagaacatcaaggaggctgggctgatcaagggcattgccaactcggccttctcccggatctgcctgtcgaacgtcaagctcactggaggtgcgcctgtccagccgtggaagtgcgaggctgtcagcggtggcgctctcgacgtgcagccgtcgccgtgcacagaactgacttccacgtccgggacgagcttctgtacaaattcactctag

SEQ ID NO: 1810 - protein, 447 aa, Sorghum bicolor
MARRCPCRLLLAVVVLVLVSAAAQAQAQETCSGAVPAPPRRGARVSVASFGGAGDGRTLNTAAFARAVATIERRAVPGGAELYVPPGVWLTGPFNLTSRMTLFLARGAVVRATQDTSSWPLIEPLPSYGRGRELPGGRYISLIHGSGLQDVVITGENGTIDGQGTPWWDMWKKGTLLYTRPHLLELMSSSHIIVSNVVFQDSPFWNIHPVYCSNVVIRNVTILAPHDSPNTDGIDPDSSSNICIEDCYISTGDDAIAIKSGWDEYGIAYGRPSSDITVRRITGSSPFAGFAVGSETSGGVENVLAEHLNFFSSGFGIHIKTNTGRGGFIRNVTVSDVTLDNVRYGLRIVGDVGNHPDERYNRSALPIVDALTIKNVQGQNIKEAGLIKGIANSAFSRICLSNVKLTGGAPVQPWKCEAVSGGALDVQPSPCTELTSTSGTSFCTNSL

SEQ ID NO: 1811 - DNA, 1683 bp, Sorghum bicolor
atgttagctcaagttcttcttcgagcagtgtcgaatggtaaagtgtctgtttcagggcaaaagattgcttcagctgggaaggcccatgccaagaatcttatggcttctgagaccattgaaggctatgctgtgctactggaaaatactgtcaagatccccactgatgcactgagccctttaactgctggtgagatacctttagctctgaaacaggagtggaaatggcacctattcgaggatgtgaagcatttacaccgtatgaatacaagtttgtctggctacaagatactccagaaactagagcaggagtggcatagcaaccaaatggaaaactcttctttgagtacaaccaagatcagtgacgcattctctgcaattgcctgggaggaacagagagcaaatgaggttatggacatcaaaagaaaaacggaggaagacgagttgaaggacaggaatgaccaaccacatggaacatgggaggaggtgtacagaaatgtgaaaagggtagagaggttaaaaaatgaattgcatgaaagagatgacaaggagcttgagcggacaggtcagccactttgtatatatgagcctttctttggggaggggacctggccctttctgcaccagagctctctttatcgtggagttggcctgtcttcaaaaggtcgaagaccaggagcggatgatattgatgcttcttctcgtcttcctcttcttaataatatctactacagagatattcttggtgaatttggagctttctttgctctttccaacagaattgacagaatacataaaaattcttggatagggtttcagtcctggagagctacagcaagaaaggcaaacttgtcaaaaaatgctgaatctgcaatcttagaagccgttcaatctcaaaagcatggagattccttttatttttgggtccggatggatcaagatccaagaaaccatgctaataaagatttttggtccttctgtgatgcgatcaatgctgggaactgcaggttagctgttttggaagcgttccaaaggatgtatggtgtacatcttgatcatgacctggattctctgttacatatgcctaatgatggagacacttggtctgtgatgcaaagttgggttttgcctacacggtcattcctagaatttgttatgttttcaagaatgtttgttgatgcattggatgcacaaatgtatgacaaacaccatcaaactgggcattgcatcttgagtctccacaaggaccagcactgctattctcgcgttctggagttgattgtgaatgtttgggcattccacagtgcacggcggatggtctatgttaatcctgagactggtgcaatgcaggagcagcaccatctcagtggcaggagaggtcaaatgttagtgcagtttttctcctacaccactctgaagagcatggacgaggagcttgcagaagagtttgatttggatcacccggacaggaggtggctctggccacaaactggagaggtcttctggcagggtctctatgagagggagcggagcatgcggcagcaggagaaggagcgaagaaagcagcagagcagagagaagatccagagaatcaagaatagagctcggcaaaagacgttggggaagtatataaagccaccacctgatgatacaggtggctcgaatgatacaacagtagatttgtag

SEQ ID NO: 1812 - protein, 560 aa, Sorghum bicolor
MLAQVLLRAVSNGKVSVSGQKIASAGKAHAKNLMASETIEGYAVLLENTVKIPTDALSPLTAGEIPLALKQEWKWHLFEDVKHLHRMNTSLSGYKILQKLEQEWHSNQMENSSLSTTKISDAFSAIAWEEQRANEVMDIKRKTEEDELKDRNDQPHGTWEEVYRNVKRVERLKNELHERDDKELERTGQPLCIYEPFFGEGTWPFLHQSSLYRGVGLSSKGRRPGADDIDASSRLPLLNNIYYRDILGEFGAFFALSNRIDRIHKNSWIGFQSWRATARKANLSKNAESAILEAVQSQKHGDSFYFWVRMDQDPRNHANKDFWSFCDAINAGNCRLAVLEAFQRMYGVHLDHDLDSLLHMPNDGDTWSVMQSWVLPTRSFLEFVMFSRMFVDALDAQMYDKHHQTGHCILSLHKDQHCYSRVLELIVNVWAFHSARRMVYVNPETGAMQEQHHLSGRRGQMLVQFFSYTTLKSMDEELAEEFDLDHPDRRWLWPQTGEVFWQGLYERERSMRQQEKERRKQQSREKIQRIKNRARQKTLGKYIKPPPDDTGGSNDTTVDL

SEQ ID NO: 1813 - DNA, 1215 bp, Sorghum bicolor
atgatgcctccgacggccaccgcgacggccgtcttcctctccgcggcgcccccctctttctcaacccgccgtcggcgcagccgccttcctgccatctccgcatccctttcgccgtcctcctcctcttcctcctccgaggagccgctgctggtgcgcgcggcgcggggcgaggacgggctcccgcgcccgcccgcgtggatgatgcggcaggcggggcggtacatggcggagtaccaggcgctggccaagcgccacccctcgttccgggagcgctccgagaacacggacctcatcgtcgagatcacgctgcagccgtggcgtgccttcgcgcccgacggcgtcatcctgttctcggacatactcacgcccctgccggccatcggggtgcccttcgatatctccgactccaaggggcccgtgatccaatccccagtgcggtccgaagagcaggtgagggagctcgtccccatcgaccttgatatgctccagttcgtcggggagtcgctaaagattctgcgaaatgagattgatggaaaagctgctttgctaggatttgtgggggccccatggacaattgcaacttacgttgttgaaggggggatgaccaacacatacacaaatataaagagcatgtgccatacagctccagatgtcttgaggagtcttctttctcaccttgcacaagcgatatctgactatatcatttaccaagttaactctggggcccagtgtatacagatatttgattcatggggtggacaacttccacctcatgtgtgggagcagtggtcaaaaccatatatcaaacagattgtgagtaggattaagaaagagtgccctcatgtaccccttgtgttgtatataaatggaaatggaggtttacttgagcgcatgaaggacacaggagttgatgttattgggcttgactggacagtggacatgtctgatggaaggaggcgccttggtaatggaattagtgtacaagggaatgtggatccagcatttctgttctcaccattaccagtactgactgatgaaattcatagggttgtgaaatcagctggtccaaaaggtcatatacttaacctgggccatggtgtacttcagaaaacacctgaagaagctgtagcacatttctttgatgtcacaaggagcttgagatatgacacccttttccaaggttctgttgccgaagaactgcagcctgttgcttga

SEQ ID NO: 1814 - protein, 404 aa, Sorghum bicolor
MMPPTATATAVFLSAAPPSFSTRRRRSRLPAISASLSPSSSSSSSEEPLLVRAARGEDGLPRPPAWMMRQAGRYMAEYQALAKRHPSFRERSENTDLIVEITLQPWRAFAPDGVILFSDILTPLPAIGVPFDISDSKGPVIQSPVRSEEQVRELVPIDLDMLQFVGESLKILRNEIDGKAALLGFVGAPWTIATYVVEGGMTNTYTNIKSMCHTAPDVLRSLLSHLAQAISDYIIYQVNSGAQCIQIFDSWGGQLPPHVWEQWSKPYIKQIVSRIKKECPHVPLVLYINGNGGLLERMKDTGVDVIGLDWTVDMSDGRRRLGNGISVQGNVDPAFLFSPLPVLTDEIHRVVKSAGPKGHILNLGHGVLQKTPEEAVAHFFDVTRSLRYDTLFQGSVAEELQPVA

SEQ ID NO: 1815 - DNA, 546 bp, Sorghum bicolor
atgagcaaggaagaggaggtgcgatccagcggtgccgtcatggatgcgggaggggaggaggagagacgggagaagagcgtcggcctgatggccggcctggtagacaaggccaagggcttcgtggtggagaaggtgacacagatccccaagcccgaggcagcgctagatcgcgtctccttccggagcatcagccgcgagggcgtcgagctgcacagccacgtcgatgtcagcaatccctactcgcaccgcatccctatctgcgagatcacctacaccttcaagagcgctggcaaggtgattgcgtcgggcacgatgcccgaccccgggtggatcgcggcgagcggcagcaccaaactggagctgccggtgaaggtgccgtacgacttcattgtgacgctgatgaaggatgtgggaggggactgggacattgattatctgttggaggtggggctcaccatcgacctccccatcatcggcgccttcactatcccgctcaccactgaaggcgagatcaagctccccaccttccgggacttattgttttaa

SEQ ID NO: 1816 - protein, 181 aa, Sorghum bicolor
MSKEEEVRSSGAVMDAGGEEERREKSVGLMAGLVDKAKGFVVEKVTQIPKPEAALDRVSFRSISREGVELHSHVDVSNPYSHRIPICEITYTFKSAGKVIASGTMPDPGWIAASGSTKLELPVKVPYDFIVTLMKDVGGDWDIDYLLEVGLTIDLPIIGAFTIPLTTEGEIKLPTFRDLLF

SEQ ID NO: 1817 - DNA, 1617 bp, Sorghum bicolor
atgcctctgcctttcctctgcttctcttccactgcaccaatggtgaccagcgttctgctgatactgcgggaaacctctccgtgggcgctggtcggcgcggcggcgtccgtggcgctgctgtggctggtcgcctggacactggagtgggcgtggtggacgccacggcggctagaccgagccctacgggcccagggcctcaagggcaccaagtaccgcctcctcaccggcgacgtgagggagaacgcccggctcaaccgagaagcccgcacgaagccgctggcgcttgggagtcacgacatcatcccccgcgtgctacccatgctccacaacgttgtaaaggaatatgggacaaattcattcacttggttcggcccggttccgagggtgataattccagatccggagttagtgagagaggttttgtctaacaagtttggccacttcggcaaaccacggtttagccgtcttggcaagttactagccaacgggctcgcaaatcatgaaggagagaaatgggcaaaacacaggagaattctcaatcctgcattccaccatgagaaaataaagcggatgctgcctgtatttgctacctgttgcactgatatgattaacagatgggaaaattcaatgtcttccgagggatcttctgagatagacgtctggcctgagttccaaaatcttaccggagatgttatctcaagaaccgcatttggtagcaactatcaggagggcaggaacattttccagctgcaaggagagcaggctgaacgccttatacaatcttttcaaacaatatttatccctggctactggttcttgcccaccaaaaataacagaaggatgaaagaaattgatcgggagatctgtaaagttctgcatggaataatcaggaaaagagagagggcttttatagatggtgaaggaagtaatgatgacttgctaggcttattggttgagtctaatatgagagaatcaaatgggaatgcgaaactgggaatgagtaccaaagatattatcgaggaatgcaagttgttttactttgcaggtatggagaccacatcagtcctgcttacatggacgttaattgtgctaagcatgcaccccgaatggcaagagcgggcaagagacgaagttttaaaccactttggaagaggtagaccagattttgatagcttgaaccgcctgaagattgtaaccatgattctatatgaggtgcttaggttgtacccaccagtgatcttactaaccagaagaacttacaaggaaatggagctaggtggcatcacatatccttcaggtgtgagccttctactgcctatcattttcattcaccatgatcctaacatctggggaaaagacgctagcgagttcaatccacagaggtttgaggatggcatttccaatgcgaccaagcatcaggctgctttctttccatttggatggggtcccaggatctgcataggccagaactttgcgttgctagaagcaaagatggcactgtgcaccatccttcaacgcttctcctttgagctctcgccatcctacactcatgcgccatacaccgtgataactttgcaccctcagcatggtgctcaaatcaggttgaagaagctttga

SEQ ID NO: 1818 - protein, 538 aa, Sorghum bicolor
MPLPFLCFSSTAPMVTSVLLILRETSPWALVGAAASVALLWLVAWTLEWAWWTPRRLDRALRAQGLKGTKYRLLTGDVRENARLNREARTKPLALGSHDIIPRVLPMLHNVVKEYGTNSFTWFGPVPRVIIPDPELVREVLSNKFGHFGKPRFSRLGKLLANGLANHEGEKWAKHRRILNPAFHHEKIKRMLPVFATCCTDMINRWENSMSSEGSSEIDVWPEFQNLTGDVISRTAFGSNYQEGRNIFQLQGEQAERLIQSFQTIFIPGYWFLPTKNNRRMKEIDREICKVLHGIIRKRERAFIDGEGSNDDLLGLLVESNMRESNGNAKLGMSTKDIIEECKLFYFAGMETTSVLLTWTLIVLSMHPEWQERARDEVLNHFGRGRPDFDSLNRLKIVTMILYEVLRLYPPVILLTRRTYKEMELGGITYPSGVSLLLPIIFIHHDPNIWGKDASEFNPQRFEDGISNATKHQAAFFPFGWGPRICIGQNFALLEAKMALCTILQRFSFELSPSYTHAPYTVITLHPQHGAQIRLKKL

SEQ ID NO: 1819 - DNA, 1554 bp, Sorghum bicolor
atgcagttttcactagcatcggatgcgaactcaggtcctcacccaataagaagatcttgtgagggtggtgggattgacaggttggaacgattaagtattgggggcagcaagcaggagaaagctttgaggaataggtgctttggtggtagagttgctgcaactacacaatgtattcttacctcagatgcttgtcctgaaactcttcattttcaaacacagtcctctagaaaaagttatgctgatgcaaaccatgtatctgctatcattttgggtggaggcactggatctcagctctttcctctgacaagcacaagagctacgcctgctgttcctgttggaggatgttacaggcttatcgatatccctatgagtaactgcttcaacagtggtataaacaagatatttgtgatgactcagttcaattctacttcgcttaaccgccatattcatcgtacataccttggaggcgagatcaactttgctgatggatctgtacaggtattagcggatacacaaatgcccgaagagcctgatggatggttccagggtacagcagactctgtcagaaaatttatctgggtactcgaggattattacaatcacaaatctattgagcacattgtaatcttgagtggcgatcagctttatcagatgaattacatggaacttgtgcagaaacatgtcgaggacaatgctgacatcactgtatcatgtgctcctgttgatgagagccgagcttctaacaatgggctagtgaagtgtgatcatactggacgtgtacttcaattttttgagaaaccaaagggtgctgatttgaattcgatgagagttgataccaacttcctcagctatgctataggtgatgcacagaaatatcagtacatcgcatcaatgggcatttatgtcttcaagaaagatgcacttttagaccttctcaagtcaaaatatactcaattacatgacttcggatctgaaatcctcccaagagctgtactagagcataatgtgcagacatgcattttcatgggctattgggaggatgttggaacaatcaaatcattctttgatgcaaacttggccctcactgagcagccttccaagttcgatttttatgatccaaaaacacctttcttcactgcaccccggtacttgcctccgacacaattggacaagtgcaagatcaaagatgcatctatctcagatggttgcttactgagagaatgcagcatcgagcattctgtgattggagtctgctcacgtgtcagctatggatgtgaactcaaggactgtgtgatgatgggagcggacatctatgaaactgaagaagaagcttcaaagctactgttagctggggaggtcccagttggaataggaggaaacacaaagataaggaactgcatcattgacataaatgctaggattgggaagaacgtggtgatcacaaacagtaagggcatccaagaggctgatcaccctgaggaagggtactacataaagtctggaattgtggtgatcttgaagaatgcaaccatcaaggatgggtctgtcatataa

SEQ ID NO: 1820 - protein, 517 aa, Sorghum bicolor
MQFSLASDANSGPHPIRRSCEGGGIDRLERLSIGGSKQEKALRNRCFGGRVAATTQCILTSDACPETLHFQTQSSRKSYADANHVSAIILGGGTGSQLFPLTSTRATPAVPVGGCYRLIDIPMSNCFNSGINKIFVMTQFNSTSLNRHIHRTYLGGEINFADGSVQVLADTQMPEEPDGWFQGTADSVRKFIWVLEDYYNHKSIEHIVILSGDQLYQMNYMELVQKHVEDNADITVSCAPVDESRASNNGLVKCDHTGRVLQFFEKPKGADLNSMRVDTNFLSYAIGDAQKYQYIASMGIYVFKKDALLDLLKSKYTQLHDFGSEILPRAVLEHNVQTCIFMGYWEDVGTIKSFFDANLALTEQPSKFDFYDPKTPFFTAPRYLPPTQLDKCKIKDASISDGCLLRECSIEHSVIGVCSRVSYGCELKDCVMMGADIYETEEEASKLLLAGEVPVGIGGNTKIRNCIIDINARIGKNVVITNSKGIQEADHPEEGYYIKSGIVVILKNATIKDGSVI

SEQ ID NO: 1821 - DNA, 1599 bp, Sorghum bicolor
atgaagctgagagcaaaaggcctcggcctcctgcttctccttgtcctgcttgctatttgctccaccattgaagtcagcgaggcgagaagaggcaagcattggcggtcgtcgaggagctcaccaggctcctctcagctcaagaaaggcaaaggaaagaagagcagctcccgccggcaacacggcagcaaccggccaagtccgaagccaccggtcagctccacgccaagctctggtgctggtaaaggaaatcagaatccataccaaccaagcccgaatgcccctccaagccctgccaatggcagtaggcattccactcccaagctgccgccgacttcaagctgtgggaagggtcatcaacagccatcgcagccgccaccagcaacctcgcagggtgcagtattcaatgtggttgattttggagccaagggtgacggagttacagatgatactaaggcttttgaaggagcgtgggctgctgcctgcaaccagggggcatctacagttctcgtaccaccagaactagagttccttgttgggccaatctcgttctctggaccttactgcaaaccgaatattgtctttcagctggaaggaacaatcctagctccaaccagtgctaaatcctggggttctggcttgctccagtggctggagttcaccaaactaaatggaatagttattcaagggaacggcattataaatgggagagggcaacagtggtggacctacttagacccagaggatgaggatgatgatgacacgtacgatgtggagtttgaaagaatgccacagattaaacctacagcattgaggttttatggtagtttcaacgttgtagtagctggtatcactattgtcaacagctcacagtgccatcttaagtttgacaactgtcaaggagtgatggtccatgacgtgactatatcctcccctgagaacagtctcaacactgacggaatacacctgcagaactccaaagatgtcagcattcatcatacaaacctggcttgtggtgacgactgcatctccatccagacaggatgcagcaacataaatatacacaacgtgaattgtggaccaggccatggaatcagcataggtggactaggtcgagacaacacaaaagcatgtgtatcaaatgttacagtaagagacgtcaacatgttcagaaccatgaatggtgtcagaatcaagacctggcagggtggtgtaggattggttcaagacataaggttctcaaatatacaagtctcagaggttcaaacacccattatcatagatcagttttattgtgacagaagcacttgcagaaatcaaacatcagcagtggcagtatcaggagttcaatatgagaatatcagaggaacatttacaatcaagcctgtccattttgcatgcagtgacagcttaccttgttcaggaatctctcttaccggtgtgcaactcagaccagtgcaagtaccccactaccacctgaataacccattctgctggcaagcttttggggagctctacactccaaccgtccctcccatagcttgcttgcagattggaaaacctgctggcaataacttacagtcatatgacgacatatgctga

SEQ ID NO: 1822 - protein, 532 aa, Sorghum bicolor
MKLRAKGLGLLLLLVLLAICSTIEVSEARRGKHWRSSRSSPGSSQLKKGKGKKSSSRRQHGSNRPSPKPPVSSTPSSGAGKGNQNPYQPSPNAPPSPANGSRHSTPKLPPTSSCGKGHQQPSQPPPATSQGAVFNVVDFGAKGDGVTDDTKAFEGAWAAACNQGASTVLVPPELEFLVGPISFSGPYCKPNIVFQLEGTILAPTSAKSWGSGLLQWLEFTKLNGIVIQGNGIINGRGQQWWTYLDPEDEDDDDTYDVEFERMPQIKPTALRFYGSFNVVVAGITIVNSSQCHLKFDNCQGVMVHDVTISSPENSLNTDGIHLQNSKDVSIHHTNLACGDDCISIQTGCSNINIHNVNCGPGHGISIGGLGRDNTKACVSNVTVRDVNMFRTMNGVRIKTWQGGVGLVQDIRFSNIQVSEVQTPIIIDQFYCDRSTCRNQTSAVAVSGVQYENIRGTFTIKPVHFACSDSLPCSGISLTGVQLRPVQVPHYHLNNPFCWQAFGELYTPTVPPIACLQIGKPAGNNLQSYDDIC

SEQ ID NO: 1823 - DNA, 1371 bp, Sorghum bicolor
atgtccgccttccccgtccgcggctccacgtccagcagcagcatcgtcgccagcctcggcagcagccgcgcccccgcccccgcgccgtcctccgtccgccggcgccccagcctcatcaggaacgcccccgtcgtcgccgtccccgccaccctcgtgggcatggacgccgtcgagcgcttgaaggtcgggttccagaagttcaagaccgaggtctatgacaaaaagccagagctgttcgagcctctcaaggctggccaggcccccaagtacatggtgttcgcctgctccgactcccgtgtgtgcccgtcggtgaccctgggcctgcagcccggcgaggccttcaccgtccgcaacatcgcctccatggtgccaccctacgacaagaccaagtacagcggcaccgggtccgccatcgagtacgccgtgtgcgccctcaaggtgcaggtgctcgtcgtcattggccacagctgctgcggtggcatcagggcgctcctctccctcaaggacggtgcacctcacaacttccacttcgttgaggactgggtcaggatcggctcccctgccaaggcgaaggtgcacaaagagcatgcctcagtgccgttcgatgaccagtgctccatcctggagaaggaggccgtgaacgtgtccctcgccaacctcaagacttaccccttcgtcaaggaacggctggccaaagggaccctcaagctggtcggcgcccactacgacttcgtgtccgggaagttcctcacatgggagcctgtgatggacgccgttgaccgcttgaagagcgggttcgagcagttcaagatcgaggtctatgacaagaagccagagctttttgagcctctcaaatctggccaggcccccaggtacatggtgttcgcctgcgctgactcccgtgtgtgcccgtcggtgaccctgggcctgatgcccggcgaggccttcaccgtccgcaacatcgccgccctggtcccaggctacgacaagaccaagtacaccggcatcgggtccgccatcgagtacgccgtgtgcgccctcaaggtgcaggtgctcgtcgtcattggccatagctgctgcggtggcatcagggcgctcctctccctccaggacggtgcacctgacaacttccactttgttgaggactgggtcaagattggcttccctgccaagatgaaggtgaagaaagagaacgcttcggtgccgttcgatgaccaatgctacattctagagaaggaggccgtgaatgtgtccttggagaacctcaagacctacccattcgtcaaggaagggctggccaacggtaccttaaagctggtcggcggccactatgacttcgtgaaaggagagttcctcacatggaaagtctag

SEQ ID NO: 1824 - protein, 456 aa, Sorghum bicolor
MSAFPVRGSTSSSSIVASLGSSRAPAPAPSSVRRRPSLIRNAPVVAVPATLVGMDAVERLKVGFQKFKTEVYDKKPELFEPLKAGQAPKYMVFACSDSRVCPSVTLGLQPGEAFTVRNIASMVPPYDKTKYSGTGSAIEYAVCALKVQVLVVIGHSCCGGIRALLSLKDGAPHNFHFVEDWVRIGSPAKAKVHKEHASVPFDDQCSILEKEAVNVSLANLKTYPFVKERLAKGTLKLVGAHYDFVSGKFLTWEPVMDAVDRLKSGFEQFKIEVYDKKPELFEPLKSGQAPRYMVFACADSRVCPSVTLGLMPGEAFTVRNIAALVPGYDKTKYTGIGSAIEYAVCALKVQVLVVIGHSCCGGIRALLSLQDGAPDNFHFVEDWVKIGFPAKMKVKKENASVPFDDQCYILEKEAVNVSLENLKTYPFVKEGLANGTLKLVGGHYDFVKGEFLTWKV

SEQ ID NO: 1825 - DNA, 582 bp, Sorghum bicolor
atggcagaccggccgccgctcgggccacgcgcagccccgcccagccccaccgccgcccggcgcggccacgcgtcggcgtcggcggagcgccagcagcgctcgctgctcggacgcgccgtccagacgttccaccacgtccacggctccaccacccagctcctgggcttcctcgcgcttgccgtcaccctgaccgcgctcctggtcctggcgggcgtcacgctcacggccgcgctcgccgcgctggtcctcctcagcccgctcgtgctcctcaccctcccgctctgggcgcccgtagcggtggcggcgctgctgacgggggccgtctcgctgatcgcctgctgcgccggcgtggccgccgtcgccgcgggcacgtgggcgcaccgctacttcacggggcgccaccccgtcggcggcgcgcaccgggtggagtccgccgctgaccacgaccactacgcccgcgggggcacggtcgcggacgtggccagccgagtgagggggtactacgacgcctacgcgcgagagtacggcgggtacccgccgcgcccgcacgctcgggtcaaggacgccgcgcccggggcgtag

SEQ ID NO: 1826 - protein, 193 aa, Sorghum bicolor
MADRPPLGPRAAPPSPTAARRGHASASAERQQRSLLGRAVQTFHHVHGSTTQLLGFLALAVTLTALLVLAGVTLTAALAALVLLSPLVLLTLPLWAPVAVAALLTGAVSLIACCAGVAAVAAGTWAHRYFTGRHPVGGAHRVESAADHDHYARGGTVADVASRVRGYYDAYAREYGGYPPRPHARVKDAAPGA

SEQ ID NO: 1827 - DNA, 438 bp, Sorghum bicolor
atggcgacgcgcgaggagtgcagcatgtccgacttggagatcggcaagtacatcggtgagggcaaggtcggcacggtgtacctcgcccgggagaagcagagcgggtacgtggtggcgctgaaggtgatattttcaaggcgaagctggagaagtaccgcttccacgcgcacctgcggcgggagatcgagatccagcgcgacctcgtccaccccgatgtgctccgcctcttcggctcttcgcctggttccacgacgaagagaaagtcgtcctcgtcctcgagtacgcggcccgtggcgagctctacaaggtccttcgcgccgctggccacttcgacgagcacacggccgccacagtaataaccccgtttcccttttgcttcactgttatttcccggttgtgtacttgtgtctacggttggactgcagttcgtcctactaa

SEQ ID NO: 1828 - protein, 145 aa, Sorghum bicolor
MATREECSMSDLEIGKYIGEGKVGTVYLAREKQSGYVVALKVIFSRRSWRSTASTRTCGGRSRSSATSSTPMCSASSALRLVPRRRESRPRPRVRGPWRALQGPSRRWPLRRAHGRHSNNPVSLLLHCYFPVVYLCLRLDCSSSY

SEQ ID NO: 1829 - DNA, 1911 bp, Sorghum bicolor
atggagtcgcgcgccctcctgcacgcccggcccgccgccctccctccccgcgccggcctgcgcctccctctcccactcccgcgcccgcgggcagtctccctcacccccgccgccaagcccgcggcgctccagtccccgctcctcgcgtcgagaggccccttcctcccgcggcacgatgcggttctggggaatgggttcctgaagcggagagcggccagcgctggcggtgacgtgtccttccgcgcccaggcggcggcggcggtgccggcgccggcgccgcagccggaggagtccagtacaaagttcctcggcatcgacgtgaagacgctcaagaagatcgtgccgctggggctcatgttcttctgcatcctcttcaactacaccatcctgcgggacaccaaggacgtgctggtggtcaccgccaaggggagcagcgccgagatcatcccgttcctcaagacctgggtcaacctgcccatggccatcggattcatgctcctctacaccaagctctccaacgttctctcacgggaggcgctcttctacaccgtcatcttccccttcatcgccttcttcggcgccttcgccttcgtgctctacccgctcagggacgtcatccatcccaccgcgctcgcggacaagcttctcgccgcgctcggcccgagcttccttggccccgtcgcgatactgaggatttggagcttctgcttgttctatgttatggctgagctctggggcagcgtcgtcatctctgtgctcttctgggggtttgcgaatcagattaccacagttgatgaagcaaaggaattctacccgttatttggccttggggctaatattgcccttatcttttctgggcgtactgtgaagtatttctcaaatttgcgcaagacattgggtcctggaattgatggctgggaagtatctttgaaaggaatgatgagcatagtggtacttcttggactggtcataacttccatctattggggagtgaacaagtttgttttgaatgatccttcacttccaaagtctgatcgtaagaagaaaaaggaaaagcctaaacttggtatgaaagagagtctgaaggttctgctctcctcgaggtatgtgagggatctagccaccttagtggttgcttacggcattagtatcaatcttgtcgaagtcacatggaaatcaaaactcaaggcacagttccctagtccaaatgaatactcatctttcatgggtgatttctcgaccgcaactggaattgcaactttcacaatgatgctgttaggacgatatatactacgaaaatttggctggggtgtggctgcaatgatcacccccactgttctgttgctgactggtgccggattcttctctctgatcttgtttggacagccactgactcctatgcttgccacgatgggtatgacccctctactggcagccgtttatgtgggcgccatgcaaaacatatttagcaagagtgcaaagtacagtttatttgacccatgcaaggaaatggcttatattcctttggatgaagatatgaaggtaaaaggaaaagcggccattgatgttgtttgcaacccactgggcaaatccggtggtgcacttatccaacaattcatgatcctgacgtttggatccctggcaaattcaactccataccttggcggcatactgctggtcattgttctcgcgtggctaggcgcagcaaactcattggacaagcagttctcggccttggctaaggaagacctgaagaaggagaaggctgcccaagagaaagtagaaccctcgctacttaaggcgcctgcagaaggcactggtgatgtaccggtggagcagacaaatggatctgtgacgagccaagcaactggaacagagagctcaccgtcgaactcatcccccattcaatag

SEQ ID NO: 1830 - protein, 636 aa, Sorghum bicolor
MESRALLHARPAALPPRAGLRLPLPLPRPRAVSLTPAAKPAALQSPLLASRGPFLPRHDAVLGNGFLKRRAASAGGDVSFRAQAAAAVPAPAPQPEESSTKFLGIDVKTLKKIVPLGLMFFCILFNYTILRDTKDVLVVTAKGSSAEIIPFLKTWVNLPMAIGFMLLYTKLSNVLSREALFYTVIFPFIAFFGAFAFVLYPLRDVIHPTALADKLLAALGPSFLGPVAILRIWSFCLFYVMAELWGSVVISVLFWGFANQITTVDEAKEFYPLFGLGANIALIFSGRTVKYFSNLRKTLGPGIDGWEVSLKGMMSIVVLLGLVITSIYWGVNKFVLNDPSLPKSDRKKKKEKPKLGMKESLKVLLSSRYVRDLATLVVAYGISINLVEVTWKSKLKAQFPSPNEYSSFMGDFSTATGIATFTMMLLGRYILRKFGWGVAAMITPTVLLLTGAGFFSLILFGQPLTPMLATMGMTPLLAAVYVGAMQNIFSKSAKYSLFDPCKEMAYIPLDEDMKVKGKAAIDVVCNPLGKSGGALIQQFMILTFGSLANSTPYLGGILLVIVLAWLGAANSLDKQFSALAKEDLKKEKAAQEKVEPSLLKAPAEGTGDVPVEQTNGSVTSQATGTESSPSNSSPIQ

SEQ ID NO: 1831 - DNA, 1221 bp, Sorghum bicolor
atgatccatctcatggaagaccattcatcgtgggactacctaccagttgatcacattagaattcctgcattcaactctggagttgtttctgaagctagcaatggaggcaacgacttctcagtatcattggatgccgtcgttcctgatgatatcctggagaggattttcacattcttgcctatagcaagcatgatgagggcaacagcagtgtgcaagagatggcatggcattatctattcaagcagagttgtgtggacccacatgctgcctcaacggccatggtacttcatgttcacctctaatgaaactgctgctggttatgcttttgaccccatcctccgcaagtggtatgatttagagcttccttatattgacaagagcagctgttttgtctcttcttcttgtggcctagtttgcttcatggacaatgacaacaggaacaccatttctgtgtctaaccctataacaaaaagctgcaggaggcttttagagcctccgggtgaaacattgccagactacagtaccattgccatgaaggtggatcggctgtctcataagtactccgttacattggcaaaatctaagcagattcctgaagattttgtccgatgggacttttcagtatacaagtacgactcttcgagtggtacatgggcaacttctgtgagtgaagtgttcattggttggagaggaggtgatgatagtgtcatatgtgacggtgtcctgtactgcttgattcattccactggtgttcttggcaatgtcaacccccgtcatggccttatcatgtatgaccttgctggtgaaccatctgagacttcgttaatgcaaacgtcaatctcagtaccttgttctctcacatgtggccgtttggtaaacttaaaggagaagctggttttggttggtggaattgcaaaacacaacagacctgatatcattaaaggaataggaatatgggagctccatgagaaacagtggcatgaggtagctcggatgccccacaagttcttccaaggatttggtgaactcgatgatgttttcgcctgcagcggtatagatgaccttgtctacatacaaagctatggtgcaactgctttgcttgtttttgacatgatgcaaaagcaatggaagtggtccttgaaatgccctgtgagcaaaagatttcctctccagcttttcactggcttttgctttgaaccccggcttgatatcgcagcttag

SEQ ID NO: 1832 - protein, 406 aa, Sorghum bicolor
MIHLMEDHSSWDYLPVDHIRIPAFNSGVVSEASNGGNDFSVSLDAVVPDDILERIFTFLPIASMMRATAVCKRWHGIIYSSRVVWTHMLPQRPWYFMFTSNETAAGYAFDPILRKWYDLELPYIDKSSCFVSSSCGLVCFMDNDNRNTISVSNPITKSCRRLLEPPGETLPDYSTIAMKVDRLSHKYSVTLAKSKQIPEDFVRWDFSVYKYDSSSGTWATSVSEVFIGWRGGDDSVICDGVLYCLIHSTGVLGNVNPRHGLIMYDLAGEPSETSLMQTSISVPCSLTCGRLVNLKEKLVLVGGIAKHNRPDIIKGIGIWELHEKQWHEVARMPHKFFQGFGELDDVFACSGIDDLVYIQSYGATALLVFDMMQKQWKWSLKCPVSKRFPLQLFTGFCFEPRLDIAA

SEQ ID NO: 1833 - DNA, 1713 bp, Sorghum bicolor
atggacttcttcagtgaatacggtgatgctaacagatacaaaatccaagaggtcattggcaaaggaagttatggcgttgtttgctcagctattgaccaacataccggtgacaaggtggcaatcaagaaaatacacaatatcttcgagcacttatctgatgctgcccggatccttcgtgagatcaaactacttcggctattacgccatcctgatatagttgagatcaagcatataatgctgcctccatcaaggagggacttcaaagatatctatgttgtatttgagctgatggatacagacctccaccaagtcatcaaggcaaatgatgatttaaccagagagcatcatcagttctttctctatcagatgctccgtgcactgaaatacattcatactgctaatgtttatcatcgtgatttgaagccaaagaacatattggccaatgctaactgtaaacttaaaatatgtgattttggattggcaagagtggcgttcaatgacactcctacaacagtattctggacggattatgttgctacaagatggtatagggcccctgaactgtgtggatctttcttttctaagtattcaccagctattgacatatggagtatcggttgcatttttgcggagatcttaactgggaagcctttgtttcctggaaaaaatgtggtccaccagttggatttgatgaccgatctcttgggtactccatcacttgatacagtttccagaattcggaatgagaaggcaaggaggtatttgagtagcatgaggaaaaaacatccagtaccattttctgaaaggttccctaaagcagatcctgctgcactcaaacttttgcagaggcttttggcatttgatcccaaggataggccaactgctgaagaggcattggctgatccatattttaaaggcctcgcaaaagtagagagagaaccatcatgccagccaataacaaaaatggagtttgagtttgagcgaagaaaggtgaccaaagaggatgtcaaggaacttatattcagggagatattggagtatcatcctcaacttctcaaggattacatgaatggaactgagaaaacaaactttctataccctagtgctgttgacaatttccgaaggcaatttgctaacttggaggaaaatggaggaaagagtggggcacacacggcttcatcagacaggaagcatgtttcgctcccaaggacaaccacagttcattctaatccaatccctccaaatggaatctcccaagttcctcaaaagattcccacagctagaccaggaagagtggttggtccagtaataccatttgagaatgcaactgctgttgatccatacagccaacgtagggtggcgaggaatccagtacttcctccaaccaccacaaacctgtcagcatacgcctatcaccggaagtcagacaactcaaacagagagctccaacaggagctggaaaaggaccgtatgcagtaccagccagcacagcggttcatggatgccaaggtagtatcacagatgtcccctgacttgaggtcttcctactatataccaaaaggtgtcccgaaagctgatggcgcagatagagctgctttgcattctagcatgattcatggaatcgccccttttagtggcattgctgctgtaggaggtggaggtggctacaacaaggtcaatgcagttcaatatggagtttctaggatgtactag

SEQ ID NO: 1834 - protein, 570 aa, Sorghum bicolor
MDFFSEYGDANRYKIQEVIGKGSYGVVCSAIDQHTGDKVAIKKIHNIFEHLSDAARILREIKLLRLLRHPDIVEIKHIMLPPSRRDFKDIYVVFELMDTDLHQVIKANDDLTREHHQFFLYQMLRALKYIHTANVYHRDLKPKNILANANCKLKICDFGLARVAFNDTPTTVFWTDYVATRWYRAPELCGSFFSKYSPAIDIWSIGCIFAEILTGKPLFPGKNVVHQLDLMTDLLGTPSLDTVSRIRNEKARRYLSSMRKKHPVPFSERFPKADPAALKLLQRLLAFDPKDRPTAEEALADPYFKGLAKVEREPSCQPITKMEFEFERRKVTKEDVKELIFREILEYHPQLLKDYMNGTEKTNFLYPSAVDNFRRQFANLEENGGKSGAHTASSDRKHVSLPRTTTVHSNPIPPNGISQVPQKIPTARPGRVVGPVIPFENATAVDPYSQRRVARNPVLPPTTTNLSAYAYHRKSDNSNRELQQELEKDRMQYQPAQRFMDAKVVSQMSPDLRSSYYIPKGVPKADGADRAALHSSMIHGIAPFSGIAAVGGGGGYNKVNAVQYGVSRMY

SEQ ID NO: 1835 - DNA, 432 bp, Sorghum bicolor
atgccggatgaccggctatggttgattggtggcacagctgcagggacgttaggttactttcctgtaagaaatgatcacgcaggagcaataggttcagccgaagcaatccttgaaggaggccatacaggagttgttaggtccgtgtacccctctgcaggaatccatgagagccttgggcaaaacaggggcatctttggatggacaggaggcttgcagcttaatgccgtgggggtgcacctgcaccgaaaccaacggctgtgctgcgtgcgtgcgtgcgtgcgtggctcgcacgagctgggctggttgggccgtcggactcatacgcctttgcctacagacagaagacaggctgcaccagagattcgtgtccgcgtgatttcggatgattgggagcttatcaacgacgggtcggacgtcgggttcgcgaactaa

SEQ ID NO: 1836 - protein, 143 aa, Sorghum bicolor
MPDDRLWLIGGTAAGTLGYFPVRNDHAGAIGSAEAILEGGHTGVVRSVYPSAGIHESLGQNRGIFGWTGGLQLNAVGVHLHRNQRLCCVRACVRGSHELGWLGRRTHTPLPTDRRQAAPEIRVRVISDDWELINDGSDVGFAN

SEQ ID NO: 1837 - DNA, 2337 bp, Sorghum bicolor
atggctgcgctgctctatctcgcccttcttctactgctgacctttccggtttgctctggcgcttcgccatggcaaaccatgaccaccggctcgcacatacgaggagaggaccatgacaaggtcatcctcctctcgcctgatgctaccttctcctgcggcttccatgaggttggcacgaatgctctcaccttttccatctggtacaccacccatgccgccgagagaaccgtcgtctggacggcgaatccctattccgcagagagaggaggatactctccagtgaacaaatatggctccagggtatcgctaaaccgcgacggcaacctgatcctcacagataccaacggttccatggtgtgggagagcaagacatcgtcaggcaagcacacgacagtcaccctcctcaacagcggcaaccttgtgatcagtgactccagtaacaagatcatgtggcagagcttcgattcgccaactgacaccttgcttccggggcagaacctgacaaaggacacaaggttagtctctggttaccatcacttatacttcgacaacgataatgtcctgcggatgttgtatgacggcccagagatcacaagcatctactggccaagtccggattacgacgctcaaaaaaatggccgcaataggtttaacagcaccaggatagcagttctagatgacatgggtaatttcacatcaagtgacgggtttaagatagaggcttcagattcaggtccaggaatcaagagaaggatcacaattgattatgatggcaatttcagaatgtacagcttgaatgcatcaacagggaaatgggacatcacagggcaagctgtaatacagatgtgctatgtgcatggactatgtggaaagaatgggctctgtgactacttgggtggcctcagatgtagatgtcccccagattatgagatggttgatccaacaaattggaacaaaggatgcaaaccaatgttcttgactgatggaaaccaagcacgtgaggaatttacatttattgagcaacctcatgctgattactatggctttgatctatcctccaataagtccatcccatttgaagcatgccggaacatctgctggaacagcagcacctgcttatcattcacatacaagggtggggatggttggtgttacactaaagatttactctacaatggtcaggtgttcccatatttccctggggacaattatatgaaagtaccaatgagttttaacacttcgacgtactcaatctccaagcaaaaaaccctcacctgtggacccgcaggttctgagaatatgctaggaccagcaagtatgtacggaacaaagaaggacaacataaattggacatacttctatgtctttgctgcaatactgggagctctagagttgcttgttattgttacaggctggtaccttttcttcaagaagcataacatacccaaatcaatggaggatgggtacaagctagttacaaaccagttcaggcggtttacataccgagaattgagggaagcaactgggaagttcaaagaagagcttgggagaggaggtgctggaatcgtctacaggggagtgcttgaagataagaaaatagtggcagtaaagaagcttacagatgttcgacaaggagaagaagaattctgggcagaagtgacccttattggaagaatcaatcacataaacttagtcagaatgtggggattttgctcagaagggacaaagaggttattagtatatgagtatgtggagaatgagtcactggataagtacctctttggtgagagaagtactgaaagcttgcttggttggagccaaagatacaagattgcactgggcacagcaagagaaaacatacttctaactcgagatttcgaagccaagatagcagactttggattggccaagctcgcaaagcaaggtagcactagtttcaatttcacccatatgagaggtacgatgggctacatggcaccagaatgggcattgaatatgccaatcaatgcaaaggttgatgtgtacagctatggggtagtgcttctggagattgtgactggaatcagggcttcaagtggcataatgttagatgaaagacaaatagattttctggagtttgtccaggaggctaaacagattctatctaccgggaatgtcagtgatattgttgatgatagattgcacggacactttcatacagagcaagcaattgcaatggtgaaaatagccttttcatgcctcgaagaaagacgcaagaggccgacgatggatgaaattgtcaaggtgctcatgtcatgtgatgatgaagacgactaccatcctgcttattcatattga

SEQ ID NO: 1838 - protein, 778 aa, Sorghum bicolor
MAALLYLALLLLLTFPVCSGASPWQTMTTGSHIRGEDHDKVILLSPDATFSCGFHEVGTNALTFSIWYTTHAAERTVVWTANPYSAERGGYSPVNKYGSRVSLNRDGNLILTDTNGSMVWESKTSSGKHTTVTLLNSGNLVISDSSNKIMWQSFDSPTDTLLPGQNLTKDTRLVSGYHHLYFDNDNVLRMLYDGPEITSIYWPSPDYDAQKNGRNRFNSTRIAVLDDMGNFTSSDGFKIEASDSGPGIKRRITIDYDGNFRMYSLNASTGKWDITGQAVIQMCYVHGLCGKNGLCDYLGGLRCRCPPDYEMVDPTNWNKGCKPMFLTDGNQAREEFTFIEQPHADYYGFDLSSNKSIPFEACRNICWNSSTCLSFTYKGGDGWCYTKDLLYNGQVFPYFPGDNYMKVPMSFNTSTYSISKQKTLTCGPAGSENMLGPASMYGTKKDNINWTYFYVFAAILGALELLVIVTGWYLFFKKHNIPKSMEDGYKLVTNQFRRFTYRELREATGKFKEELGRGGAGIVYRGVLEDKKIVAVKKLTDVRQGEEEFWAEVTLIGRINHINLVRMWGFCSEGTKRLLVYEYVENESLDKYLFGERSTESLLGWSQRYKIALGTARENILLTRDFEAKIADFGLAKLAKQGSTSFNFTHMRGTMGYMAPEWALNMPINAKVDVYSYGVVLLEIVTGIRASSGIMLDERQIDFLEFVQEAKQILSTGNVSDIVDDRLHGHFHTEQAIAMVKIAFSCLEERRKRPTMDEIVKVLMSCDDEDDYHPAYSY

SEQ ID NO: 1839 - DNA, 6492 bp, Sorghum bicolor; identical to SEQ ID NO: 423

SEQ ID NO: 1840 - protein, 2163 aa, Sorghum bicolor; identical to SEQ ID NO: 424

SEQ ID NO: 1841 - DNA, 750 bp, Sorghum bicolor; identical to SEQ ID NO: 401

SEQ ID NO: 1842 - protein, 249 aa, Sorghum bicolor; identical to SEQ ID NO: 402

SEQ ID NO: 1843 - DNA, 1692 bp, Sorghum bicolor
atggcggcgctgcagagctggcgcaaggcgtacggcgcgctcaaggacaccaccaccgtcagcctcgccaacctcaactccgacttcaaggatctggatgtcgcgatcgtgagggccaccaaccacgtggagagcccgcccaaggagcgccacctgcgcaagattgtggcggcgacgtccatcgcgaggccacgggcggacgtcgcctactgcatccatgcgcttgcccggcgactcgccaaaaccaggaactggattgttgccctgaagacacttgtagtgatccataggcttcttcgggaaggtgatcctgcattccgcgaagagtttcttacatttactcagagagtgcaaattttgcagttatcaaacttcaaggatgattccagcccaattgcttgggattgttcttcatgggttcgcacatacggtttatttttggaggaaaaactagaatgcttcagggtcttgaagtatgacattgaagctgagcgtttatcaaagcaaggtcaaggacctgaaaagggccacagtagaaccagggaattgaattctcaggacttgctggagcaattgccagcactgcagcaattattatatcgacttattggttgtcgggcagaaggagctgcaaataacaattatctggtgcagtatgctctagcccaggttcttaaagaaagcttcaaaatttattgtgcaataaatgatggaattatcaaccttgttgacaagttctttgagatgccaaagcatgaagcactaaaagcccttgacatttacaggagggctggccagcaggctggaaacctatctgacttctatgaaagttgtcgaggtttagagctcgcaagaaatttccagtttcccactttgagggagccaccacaaacattcctttcaaccatggaggagtatgtgaaggaggctccacgtatgatgccagttatagagccactggagcttcctgagcagcttcttctgacatacaaaccagaagaagaagaagaagaagaagttcgtgagtctgttcctattgcagaggagaaactgcaagttgttgaagaacctgctccagttccttcctcccaaatagcttcgcctcccaggcctgagattgcagatactggtgatttactggggttaggtgattcaacccatactgtgtcggcaatagaggagagcaacgcattggccttggcaattcttccgacaggtgttgataattcaacaactacacagcaagatagaggatttgatccaacaggatgggaacttgctcttgttactacaagcagcaacatgactccactgtctatggagagtaatttgggtggtggatttgacaagctcacattggacagcctatacgatgatggaacctacaggcagatgcagcaacaacagctatacggctcagcccctcccaatcccttcatggcaagcgatcccttcgccgtgtcaaatcaagtagctcccccaccgtcagttcaaatggcagccatggctccacagccccagcatttgcccatgatgattgaagcaaatcccttcggaccaccacagcagcatcacgcgggcatggctcctgcagcaaaccccttcctcgatgctgggttcggtgcgttcccggcaggaaatggaatgcatccacagaccaaccccttcggaggcgccgcacaacttctctag

SEQ ID NO: 1844 - protein, 563 aa, Sorghum bicolor
MAALQSWRKAYGALKDTTTVSLANLNSDFKDLDVAIVRATNHVESPPKERHLRKIVAATSIARPRADVAYCIHALARRLAKTRNWIVALKTLVVIHRLLREGDPAFREEFLTFTQRVQILQLSNFKDDSSPIAWDCSSWVRTYGLFLEEKLECFRVLKYDIEAERLSKQGQGPEKGHSRTRELNSQDLLEQLPALQQLLYRLIGCRAEGAANNNYLVQYALAQVLKESFKIYCAINDGIINLVDKFFEMPKHEALKALDIYRRAGQQAGNLSDFYESCRGLELARNFQFPTLREPPQTFLSTMEEYVKEAPRMMPVIEPLELPEQLLLTYKPEEEEEEEVRESVPIAEEKLQVVEEPAPVPSSQIASPPRPEIADTGDLLGLGDSTHTVSAIEESNALALAILPTGVDNSTTTQQDRGFDPTGWELALVTTSSNMTPLSMESNLGGGFDKLTLDSLYDDGTYRQMQQQQLYGSAPPNPFMASDPFAVSNQVAPPPSVQMAAMAPQPQHLPMMIEANPFGPPQQHHAGMAPAANPFLDAGFGAFPAGNGMHPQTNPFGGAAQLL

SEQ ID NO: 1845 - DNA, 1500 bp, Sorghum bicolor
atggccgccgccgccgccgccgctgtgaatgggagcctagacgtgcatgagaggaaggcgcagaggagctactgggaggagcactctggggagctcaccctcgaggccatgatgcttgactcccgagccgccgaactcgacaaggaggagcgccccgaggttctgtctttacttccttcttatgaaggaaaatctgtactggaactgggagccggaataggtcgctttactggtgaactggctaagacatctgggcatgtttttgcagtggatttcattgaaagtgccattaaaaagaatgaaagtacaaatggtcactacgacaacacatcatttatgtgtgctgatgttacatccccgaacctgatgattgaagcaaactccattgatctgatattttcaaactggttgctgatgtatctttcagatgaggagattgacaagttggtagaaagaatggtaaaatggctgaaggtcggtggctatatcttctttagggaatcttgcttccatcaatctggagatttagaaaggaaagttaacccgacacactatcgagaaccaaggttttataccaaagtatttaaagagtgccaaacctttaatcaggatggcacttccttcaaactttctctggttactttcaaatgcattggagcttatgtaaacatcaagaaagatcaaaaccagatatgttggttatggcaaaaagtaaattcattagaagatgggggatttcaaagttttttagacaatgtgcagtacaaagccactggaatattgcgctatgaacgtatctttggagatggttacgtgagcactggtggagttgagactacaaaagaatttgtggataaactggatcttaagcctggacagaaggtgcttgatgttggttgtggaattgggggaggtgatttttacatggctgagaagtatggtacccatgttgttggtattgacctttccattaacatgatattgtttgcccttgagcgttccattgggcgtaagtgctcagttgagtttgaagtcgctgattgcaccactaagacgtacccagaccacatgtttgatgtcatctacagccgtgacactatccttcatatacaagataaaccctccttgttcaaaagtttcttcaaatggctaaaacctgggggaaaggtcctaatcagtgactactgcaagagtcctgggaaaccatcagaagagtttgcagcatacattaagcagaggggttatgatctccatgatgtagaggcttatggacagatgctcaagaatgctggtttcagtcatgtcattgctgaagaccgaactgaccagttcctcagtgttttacagaaggagctagataaatttgagaagaacaaagatgatttcctgtccgagtttgcccagggggattacgatgatatcgtgaatggatggaaagcaaaactgcagaggacctctgctcgtgagcagaggtgggggctgttcgtcgccaccaagtga

SEQ ID NO: 1846 - protein, 499 aa, Sorghum bicolor
MAAAAAAAVNGSLDVHERKAQRSYWEEHSGELTLEAMMLDSRAAELDKEERPEVLSLLPSYEGKSVLELGAGIGRFTGELAKTSGHVFAVDFIESAIKKNESTNGHYDNTSFMCADVTSPNLMIEANSIDLIFSNWLLMYLSDEEIDKLVERMVKWLKVGGYIFFRESCFHQSGDLERKVNPTHYREPRFYTKVFKECQTFNQDGTSFKLSLVTFKCIGAYVNIKKDQNQICWLWQKVNSLEDGGFQSFLDNVQYKATGILRYERIFGDGYVSTGGVETTKEFVDKLDLKPGQKVLDVGCGIGGGDFYMAEKYGTHVVGIDLSINMILFALERSIGRKCSVEFEVADCTTKTYPDHMFDVIYSRDTILHIQDKPSLFKSFFKWLKPGGKVLISDYCKSPGKPSEEFAAYIKQRGYDLHDVEAYGQMLKNAGFSHVIAEDRTDQFLSVLQKELDKFEKNKDDFLSEFAQGDYDDIVNGWKAKLQRTSAREQRWGLFVATK

SEQ ID NO: 1847 - DNA, 3714 bp, Sorghum bicolor
atgttcaggtacgccgaccgcaccgacgccgcgctcatggcggtcggcacggtggcggcggtggccaacggcatgacggagccgctcatgaccgtcgtcttcgccgccgtcatcgagtgcttcggcgccggcgacgacgccaccatcctccaccgggtcagcaaggttatcatgtactacatctacctgggaatcggaacagcagtttcttcctttctccaggtgtcatgctggacggtggctggagaaaggcagtcaacacggctgcgatcattataccttgaagctgttctgaggcaagacattgcattctttgacgtggagatgacaactgcagaagcagcttcaagaatgtctgcggacactgtacttatccaagacgccctcggtgagaaggtagggaagtacatacagcttttgacgactttcatcggtggctttatcattggattcattagaggctggatgctggcccttgttgtgcttgcgtgcatacctccaagcattttatcctttgcaacagtctcccgactgcgagctcaaatatctcaaaagaggcaagaatcatatgaagatgcagggaatattgtcgagcaaaccattggagcaataagaacagttgtatctttcaatggtgagaagaaagcaattgcaatgtacaataatcacataaaaaaggcatacaaggctactctcatggaagggattgtcactggtcttggagtaggttgcatattttttgttgtcttctgcaattactctctagctttctggtatggcgccaagctaatcatcggcaaaggatatactggagggcaggtcctcaatatcgtatttgcaattttaactggctcagtggctataggtaatgcatcaccatctatttctgcaattgcagaagggcagtctgcagcacaaagattgtttgaaattatcaacagaaaaccagatattgacattaccgacacttctggaatagtattagaagatattgagggagatgttgagctcaaggatgtgttctttaggtaccctgcaaggcctgagcatttgatacttgatggcctgtgcctgcacgtacctaatggcaccacaatggctatagtcggggagagcggaagtggtaaatcaacaataattagtctggtggagagattttatgatccacaggctggtgaagtgttggtagatggtgtgaacatcaaaagcctgcagctccaatggttaagaggaaagataagtcttgtcagccaagaaccattgctttttatgacctccatcaaggataacataacctatggtaaagcggatgctacaatcgaagagatcaagagagcagctgagcttgcaaatgcagcaaccttcattgaaaagctgcctgatgcatacgagacaatggttggtcaacgtggttctcagctttctggggggcaaaagcaaaggattgccatcgcaagagcaatcctcaaaaatccaaaaatccttcttttggacgaagctacaagtgctttagatgtagagtctgaaagggtagttcaagaagcactaaataggatcatggtagggagaactacactcattgttgcccaccgcctgagcaccatcaggagtgcagactgcatagcagtagttcatcaagggaaagtagttgaacgaggtgtccatgacaagctgattaaggatcctgatggagcttatcctcagcttattaggttacaacaggcacatgctaaagaaaggcatgaggttccaaatactgatatgtcaggttcaatatataaaagtagaagtttatctttggagcaatcaatagacagagattctcccaggaacaaaggacatcactgctccacaaaatccactgggctgtctgaagaattgaacaaacaagtttttatagacagacaggaacaccaggaatctagtgatagtaaggctcctaagaaagcaccaattggacgactattcaaacttaataagccagaagcaccagttctcctatttgctgctatagctgcctttgtgcatggtcttatgttcccatcgttcagtataatgatgtctggtggtataagaagtttctactatccaccacaccaacttcgaaaagattctcggttttgggcattgatgtgccttctgttcgcagtcattgccctgatttcaatccaactggaatactttctatttgggatcgctggtgggaaacttatacaacgtgtccgctctttgtctttccagagtatagtgcatcaagaggttgcttggtttgatgacccttcaaattctagtggggcacttggcgcgagactccatattgatgctttgaacatccgacgcctcgtcggagataacttggccatactagtgcagtgtatagtaacactaatagctggcttttccatagcatttgcttctgactggaagctcacgctgatcgtcatatgtgtgattcctgtaatgggctcacaaaattatattcaagtgaaattcttgaaagggttcagtgaagatgctaaggtgaaaatattgaatttcatggtgatgtatgaagatgcaagtcaagtcgtaactgaggcaattagtagcattcgaactgtagcatctttctgtgcagagaagagggtaattacatcatacattgaaaaatgccaagcttcaatgaaacagggcattagaagtggaatggttggaggccttggtttcagtttctcaaacttaatgatgtatctcacatatgctctttgtttctatgttggtgcactgttcgtacatgaaggaaaatcaacttttaaagacgtttttagggtctattttgctttgattttcacagcttttggaatttctcaaacaagtgcaatggcaacagactcaacaaaagcccaggaatccacaacttccatactagctattatagacaggaggtctaaaatcaactcaactagtgatgaaggcgtaattctagaaaaagttgatggaaacatagatttcagccatgtaagctttaaatacccatcacggccagacgtccaagtgctcagtgacttcactttggccattccagccagaaagactgttgcacttgttggagagagtggtagtggtaagtcaacaataattgctttgctcgagcgattctatgacccagattctggcacagtctcactagatggaacagaacttaaaaaactaaagctgagttggttaagagaccaaatggggttagtgagccaagaacctgtacttttcaacgacacaattcacgccaacatagcatatggaaaacaaggagaagtaagagaggacgagattgttgctgcagccaaggcagccaatgctcatgagttcatatctagcttgcctcagggatatagcactattgtcggcgaaagaggaacacagctctctggagggcaaaaacaacgggttgctattgcaagggccatcttgaaggacccaaaaatacttctactcgacgaggcaacaagtgccctggatgctgaagctgagcgtactgttcaagatgcgttagaccaagtgatggtcagcaggaccaccattgttgtggcgcaccgactgtccacaatcaaaggggcagatatgattgtagtcatcaaagatggtaaagttgccgagaagggaaagcatgaatacctcgtgggcaagggtggagtttatgcatcgctggtagaactgcactcgaagtcagcataa

SEQ ID NO: 1848 - protein, 1237 aa, Sorghum bicolor
MFRYADRTDAALMAVGTVAAVANGMTEPLMTVVFAAVIECFGAGDDATILHRVSKVIMYYIYLGIGTAVSSFLQVSCWTVAGERQSTRLRSLYLEAVLRQDIAFFDVEMTTAEAASRMSADTVLIQDALGEKVGKYIQLLTTFIGGFIIGFIRGWMLALVVLACIPPSILSFATVSRLRAQISQKRQESYEDAGNIVEQTIGAIRTVVSFNGEKKAIAMYNNHIKKAYKATLMEGIVTGLGVGCIFFVVFCNYSLAFWYGAKLIIGKGYTGGQVLNIVFAILTGSVAIGNASPSISAIAEGQSAAQRLFEIINRKPDIDITDTSGIVLEDIEGDVELKDVFFRYPARPEHLILDGLCLHVPNGTTMAIVGESGSGKSTIISLVERFYDPQAGEVLVDGVNIKSLQLQWLRGKISLVSQEPLLFMTSIKDNITYGKADATIEEIKRAAELANAATFIEKLPDAYETMVGQRGSQLSGGQKQRIAIARAILKNPKILLLDEATSALDVESERVVQEALNRIMVGRTTLIVAHRLSTIRSADCIAVVHQGKVVERGVHDKLIKDPDGAYPQLIRLQQAHAKERHEVPNTDMSGSIYKSRSLSLEQSIDRDSPRNKGHHCSTKSTGLSEELNKQVFIDRQEHQESSDSKAPKKAPIGRLFKLNKPEAPVLLFAAIAAFVHGLMFPSFSIMMSGGIRSFYYPPHQLRKDSRFWALMCLLFAVIALISIQLEYFLFGIAGGKLIQRVRSLSFQSIVHQEVAWFDDPSNSSGALGARLHIDALNIRRLVGDNLAILVQCIVTLIAGFSIAFASDWKLTLIVICVIPVMGSQNYIQVKFLKGFSEDAKVKILNFMVMYEDASQVVTEAISSIRTVASFCAEKRVITSYIEKCQASMKQGIRSGMVGGLGFSFSNLMMYLTYALCFYVGALFVHEGKSTFKDVFRVYFALIFTAFGISQTSAMATDSTKAQESTTSILAIIDRRSKINSTSDEGVILEKVDGNIDFSHVSFKYPSRPDVQVLSDFTLAIPARKTVALVGESGSGKSTIIALLERFYDPDSGTVSLDGTELKKLKLSWLRDQMGLVSQEPVLFNDTIHANIAYGKQGEVREDEIVAAAKAANAHEFISSLPQGYSTIVGERGTQLSGGQKQRVAIARAILKDPKILLLDEATSALDAEAERTVQDALDQVMVSRTTIVVAHRLSTIKGADMIVVIKDGKVAEKGKHEYLVGKGGVYASLVELHSKSA

SEQ ID NO: 1849 - DNA, 1017 bp, Sorghum bicolor
tcagaggttgtgttcgggcctggggcacagcttgatggaccggaaccgagcgcggctgcgatggacgacatcttggaccgcgtcaccaacatggacattgatgagacagcccgtgacagcactgctcagggcactggaggtcctgcgaacgacggcaaggtagcccaagtcgagaaggacatgtatgaggtgttgtctgtaccaggggagccaactggcatgttcagggcgaccccgacaccgctactccagcggccggacctgtcggcaccgatcaactcccgcaccaagaagaagctcgtggccccgacccgctcaagtgcgcgtcaggcagcccgcccatctgcggtcccagttgctgagcgcgccaagctgaagctcatgcgcgagctggaattcgtcagcgacaatagggcgccggcaccagatgcagctgtcacggcgtacgctcagctgtatggccatggcctccctgatgcagcagtcaaggtcctccgtgcggcaacgaagatggggaacaaggaactgaccaaggtgttggaagccattgagacgaagctggacagtgttgacagattcctagcactagaatttctgggtcagcaatgtatgcaatttgagtacttacctgctgagcatacaagggggggagtcctggtagcatggaactgggatctgatatgtgccggggtgacctcaaagaagagattcagtttgtcagtgaacttgacaatgagaatgacaaatgcttctttcttgcttacatcagtatatggaccgaatgaggacaatctgaaacttcagttcttggatgagctgattgactgtcagccagttcataggatgccatgggtgtgcatgggtctattccgccgaagaacgatgggtctattccgccgaagaacgatgggtctattccgccgggccctagacgcaagcgagttatttgagctcagattgcaaaatagaaggtatacatggagtcggtcgagtattgccaaccctcgtccatcttga

SEQ ID NO: 1850 - protein, 338 aa, Sorghum bicolor
SEVVFGPGAQLDGPEPSAAAMDDILDRVTNMDIDETARDSTAQGTGGPANDGKVAQVEKDMYEVLSVPGEPTGMFRATPTPLLQRPDLSAPINSRTKKKLVAPTRSSARQAARPSAVPVAERAKLKLMRELEFVSDNRAPAPDAAVTAYAQLYGHGLPDAAVKVLRAATKMGNKELTKVLEAIETKLDSVDRFLALEFLGQQCMQFEYLPAEHTRGGVLVAWNWDLICAGVTSKKRFSLSVNLTMRMTNASFLLTSVYGPNEDNLKLQFLDELIDCQPVHRMPWVCMGLFRRRTMGLFRRRTMGLFRRALDASELFELRLQNRRYTWSRSSIANPRPS

SEQ ID NO: 1851 - DNA, 1638 bp, Sorghum bicolor
atggagatgggcacggttctgggtgccatggaggagtacaccttcaccttcctggccatggccgtggggttcctagtgcttgtgtatctgtacgagccgtactggaaggtgcgccacgtgcccgggcccgtgccgctgccgctcatcggccacctccacctgctggcgaagcacggcccagacgtcttccctgtgctcgccaagaagcacgggcctatcttcagatttcacgtgggaaggcagccattgatcatcgtggccgacgcagagctctgcaaggaggtgggcatcaagaagttcaagagcatgcctaaccggagcttgccttcgcccatcgccaattctcccatacatcggaaaggcctcttcgctacaagggattcgaggtggtcggcgatgcgaaacgttatcgtctcgatctaccagccgtcgcacctcgccgggctgatgccgaccatggagtcgtgcatcgagcgcgctgcgacgacgaacctcggcgatggcgaggaggtcgtcttctccaagctggcgctgagcctcgccaccgacatcatcgggcaagcggcgttcggcacagactttggcctctcgggaaagccggtggtgcctgacgatgacatgaagggtgtcgacgtcgtcgtcggagatgcagcgaaggcgaaggcgtcatcatcggaattcataaacatgcacatccactcgaccacgtcgctcaagatggacctgtcggggtcgctctccaccatcgttggcgcgctcgtgcccttcctgcagaatccgctgcggcaggtgctcttgagggtccccggctccgccgaccgggagatcaaccgtgtgaacggcgagctccgtaggatggtggacggcatcgtcgccgcccgcgcagcggagagggagcgtgcgccggcggcgacagcagcacagcagcacaaggacttcctctccgtggtgctggcggcgagggagagcgacgcgtccacgcgggagctgctctcgccggactacttgagcgcgttgacctacgagcacctcatcgctgggccggcgaccgcggcgttcacgctgtcctccgtggtctacctcgtcgccaagcacccggaagtggaggagaagctgcttagggagatggacgcgttcggccctcgcggcagtgtgcccacggcggatgatcttcagaccaagttcccctacctcgatcaggtggtgaaggagtcgatgaggctgttcatggtgtcgccattggtggcgcgagagacctccgagcgagtggagatcggtggctatgtgcttccaaagggcgcatgggtgtggatggcaccaggggtcctcgccaaggacgcccacaacttcccggacccggagctgttccgaccagagcggttcgacccagccggcgacgagcaaaagaagcgtcacccatacgcgttcatcccttttggaatcggccccagggtttgcatcggccagaagttcgccatccaggagatcaagctcgcgataatccacctctatcagcactatgtgttccggcattctcccagcatggagtcccctctagagtttcagtttgggattgtggtcaacttcaagcatggtgtcaagcttcacgtcatcaagaggcatgtggaaaataattaa

SEQ ID NO: 1852 - protein, 545 aa, Sorghum bicolor
MEMGTVLGAMEEYTFTFLAMAVGFLVLVYLYEPYWKVRHVPGPVPLPLIGHLHLLAKHGPDVFPVLAKKHGPIFRFHVGRQPLIIVADAELCKEVGIKKFKSMPNRSLPSPIANSPIHRKGLFATRDSRWSAMRNVIVSIYQPSHLAGLMPTMESCIERAATTNLGDGEEVVFSKLALSLATDIIGQAAFGTDFGLSGKPVVPDDDMKGVDVVVGDAAKAKASSSEFINMHIHSTTSLKMDLSGSLSTIVGALVPFLQNPLRQVLLRVPGSADREINRVNGELRRMVDGIVAARAAERERAPAATAAQQHKDFLSVVLAARESDASTRELLSPDYLSALTYEHLIAGPATAAFTLSSVVYLVAKHPEVEEKLLREMDAFGPRGSVPTADDLQTKFPYLDQVVKESMRLFMVSPLVARETSERVEIGGYVLPKGAWVWMAPGVLAKDAHNFPDPELFRPERFDPAGDEQKKRHPYAFIPFGIGPRVCIGQKFAIQEIKLAIIHLYQHYVFRHSPSMESPLEFQFGIVVNFKHGVKLHVIKRHVENN

SEQ ID NO: 1853 - DNA, 1731 bp, Sorghum bicolor
ggtgcaggtcatgagggtcatgcacacagtgacggaaagagagagtgcaattctgatgaagagaactcggaaggagaaagaaagcccaaaaagggctctctcaagaagagagcagctactgcagggtataagtttaggcattccttaaggagaaagagtaaaaccaaggatgataaccatgtagcctcaatagaagacatcagagatgttcaagagctggagactgttgaaaggttccgccagtgtttacttgacgagggcctgttgccagaacatcacgatgattatcacacgatgttgaggttcctgaaagcaaggaaatttaatattgacaaagcaaagcatatgtggtcagagatgcttagatggaggaaggaatttggtgctgacaatatagaggaatttgactacaccgaattagatgaagttgtgaagtactatccgcagttttatcatggtgtggacaaagagggaaggcctgtttacatagaactaattgggaaagttgataccaacaaactagtgcaaatcacaactattgaccgctatgtaaaatatcatgtcaaggagtttgagagatgtctccagatgaggtttccagcttgttctattgctgcgaaaaggcacatagactcatctactacgatattggatgtgaaaggcgtgggcctaaagaacttctcgaaagatgcaagagagctaattatgcggttgcagaagatcaacaatgacaactatccagaaaccttataccgactttacatcataaatgctggccaaggcttcaagatgttatggggtacaataaaatcatttcttgatccagaaactgcttcaaaaattcatgtcctcggaaacaagtaccaaactaaattacttgaaataattgatggcagtgaactcccagaatttcttggtggcaagtgcaggtgtgaagaatatggaggttgtccgaaatcagataaaggcccttggaaggaccctgaaattgtcaagagagttatcaatggtgaggcaaactatggtcggcatgttcttgctgtatcaagcataaatcagaaggaagttggttgtactgaacactcaactgagcaggaaaaaggcaatgatgcctctgccgaatctatttctgaggtggaagatgtttcttctccaacagctttagtggatcctataagccctaatttgacccatgtggatgagtcaaaatttccaggacgtgcttcctcatctgatgcccctcccattacaggggatagcatccctgctgttgacaaggtcgtggatgcatgctccaatccaagaaacagctcgacgccttccagctcaggttctttctccttgagaaatataccggcaacattgggaggacttaaaactcgaattgtcgcatggtcaacaatcttagtcctgagcttgttggcattcctccgttctgtcctgagcatagtgaccaaaaggctctcaaaccaggccatcacccttacatctgtattgacacggcttggtgaattggaggagaagatacagacacttgaagcaaagccaccccaagtgccatttgaaaaggaggaattgttacgtacttctgtttaccgcgtggatgtgttggaagctgaactaatttctatgaagaaggtcttgtatgagacattgattcggcaggatgagctgcttgcatatattgaccaacaacagacagcaaaattttgtcggcggaagttctgcttc

SEQ ID NO: 1854 - protein, 577 aa, Sorghum bicolor
GAGHEGHAHSDGKRECNSDEENSEGERKPKKGSLKKRAATAGYKFRHSLRRKSKTKDDNHVASIEDIRDVQELETVERFRQCLLDEGLLPEHHDDYHTMLRFLKARKFNIDKAKHMWSEMLRWRKEFGADNIEEFDYTELDEVVKYYPQFYHGVDKEGRPVYIELIGKVDTNKLVQITTIDRYVKYHVKEFERCLQMRFPACSIAAKRHIDSSTTILDVKGVGLKNFSKDARELIMRLQKINNDNYPETLYRLYIINAGQGFKMLWGTIKSFLDPETASKIHVLGNKYQTKLLEIIDGSELPEFLGGKCRCEEYGGCPKSDKGPWKDPEIVKRVINGEANYGRHVLAVSSINQKEVGCTEHSTEQEKGNDASAESISEVEDVSSPTALVDPISPNLTHVDESKFPGRASSSDAPPITGDSIPAVDKVVDACSNPRNSSTPSSSGSFSLRNIPATLGGLKTRIVAWSTILVLSLLAFLRSVLSIVTKRLSNQAITLTSVLTRLGELEEKIQTLEAKPPQVPFEKEELLRTSVYRVDVLEAELISMKKVLYETLIRQDELLAYIDQQQTAKFCRRKFCF

SEQ ID NO: 1855 - DNA, 282 bp, Sorghum bicolor
atgccggtcggcgagaagacggccgaggcaacggccaaggacggcggcagccagccgaagccaccgtcccgcggtagcgcccgcttcgagcgcctcctttccgggctgggcgctggtccgctcgtggacgtcgagcccgacaaggtcaaggacgacatccggcgatgggctaagaaggtggcggcgctggtgcgccagctcagcttcggcgcctggccggagaagagcgacggctcgtcggagcaccgcggcgcaggcgatgatggatccgccgccaactga

SEQ ID NO: 1856 - protein, 93 aa, Sorghum bicolor
MPVGEKTAEATAKDGGSQPKPPSRGSARFERLLSGLGAGPLVDVEPDKVKDDIRRWAKKVAALVRQLSFGAWPEKSDGSSEHRGAGDDGSAAN

SEQ ID NO: 1857 - DNA, 1314 bp, Sorghum bicolor
atgggggcgtcgggcaagtggatccggacgctggtggggctccggccggcagcagagagggagaggcccggcgccgccgggaaggggcggaagtggagccggctgtggcggagctcgtcctcgcagcgggggagcagcgcgccgccgtcggaggcgccgtccgaggcgtcgtccactgtcgacgcgctcagcagctctgtcgtcgcggccgtcgtgcgcgcgcagcccagggatttccgcgtcatcaggcaggagtgggctgccgtccgcatccagtccgccttccgcgcattcctggctcggagggcgttgagggcactgcgaggcatcgtgcggctgcaggcgctggtgcgtggccgccgcgtgcgcaagcagctcgccgtcacgctcaagtgcatgaacgcgctcgtcagggtccaggagcgcgcgcgggaccgccgcttccggatctctacggacggccgccactcagaggacatcctcgacgaccgaagcggccatgctgaccctgtcaaggaagcagagacaggatggtgtgatagtcaaggtactgtggatgacttaagatcaaagatacaaatgaggcatgagggtgcggtaaagagagaaagagcaattgcttatgctctttcccaccagcgaagttcaagccacagtggaagacctagctctcctgctgtttctctcaggaatcatgggactagcagaagcaatcataattggagctatttggatgggtcgatggcaccgaaaccttgggagagccgccttatggagcaaacccacactgaatactccaacaattcacggtgttcagaaagcattgatgagatgaatgcagtcagctcaaaactttcagatgcaagctcagtcaaaatcagaagaaacaatataacaacaagggtggcagctaggcctccttccacaatctcagcttcttcatcagattttgtgtgtgatgccagctctccttcaacttcctctgtcactccagtgtctggcaccagtttcctaacatcagagagaagatctgattatggtcatggaggtgggccgaactacatgaactggactaaatcagcaaaagcaaggttgaacggttctagcacacataagttcccgcttcaaaggcaacgatcttctgacctgcaccacattagcaggacggcgttatcttcggtagatgttcaaagcactgctggatcggaggtttcagttacttctaagaggttgaacggtttgactctaaaaggtcgaggcgctagaagaagtttggacaagaagaatgatgaccggcctgttgccatgttttaa

SEQ ID NO: 1858 - protein, 437 aa, Sorghum bicolor
MGASGKWIRTLVGLRPAAERERPGAAGKGRKWSRLWRSSSSQRGSSAPPSEAPSEASSTVDALSSSVVAAVVRAQPRDFRVIRQEWAAVRIQSAFRAFLARRALRALRGIVRLQALVRGRRVRKQLAVTLKCMNALVRVQERARDRRFRISTDGRHSEDILDDRSGHADPVKEAETGWCDSQGTVDDLRSKIQMRHEGAVKRERAIAYALSHQRSSSHSGRPSSPAVSLRNHGTSRSNHNWSYLDGSMAPKPWESRLMEQTHTEYSNNSRCSESIDEMNAVSSKLSDASSVKIRRNNITTRVAARPPSTISASSSDFVCDASSPSTSSVTPVSGTSFLTSERRSDYGHGGGPNYMNWTKSAKARLNGSSTHKFPLQRQRSSDLHHISRTALSSVDVQSTAGSEVSVTSKRLNGLTLKGRGARRSLDKKNDDRPVAMF

SEQ ID NO: 1859 - DNA, 1035 bp, Sorghum bicolor
atggcactcggtggcctcgcgtcgcgctactccctcaccgacccaccgggcaccggcaccggcaccggcaccgcgccacggccgcgttcgtctcgacaggagccgatggccaccatcgcgccacggtcgcatctcctcctcctcggcctgacaaggccgcagcagccgacagcgcttcgtgcctgcgccgccttctcccgctcgcgcggcgcgccagtcccaccgcgggccgcgcagccgcggcgcgtcttcctcggcctcggcgccaccttcatcgaccaggtcacccgcatggcctccggcggcacctcgtcccgctctttcgttgccggagcgcggccgaggcagggggtttccccagtcgagcagattctgaagaatgtggagtggcccgacgagttccctttcaagcctgaggacttcagccgtttcgacgaatcatcagatactctgttctactcagttccacgttttgtcactcacattgatgaccaagcaatccgagctctcacagagtactactctgaagttcttcctccaattaatactcctggggcgaccattctcgacatgtgcagcagctgggtgagccattatcctcccggttacaaacaggagaagatcgtggggatgggtatgaatgaagatgaactgaaaaagaactcggtattaactgagtatgttgtgcaagacctcaatgtgaacccaaagcttcctttcgaagataacactttcgatgttatcaccaatgtggttagtgtagattacctgacaaaaccaatagatgtttttaaggagatgcgacgaatactcaagccaagcggccttgctataatgagcttttcaaatcggtgcttttggacaaaagctatatctatatggacatcaactggtgatgtcgatcatgcctggatagttggcgcttacttccattatgctggaggttttgaacctcctcaggcagttgatatatctcctaatccaggacgaactgacccaatgtatgctgtatgctcaagaaagaaaatagggtaa

SEQ ID NO: 1860 - protein, 344 aa, Sorghum bicolor
MALGGLASRYSLTDPPGTGTGTGTAPRPRSSRQEPMATIAPRSHLLLLGLTRPQQPTALRACAAFSRSRGAPVPPRAAQPRRVFLGLGATFIDQVTRMASGGTSSRSFVAGARPRQGVSPVEQILKNVEWPDEFPFKPEDFSRFDESSDTLFYSVPRFVTHIDDQAIRALTEYYSEVLPPINTPGATILDMCSSWVSHYPPGYKQEKIVGMGMNEDELKKNSVLTEYVVQDLNVNPKLPFEDNTFDVITNVVSVDYLTKPIDVFKEMRRILKPSGLAIMSFSNRCFWTKAISIWTSTGDVDHAWIVGAYFHYAGGFEPPQAVDISPNPGRTDPMYAVCSRKKIG

SEQ ID NO: 1861 - DNA, 378 bp, Sorghum bicolor
atggcggcgctggggtcgaagctggcgcagctgcagtccaaggcgtgcgaggcgacgaggatggtggccaagcacggaggctcgtaccacaagacgctcatggagaagaacaagcactacgtcgtcgaccctcccaccatcgagaagtgccgggagctctccaagcagctcttctacacccgactcgccagccttcctggtcgttatgagtcattctggaaagagcttgatggtgcgaagctcctgtggaagaacagaagcaatctgaaggttgaggatgctggtgttgctgcgatgtttggcatcgagttgtatgcgtggttctgcctaggtgagatcgccggtagaggatttactgtcacgggctaccatgtctga

SEQ ID NO: 1862 - protein, 125 aa, Sorghum bicolor
MAALGSKLAQLQSKACEATRMVAKHGGSYHKTLMEKNKHYVVDPPTIEKCRELSKQLFYTRLASLPGRYESFWKELDGAKLLWKNRSNLKVEDAGVAAMFGIELYAWFCLGEIAGRGFTVTGYHV

SEQ ID NO: 1863 - DNA, 1287 bp, Sorghum bicolor
atgggctgctgtggcgccatgtccgccaggccgcggggcatccacgaggagacgctgctgcgcgtcccgggcgcgtccgtgcacctcatggcgggctccgacggccccgtcgagctcgcgcgcggggacctcgccgtcgtcaggctcaccaaggacgacgtggccgtggccaccgcggtgcgcgtcggcaaggacctgggctggccgctcgcgcgggacgagcccgtcgtcaagctcgaccgcctgcactacctcttcacgctgcccgacaaggacgggacgttcctcaactacggcgtctccttcaacgccgacgccgccgacgactccgcgctggcgtcgctcgacggcttgctccgctccagcgcatgcttctccgcaccttcgtacccggtggttccgtccaagagctccaggcggccgccgccgccgccgcagcagcagcagcagccggttgcgtcggacgggtactggaacgagttcgcgccgaggatggaaggctacaacggcgtgcttgccaaggccatcgccgcgggcaccggccagctcgtcaagggcatcttcatgtgcagcgaggcctacgccagccaggttcagagaggagccgatctgtttcgtcctcaggctggcggcagcgcgcggagccgattcggcgacgctggtggcgccgacaggagcagccaggcgagcaccaagcgtggagcagtcaacaagagtctcaagagggtcaggaagctgtcggagatgaccgagaagatgagccagtcgctgctcgatacggtcatctcggtgaccggctccatggcggcaccgctgatccgctccaagcaagggagagcattcctcgccagcgtacccggcgaggtcgtcctggcatctcttgatgccatcagtgagtgccctgctgctgccaacctctttagaaagctcttgtcaaaaaaaaaaacctctttagaaagcataatgctcaggctcagtatatggaggaagaatatagaagatgcccaaaactttgtggatcatacttgcctttccgtgacagacaaagtaatggatgcggtagaggctgctgagaagaagtcgcttgctgcaacttcaaatgtcgtcgccggcgcagtttcaaggaggtacggcgagagcgcaggggaggcaaccgaagacgcgttcgcgacggccggccacgccgtgggaacggcgtggaacctcttcaagatccgcaaggccgtcacaccgtcgtcctccatgcccgggaacatggtcaagagcgccattaggaacaggaactga

SEQ ID NO: 1864 - protein, 428 aa, Sorghum bicolor
MGCCGAMSARPRGIHEETLLRVPGASVHLMAGSDGPVELARGDLAVVRLTKDDVAVATAVRVGKDLGWPLARDEPVVKLDRLHYLFTLPDKDGTFLNYGVSFNADAADDSALASLDGLLRSSACFSAPSYPVVPSKSSRRPPPPPQQQQQPVASDGYWNEFAPRMEGYNGVLAKAIAAGTGQLVKGIFMCSEAYASQVQRGADLFRPQAGGSARSRFGDAGGADRSSQASTKRGAVNKSLKRVRKLSEMTEKMSQSLLDTVISVTGSMAAPLIRSKQGRAFLASVPGEVVLASLDAISECPAAANLFRKLLSKKKTSLESIMLRLSIWRKNIEDAQNFVDHTCLSVTDKVMDAVEAAEKKSLAATSNVVAGAVSRRYGESAGEATEDAFATAGHAVGTAWNLFKIRKAVTPSSSMPGNMVKSAIRNRN

SEQ ID NO: 1865 - DNA, 2352 bp, Sorghum bicolor
atggagccgtcccgtggcgctgctggcggcgggcggcggtggggggacgcggaggcggaggcggagggcgatgcggcggatgaagggagacgaggggaggacgggggcgaggtgagcctgcgggagtggctggaccggccgggccgcgcggtggaggcggcggagtgcgtgcacgtgttcaggcaggtggcggaggctgtggccgtcgcgcacgcgcagggggtggccgtgggcagcgcgcggccgtcgtgcttcgtcgtgtcgccgcccttcgcgcgcgtcgccttcatcgagtccgcctccggctccgacgcctccggttcgtgctcgggctctgacgcctccgaggacgccgaccgggacgcctcgcctccgcggcgacgcgacggcgcaggccgcggtgaggagcgcgccgggaagtcgttcccgctcaagagcgtgctggccatggagctcaactggtacaccagccccgaggaggcggacgacagcgccgctaccttcgcctctgacgtttacagactgggtgtgctcttgttcgagctgttctgtacattcgaaaccatggaagacaagatgcgggcaatggcgaatctgcggcaccgggtgttgccaccacagttgctgctcaaatggcccaaggaagcatccttctgccagttgctaatgcaccctgtgccagaaaccagaccgaagatgagtgaggtgttgcagagtgagttccttaatcagtcaaggaatagcctggaagagcgtgaagcagcacttaggttacgcgaagagattgaagaacaagaattattgctggattttcttcagcagttgcagaaaagaaagcaggatatagcagacagtttgcaggacactgttgctttcctttcttctgacatcaatgaggtactccaccagcaatctgcacttggccactgtgtgaacttctcaactgatttggacaaagaggtgtgctctggaactgttgaagatcagagtgattgcggatccaggaagcgattcagacctgagctgcaaggtgttgacatggaggaaaataatcgtactgtggaagaatgttcaagaacagttccatcctctgagttaatccaggaaagtgttctgtcaaaaagctccaggttgatgaagaacttcaaaaaacttgaaacagcttattttctaacaaggtccaagttggcgaagcaagctggcaaccaaataagtaatcatcaaattgttaagagggctactggttcagctattgggactgagggaagttcaatagatgatttttctttggaaaggcaatatggtagaaggcaaagaggctgggtgaactcttttcttgaggggttgtgcaagtacttgtcattcagtaagttgaaagttcgggcagaactgaagcattgtgatttgctgaactcatcaaacttagtatgctccgtagggtttgaccgggatagagagttttttgcaactgctggtgtaaataagaagataaaagtgtttgattataatatgattgtaaatgaacaccgtgatattcactatcccgtggtagagatgtctaatagatcaaaactgagctgtatttgttggaacagttatatgaagagccatatagcatctagtgattttgagggtatagtacaggtttgggatgttactaggagtcaggtttttgttgagatgagggagcatgagcgacgtgtgtggtcggtggacttctcaattgtggacccaacaaaattggtcagtgggagtgatgatggatctgtgaagctgtgggatatgaatcaggctgggagtattggtactattaggacaagggcaaacgtgtgttctgtgcaatttcaacctgatacttctcgctccattgccatcggctctgcagaccacaaaatttactgctatgatcttcgtaacatacgagctccttattgtacactagttgggcacacaaagactgtaagctatgttaagtatttggatgcatcaacaatagtatctgcgtctactgacaactcattgaagctttgggacctgtcgatgagtcgaggaaggataattgacagtccaattcaaacatttacggggcacacaaacacaaagaactttgttggcctttccatatctgatggttacatcgctactggctctgaaacaaatgaggtttttgtctaccacaaagaatttcccatgccagtgttggcatataagttcagcgtgacagaccctatctcaggccaggagattgatgatcagtcacagttcatttcctgcgtatgctggagagggcagtcttcaacgcttctttctgcaaactccagcggcaacattaagattttagaaatggactga

SEQ ID NO: 1866 - protein, 783 aa, Sorghum bicolor
MEPSRGAAGGGRRWGDAEAEAEGDAADEGRRGEDGGEVSLREWLDRPGRAVEAAECVHVFRQVAEAVAVAHAQGVAVGSARPSCFVVSPPFARVAFIESASGSDASGSCSGSDASEDADRDASPPRRRDGAGRGEERAGKSFPLKSVLAMELNWYTSPEEADDSAATFASDVYRLGVLLFELFCTFETMEDKMRAMANLRHRVLPPQLLLKWPKEASFCQLLMHPVPETRPKMSEVLQSEFLNQSRNSLEEREAALRLREEIEEQELLLDFLQQLQKRKQDIADSLQDTVAFLSSDINEVLHQQSALGHCVNFSTDLDKEVCSGTVEDQSDCGSRKRFRPELQGVDMEENNRTVEECSRTVPSSELIQESVLSKSSRLMKNFKKLETAYFLTRSKLAKQAGNQISNHQIVKRATGSAIGTEGSSIDDFSLERQYGRRQRGWVNSFLEGLCKYLSFSKLKVRAELKHCDLLNSSNLVCSVGFDRDREFFATAGVNKKIKVFDYNMIVNEHRDIHYPVVEMSNRSKLSCICWNSYMKSHIASSDFEGIVQVWDVTRSQVFVEMREHERRVWSVDFSIVDPTKLVSGSDDGSVKLWDMNQAGSIGTIRTRANVCSVQFQPDTSRSIAIGSADHKIYCYDLRNIRAPYCTLVGHTKTVSYVKYLDASTIVSASTDNSLKLWDLSMSRGRIIDSPIQTFTGHTNTKNFVGLSISDGYIATGSETNEVFVYHKEFPMPVLAYKFSVTDPISGQEIDDQSQFISCVCWRGQSSTLLSANSSGNIKILEMD

SEQ ID NO: 1867 - DNA, 1578 bp, Sorghum bicolor
atggctaggccggctcttgtcgtttgctgctgcctgctgctggcgtacggcgcggcagcgcgcgttctcggcgagggcgagccttttggcggcggcctgaagaatgctgcgcgtcatctcagcgatggcgatcctttcggcagccggaaaaaccccgccgacccgcaccattctccaggctcacacgggactccgccctgctcgccgtccatcggcacctcgccgaccacacccggtggtggtggcggcggctactacccgccttcgcccgacatcggcacttccccgaccacaccgacaactccaggcggttgcggcgggtacaatgctccaccctcaccgtccagtgacacctccccaaccacgcctggtggtggtggtggtggctactatggccctccctcgccgtcctctgatacctccccgacgacgcctggaggcggcagcggcggatgcagtgctcccccttcgccgtccagtgacacctccccatcgacgcctggaggaggaggtgggtactacgggcccccttcaccttccagtggcacctctccatcgacgcctggaggtggtggtggctactacggccccccctcgccgtcctctggcacctccccgacgacgcctggtggtagcggcggcggatgcagtgctcctccttcgccgtccagtgacacctccccatcgacgcctggaggaggtgctgggtactgcgggcccccttcaccgtccagtggcacctctccatcgacgcctggaggtggtggcggctactacggccccccctcgccgtcctctgacaccacgcctggcggtggtggtggcgggtacagtgctcccccttcaccgtccagtgacacctctccatcgacgcctggaggtggcggcgggtactatgggcccccttcgccgtcttctggcacctctccgaccacgccatcggcgcctagtggcggctactacggccctccatcgccgtccagtgacacttcaccgacaactcccggaggcggtggcggctactacggccctccctcgccgtccagtgacacttcgccgaccactccaggcagcggtggcggctactacggccctccctcgccgtcctctgacacctccccggccactccagacgtgccattaccgcctatcagcacatcgccgccgttctctccgctgacgccaacaccgactaccccgacgccctacgaccccaacacgccgccctttacgggcccgtgcacgtactggatcatgcacccgggcgtggtgtggggcctgttcggcttctggtgcccgctggtgcggctgttcgggccgagcgcggcggtgccgttcgggcacgacctgaccgtgccggaggcgctggcgaacacgcgccaggacggcgtgggcgcgctcttccgcgagggcacggcgtcgctgctcaactccatggtgaacagcgggttccccttcacgacgcaggaggtgaaggacgcgttcggcgccgcgcttagctctggcgatgacggcgccgccgcggcacaggcgcagctcttcaagaaagcaaacgagggacacgtcaagcgcaactag

SEQ ID NO: 1868 - protein, 525 aa, Sorghum bicolor
MARPALVVCCCLLLAYGAAARVLGEGEPFGGGLKNAARHLSDGDPFGSRKNPADPHHSPGSHGTPPCSPSIGTSPTTPGGGGGGYYPPSPDIGTSPTTPTTPGGCGGYNAPPSPSSDTSPTTPGGGGGGYYGPPSPSSDTSPTTPGGGSGGCSAPPSPSSDTSPSTPGGGGGYYGPPSPSSGTSPSTPGGGGGYYGPPSPSSGTSPTTPGGSGGGCSAPPSPSSDTSPSTPGGGAGYCGPPSPSSGTSPSTPGGGGGYYGPPSPSSDTTPGGGGGGYSAPPSPSSDTSPSTPGGGGGYYGPPSPSSGTSPTTPSAPSGGYYGPPSPSSDTSPTTPGGGGGYYGPPSPSSDTSPTTPGSGGGYYGPPSPSSDTSPATPDVPLPPISTSPPFSPLTPTPTTPTPYDPNTPPFTGPCTYWIMHPGVVWGLFGFWCPLVRLFGPSAAVPFGHDLTVPEALANTRQDGVGALFREGTASLLNSMVNSGFPFTTQEVKDAFGAALSSGDDGAAAAQAQLFKKANEGHVKRN

SEQ ID NO: 1869 - DNA, 1440 bp, Sorghum bicolor
atgaacgcagtaagatatcagaaacaaccgtggttgagtggcatgacctatgtaatgcaaggtcagaaacagataggtctaagcagctctcaagttgggaaaccagctcttgatggttatgggggcgaaggtgatcatcatctgcagcaacccacagttcgtttgatgggtaagaccgtctcagtttgctcacatagcaaggatcataatgtatcgaccatggatcaagtgagtcctgacaatgttgccattgaagcaagccgcctatccacaatctcatgtcagttaccccaaaagagatcattcccttgtcaggattctgtgacaccaagagtgcatctaaacaactcttcagattttttggcaaggattcccaacaatagcatgcaagggcaaaatactgctttcagtggcctccataaccaaaggccacaaccaataaatagtgctccaaccgtgaaagattgcacttggaattttggtaatcagtttgttcgtcaagctgaactcaataaggcagctatagtcagcaccaactctcagactaggcatctagagctacatcaaccacctcaattgataagcattcctcagaatcaacagtctcatttgtggactccggcagcacagatgagtaggaaagatcagtgttttgtgggtccagcagtgaaccaatcttccctggttccaaaatcattgctaactgcaagtatgaaggaaaagtatcagaaatccactttgttgtcttacgatgatcctagttctatgtctatttgccaaccctaccagatacctggtgcaaactcatcttctgcatctgtcacatccttttttgagtatggtgcggataattcgttgtccagaagctcttctcctggactgagtctttctcttgcaactggtttggctaatgagtctgtttccacaggtagagtagcttgtgcaggcagtcttacaaatgcagatggtaggaaggctgctagctttgccgaaccaataagcaatagttcagcttatgcagataatgtttcacagcaacctgcaaagccaataagcaacagaacagcttatgcaacagataatgtttcacaacaacctgcaaagagacaacttgttacagatacacaggatttaatgtctatgggcccaaacattgtgaaccattcacctggctggtcacttagtgatgcagttggtcctcaggtacttgattttagtaaaagaatagcaagggatgctgttcaaacgtcaagaaatgaaagcaacaatccaagggccagttccggtccagttccgcctattgaaacatggtctaggcctgggttggttgcaggggctaataccatgttgaagccaggtcaaaacctgaatgatcattccaaactgctatactccaccaagttttcggttgataggggtatcaattcggttgtattatag

SEQ ID NO: 1870 - protein, 479 aa, Sorghum bicolor
MNAVRYQKQPWLSGMTYVMQGQKQIGLSSSQVGKPALDGYGGEGDHHLQQPTVRLMGKTVSVCSHSKDHNVSTMDQVSPDNVAIEASRLSTISCQLPQKRSFPCQDSVTPRVHLNNSSDFLARIPNNSMQGQNTAFSGLHNQRPQPINSAPTVKDCTWNFGNQFVRQAELNKAAIVSTNSQTRHLELHQPPQLISIPQNQQSHLWTPAAQMSRKDQCFVGPAVNQSSLVPKSLLTASMKEKYQKSTLLSYDDPSSMSICQPYQIPGANSSSASVTSFFEYGADNSLSRSSSPGLSLSLATGLANESVSTGRVACAGSLTNADGRKAASFAEPISNSSAYADNVSQQPAKPISNRTAYATDNVSQQPAKRQLVTDTQDLMSMGPNIVNHSPGWSLSDAVGPQVLDFSKRIARDAVQTSRNESNNPRASSGPVPPIETWSRPGLVAGANTMLKPGQNLNDHSKLLYSTKFSVDRGINSVVL

SEQ ID NO: 1871 - DNA, 318 bp, Sorghum bicolor
atggccagaagaaacagatccgcggcctcagccgtgctggtcctcctgctctgcgctgcggcggtctcggcggccgctgccgctgccgtggcgggcaagggcaagggcagggtcggatcggctcgcgcggggccgccgccttgccaggatcttgcgacgcagggcgattgcgcggcgagagctgggtgccggtggtgccgcagcgaggcgctcgacgatatgtgcttcggggccaccgaggcgtggcgcctcccacgccaggtcttctcctgcgatccgccctccggcgccggcgccggcgccgcgcacgcccgctag

SEQ ID NO: 1872 - protein, 105 aa, Sorghum bicolor
MARRNRSAASAVLVLLLCAAAVSAAAAAAVAGKGKGRVGSARAGPPPCQDLATQGDCAARAGCRWCRSEALDDMCFGATEAWRLPRQVFSCDPPSGAGAGAAHAR

SEQ ID NO: 1873 - DNA, 939 bp, Sorghum bicolor
atgctcctccaccaccgcctcctccctcgcctactcgttccttccacccacacatccacactcctccgcccctcccgtttgccgctccgtctctctctctcgccgcgcttctccgcgctgtcccacctcgcggcaccgcagaccgtcgaccagtccgacgacgaaggggcgccccaggggaaggtgcaggtccagctcccgctcgaccgcctcttcgtgccgcccggggcaaccgtggatgcgggggaccaggacgccgtgagcgcacgggtccttaagggctccaacatcgtgctgggcccatacgcgcgcggtgacgcacaggtggtcaacgcagattttgtgaagagcagcgtgcgtcccgatgactgccctcgggacggcctaccggagttcgcactcgttggccggtcgaacgtcggcaaatcgtcgctgctcaactcgcttgtccgccgcaagcgccttgcactcacctccaagaagcctgggaagacccaatgtatcaatcatttcaaagtaaatgacagctggtatcttgtcgacttgcctggttatggatatgcttctgcaccacaggaagctcgtaccaattgggatgaatttactagaaattactttctcagtagggagaatttggtatctgtttttctccttatagatgcaagtatacctgccaagaagattgatcttgactatgctagttggcttggtcaaaacaaggttcccatgacccttgtgttcacaaaatgtgacaaacgcaagaagaagaagaatggcggcaggagacccgaagaaaacgtggaaactttccagagcctaatccgtgaatacttcgaggctgcgcctccttggatcatgacaagcagcgtgaccaaccagggccgcgatgagatactcctgcacatgtctcagcttaggaattattggctcaagcattga

SEQ ID NO: 1874 - protein, 312 aa, Sorghum bicolor
MLLHHRLLPRLLVPSTHTSTLLRPSRLPLRLSLSPRFSALSHLAAPQTVDQSDDEGAPQGKVQVQLPLDRLFVPPGATVDAGDQDAVSARVLKGSNIVLGPYARGDAQVVNADFVKSSVRPDDCPRDGLPEFALVGRSNVGKSSLLNSLVRRKRLALTSKKPGKTQCINHFKVNDSWYLVDLPGYGYASAPQEARTNWDEFTRNYFLSRENLVSVFLLIDASIPAKKIDLDYASWLGQNKVPMTLVFTKCDKRKKKKNGGRRPEENVETFQSLIREYFEAAPPWIMTSSVTNQGRDEILLHMSQLRNYWLKH

SEQ ID NO: 1875 - DNA, 1032 bp, Sorghum bicolor
atgcattccgcgaagtcggagcgggagaggaagccgtcgcaggcgaggcggtcgaagttggcctgcacctccatccaggcgttgttggccttgttgctgctgatgaagcggagaccgcggagcgccttgtgcgcgccggagcgcgtgcggtcgagctgcgcgcgctgccgccgcgcggcgcgggcagcgagggccgactcgatgcctgacgacggctgctgctgctgctgcccctgcccttccgcgcggctctgggtgcggccgaagcgcttggtgaggtcctgcgagaactggcgcgcgatggacatggcctccgccttgagctcctgcgagaactgcagcagccggtgcgacgaggtccgcctgatcgacggcgaccgtgaccgcgacgacgacgacgcgccgcccgcatggtccccgcgcgcgcccagcggcagcccgttggcggcccccgccgcggccggctcgacgctccgcagaatgatggtgtcgtcctcctgcaggtcgagcgtaacctcgaccagctcctccccgtcgtcggagctgcgctcggagccccgcggcgaggagcccgtgctgagcgaccgcggcgttgtccccgccgagccgctccatcgctggtggcccggggcggcgccgcccctcatcgccgacccaatcggaagccgctttccagcgcggctcccggaacagtccaatgctcgcagaggagacgcgatcgactgctgggagtgctggctggatggattttgggggtggctttggaatctctggggaaaggcgcccgcaacgcgtccgagcgggagccgagctgacgaaagaggaagcgcaacgggagagcaatatatgaggatgagaaggaggcgagcacgtcgggagcgcgacaccgagactgacaccgggagcgcggagcgggaggcacgcagcaacccagcagaacacaaccgcggggcggccgcgcatgcgctgggaagggccggcaaaggcagaacacctgtttaccactcggcaaccttattccggcgggcctga

SEQ ID NO: 1876 - protein, 343 aa, Sorghum bicolor
MHSAKSERERKPSQARRSKLACTSIQALLALLLLMKRRPRSALCAPERVRSSCARCRRAARAARADSMPDDGCCCCCPCPSARLWVRPKRLVRSCENWRAMDMASALSSCENCSSRCDEVRLIDGDRDRDDDDAPPAWSPRAPSGSPLAAPAAAGSTLRRMMVSSSCRSSVTSTSSSPSSELRSEPRGEEPVLSDRGVVPAEPLHRWWPGAAPPLIADPIGSRFPARLPEQSNARRGDAIDCWECWLDGFWGWLWNLWGKAPATRPSGSRADERGSATGEQYMRMRRRRARRERDTETDTGSAEREARSNPAEHNRGAAAHALGRAGKGRTPVYHSATLFRRA

SEQ ID NO: 1877 - DNA, 396 bp, Sorghum bicolor
atgtcgtggcagacgtacgtcgacgagcacctcatgtgcgagatcgagggccaccacctcacctccgccgccatcatcggccacgacggcaccgtctgggcccagagcaccgcgttcccgcagttcaagcctgaggagatgaccaacatcatgaaggacttcgacgagcccgggttcctggccccgaccggcctcttcctcggccccaccaagtacatggtcatccaaggcgagcccggcgccgtcatccgcgggaagaagggatctggaggcataaccgtgaagaagaccggacaggcgctggtgatcggcatctacgacgagcccatgacccccgggcagtgcaacatggtggtcgagaggctcggcgactacctcgtagagcaaggcctgtaa

SEQ ID NO: 1878 - protein, 131 aa, Sorghum bicolor
MSWQTYVDEHLMCEIEGHHLTSAAIIGHDGTVWAQSTAFPQFKPEEMTNIMKDFDEPGFLAPTGLFLGPTKYMVIQGEPGAVIRGKKGSGGITVKKTGQALVIGIYDEPMTPGQCNMVVERLGDYLVEQGL

SEQ ID NO: 1879 - DNA, 1209 bp, Sorghum bicolor
atgggcatgcgacgagcacgattcttggcctgcattgccatggcggccatcgtgctcctcgcgccgccgtcgacgtgcggagtggcggggcactcgcgggggctgcggcctgggcgcagcgccggcgccggtggcgcgggggatccgccgccgctgttcccggtgaacgcgacgcgcgcggagatgatcgagcggcagttcatggagtgggtgcggtacatgggcggcctccggcacagcacgttccagcacgcgctggcccgcgcgttcccctcctactcgctcgtcgtcgacaagaacccggcgttcggcgacttcacgaccatccaggccgccatcgactcgctcccggtcatcaacctcgtccgcgtcgtcatcagggtcaacgccggcacctacacggagaaggtgagcatctcggcgatgcgcgcgttcatcaccctggagggcgccggcgcggacagcacgatcgtgcagtggggcgacaccgcggactcgccgacggggcccaagggacggcccctcggcacgttcaactccgcgaccttcgccgtgaacgcgcagtacttcctcgcaaggaacatcacgttcaagctctggcattgggcggcggggcagaacacgtcgccggtgccgaagccgggggcgacggggaagcaggcggtggcgctgcgggtgtcggcggacaacgcggcgttcgtggggtgcaagttcctgggcgcgcaggacacgctgtatgaccactcgggtcgccactactacaaggagtgctacatcgaagggtccgtggacttcatcttcggcaacgcgctgtcgctgtacgaggactgccacgtgcacgcgatcgcgcgggactacggggcgctgacggcgcagaaccggcagagcatgctggaggacacggggttctccttcgtcaactgccgggtgacggggtccggcgcgctctacctgggccgcgcctggggcaccttctcccgcgtcgtcttcgcctacacctacatggacaacatcatcatccccaacgggtggtacaactggggcgaccccaaccgcgagctgacggtgttctacgggcagtacaagtgcacgggccccggcgcgagctacgccggccgggtggcgtggtcgcacgagctcactgacgacgaggccaagcccttcatctcgctgagcttcatcgacggcaccgagtggatcaggctgtaa

SEQ ID NO: 1880 - protein, 402 aa, Sorghum bicolor
MGMRRARFLACIAMAAIVLLAPPSTCGVAGHSRGLRPGRSAGAGGAGDPPPLFPVNATRAEMIERQFMEWVRYMGGLRHSTFQHALARAFPSYSLVVDKNPAFGDFTTIQAAIDSLPVINLVRVVIRVNAGTYTEKVSISAMRAFITLEGAGADSTIVQWGDTADSPTGPKGRPLGTFNSATFAVNAQYFLARNITFKLWHWAAGQNTSPVPKPGATGKQAVALRVSADNAAFVGCKFLGAQDTLYDHSGRHYYKECYIEGSVDFIFGNALSLYEDCHVHAIARDYGALTAQNRQSMLEDTGFSFVNCRVTGSGALYLGRAWGTFSRVVFAYTYMDNIIIPNGWYNWGDPNRELTVFYGQYKCTGPGASYAGRVAWSHELTDDEAKPFISLSFIDGTEWIRL

SEQ ID NO: 1881 - DNA, 2478 bp, Sorghum bicolor
atggcggccagctccctctcgtccccggcggccagccgaacgccgaacctgaaatcagcgccggcgccgtcaccatccccatccacccgccggatggcagcagatgcggcgtcggcggcggctgcggtggccgcggcggactcgaaggcacggttcgaggcttacaaccggctgcaggcagcggcggtggcgttcggcgagaagctccccatcccagagatagtggcgataggaggccagtctgatgggaagagctctctcctcgaggcgctccttggctttcgcttcaacgtccgcgaggtcgagatgggcacccgccgtcctctcgttctccagatggtccacgaccccaccgccctcgagcccagatgccgattccaggaggaggactccgaggaatacgggagcccgatggtaatggctacggccatcgccgacctcatcaagcagcggactgaatcacacctccggaagatccaggccgctgtctcatccaagcccatcgttatgagggctgagtacgcccactgccccaacctcacaatcatcgacaccccaggtttcgtgcttaaggctaagagaggcgagccagagagcacaccggatgagatacggtcgatggtgaagtccctcgcgacccctccccaccgcctcgttctgttcctccagcaaagcagcgtcgagtggtgctcgtcgatctggctcgacacgcttaaagagattgatcctactttcaggcgcaccatgatagtcatctccaagtttgacaaccgcctcaaggaattcacggagaggtgggaggtcgataccttcttgagtgcaagtggctaccttggggataatatccacccgttcttcgtggctcttccaaaggaccgtggaacaatttccaatgaggagttccggaggcagatctgtcaggttgatattgatgtgctacgtcacttgcgagataatgtaaaagggggtttcaatgaagagaaatatggatcgtacattgggttcagctgcctcaggaagtacctcgagtctgaacttcagaagaggtacaaagaagcaactccagctacactggcattgttagagcagaggtgcactgatgtctcaatggacctaacaagactagattccaaactacaagcaacgtctgatgtctctcagctccggagatcggcaatgcttcatgcagcttctatttgcacacacttgcatgcattacttgatggagctgctgatccagctccagaaatatgggggaaaactactgaggaggaacagatgcatagtggtattggcagctggcctggcattaatatgcctgtaaaacctgccaactccagccttaagttgtatggcggtgcagcttttgagagagtaatgcatgaatttcgctgtgcaacatattcaatggaatgcccacaagtgtcaagggagaaggttgcgaacatactacttgcccatgctggaagaggtggaagcagtaggttgactgaggcagcagctgagatagctcgggcggctgcaagatcatggcttgctcctcttattgatactgcatgtgaccggcttgcatttgtcctacaaagtctatttgatctcgctatggagcgcaaccgcaataaggacgcacaatatcatcaaaatgttgaagatatggatagttatgttggctttcttgctgctctccggtgctcatattataagtttgtcaaagaattgtccaagcaatgcaagcagatagtgcgtcatcaccttgattcagttacgagcccctactcccatatttgctatgacaacgactttttgagtggtgttggatctgtagcaaactccatgagtaggtttaatcactttactggagttacatcctttgatctagcggacagtggatcagctttagaggaagctcaggagaacttgcctccaagagatcagcagcatatgacaccacctaataaagggaatgagtcaaaggaggttctcagagaaagccaactaacagtacctgagacgccttctcctgatcttccatctgatgtacatggtggtaagaagaaagataatgggatcccaaatgacggtggcccaaggaaaagacaagcaaggatggcagcatatacaaacagaaatcaccataacagtatgattgctgctgatgacatgggctcgaagtcagggtcatcatactccaccatatgcgcaatatctgctcaatattttgccaaaatgcgagaagtcctgattgaaagaaatgttccctctgcattgaactctggattcttaacaccatgccgtgaaaggttatttctggcacttggctttgagctattcgctgtgagtgatgacaagttcatggacatgtttgtcgcccctggggcagttgatgctatccagaatgagcgccaatctcttctcaaacgtcagaagattttgctgtcctgtttgaacgagtttaagaacatatcccgggctctgtag

SEQ ID NO: 1882 - protein, 825 aa, Sorghum bicolor
MAASSLSSPAASRTPNLKSAPAPSPSPSTRRMAADAASAAAAVAAADSKARFEAYNRLQAAAVAFGEKLPIPEIVAIGGQSDGKSSLLEALLGFRFNVREVEMGTRRPLVLQMVHDPTALEPRCRFQEEDSEEYGSPMVMATAIADLIKQRTESHLRKIQAAVSSKPIVMRAEYAHCPNLTIIDTPGFVLKAKRGEPESTPDEIRSMVKSLATPPHRLVLFLQQSSVEWCSSIWLDTLKEIDPTFRRTMIVISKFDNRLKEFTERWEVDTFLSASGYLGDNIHPFFVALPKDRGTISNEEFRRQICQVDIDVLRHLRDNVKGGFNEEKYGSYIGFSCLRKYLESELQKRYKEATPATLALLEQRCTDVSMDLTRLDSKLQATSDVSQLRRSAMLHAASICTHLHALLDGAADPAPEIWGKTTEEEQMHSGIGSWPGINMPVKPANSSLKLYGGAAFERVMHEFRCATYSMECPQVSREKVANILLAHAGRGGSSRLTEAAAEIARAAARSWLAPLIDTACDRLAFVLQSLFDLAMERNRNKDAQYHQNVEDMDSYVGFLAALRCSYYKFVKELSKQCKQIVRHHLDSVTSPYSHICYDNDFLSGVGSVANSMSRFNHFTGVTSFDLADSGSALEEAQENLPPRDQQHMTPPNKGNESKEVLRESQLTVPETPSPDLPSDVHGGKKKDNGIPNDGGPRKRQARMAAYTNRNHHNSMIAADDMGSKSGSSYSTICAISAQYFAKMREVLIERNVPSALNSGFLTPCRERLFLALGFELFAVSDDKFMDMFVAPGAVDAIQNERQSLLKRQKILLSCLNEFKNISRAL

SEQ ID NO: 1883 - DNA, 627 bp, Sorghum bicolor
atgggggcttctcaggtgtgggcgtcggtgccggcctggctcgtgatcgtcgtcggtttggcggccgtggtttcctcgtcggaggctcacgtcttctacgccggtggccacgacggctgggtcctcagccccaccgagagctacaaccactgggccgggcgcaaccggttccaggtgaacgacaccatcgtgttcacgcacgagaagggcgtcgacgactcggtgctgctggtgacggagcaggacttcgacacgtgcaacacgcgcaacccggtccggcggctccaagccgccgccgtcggcagcagcagcggcagttcggtgctcaggctcgaccggtccggcccgttcttcttcatcagcagcgacgaggaccggtgccagaagggccagaagctgtacataatcgtgatggcggttcgccggccgacgacgacgactccggcaccggccgtagcgccggcacccgactcggcgttcccgccggcgccgtcaccggtgtgggcctcggcgcccgagaacgcgcatgctccaccgccgacggcgggtgcgtcgcgtctcgtcgacggagcgatcatcggctctgtggttggggttattggggctttggtgctctgtgccgtgtag

SEQ ID NO: 1884 - protein, 208 aa, Sorghum bicolor
MGASQVWASVPAWLVIVVGLAAVVSSSEAHVFYAGGHDGWVLSPTESYNHWAGRNRFQVNDTIVFTHEKGVDDSVLLVTEQDFDTCNTRNPVRRLQAAAVGSSSGSSVLRLDRSGPFFFISSDEDRCQKGQKLYIIVMAVRRPTTTTPAPAVAPAPDSAFPPAPSPVWASAPENAHAPPPTAGASRLVDGAIIGSVVGVIGALVLCAV

SEQ ID NO: 1885 - DNA, 2943 bp, Sorghum bicolor
atggagtcggcggcggcccaggcctgcgccgcgtgcggggacgacgcgcgcgccgcctgccgcgcgtgcagctacgcgctctgtagggcgtgcctcgacgaggacgccgccgagggccgcaccacatgcgcgcgctgcggcggggactacgccgcgatcgactcagcacacggcaacgagggaaccgaggcagaggaggtggagaacaaccacgccgctggtggcctgcgtgagagggtcaccatgggcagccacctcactgatcgccaggatgaagtaagccatgccaggaccatgagcagcttgtcgggaattggtagtgaattgaatgatgaatctggcaagcccatctggaagaacagggtggagagttggaaggaaaagaagaatgagaagaaagcttcggccaaaaaggctgcagtaaaagcacaggctccacctgtcgaagaacagatcatggatgaaaaggacttgacagatgcatatgagccactctctcgggtcatcccaatatcaaagaacaagctcacaccttacagagcagtcatcattatgcggttaatagttctcggtctcttctttcactaccgtatcaccaatcctgttaacagtgcctttggtctctggatgacctcagtaatatgtgagatctggtttggtttctcctggatcttggatcaattccccaagtggtatcctatcaatcgagagacttacgttgataggctgactgcaagatacggagatagtgaagagtctggattagcacctgtagatttctttgtcagtacagtggatccattaaaagagcctccactaatcactgcaaacactgtgctgtctattcttgctgtggactatcctgtcgagaagatctcatgctacgtatctgatgatggttctgctatgctcacatttgaatcgcttgcagagactgcagaatttgctagaaaatgggtgccattttgcaagaagtacaccattgagccacgagctcctgagttctacttctcgcagaaaattgactacttgaaggacaagatacacccgtcttttgtcaaggagcgtagggctatgaagagggactatgaagagtacaaggtgaggataaatgctttggtagccaaggctcagaagacacctgaggaaggctggatcatgcaagacggtacaccatggcctgggaacaatcctcgtgaccaccctggcatgatccaggttttccttggtgagactggtgcacgggacttcgatggaaatgaacttcctcggttagtgtatgtgtcaagagagaaaagacctggttaccaacaccacaagaaggcaggggctatgaatgctctggtccgagtgtccgctgttctgacaaatgctccttacattcttaatcttgactgtgatcactatgttaacaacagcaaagccgtccgtgaagcaatgtgtttcatgatggaccctactgttggcagagatgtctgctatgtacaattcccccagaggttcgatggcattgatcgcagtgatcgatatgccaataggaacgttgtgttctttgatgttaatatgaaaggacttgatggcatccaaggcccagtttatgtcggaactggttgttgtttctataggcaggcactttatggttatggacctccatctctgcccgcacttccgaagtcttcactttgttcgtggtgttgctgctgctgtcccaagaaaaaggttgaaagaagtgagagggaaatcaacagagactctcggcgagaagaccttgagtctgccatttttaaccttcgcgaaattgacaactatgatgagtatgagaggtccatgctgatatctcagatgagcttcgagaaatcttttgggcagtcctcagtctttattgagtctactcttatggagaatgggggcgtccctgaatctgtaaacccagctaccctaattaaagaagccattcatgtcattagctgcggatatgaagagaaaactgaatggggaaaagagattggctggatctatggttcagttacagaggatattctgactgggtttaagatgcactgccgtggctggagatccatctactgcatgccggtgagacctgcattcaagggatcagcccctatcaatctttccgatcgtcttcaccaggttctccggtgggctcttggttctgtcgagatcttcctcagtcggcactgccctctgtggtacggttacggtggcggtcgtctgaaatggctccagaggctgtcctacatcaacaccatcgtgtacccgttcacttctcttcctctcgttgcctactgttgcctgcctgccatttgcctgctcacaggaaagttcattattcctacgctgtccaacgctgcgaccatatggtttcttggcctcttcatgtccatcatcttgacgagcgtgttggagctgcggtggagtggcatcgggattgaggactggtggcgcaacgagcagttctgggtcatcggaggcgtgtccgcccacctgttcgccgtgttccagggtattctcaagatgattgccgggctggacaccaacttcacggtcaccgcaaaggccacggacgacgccgagttcggggagctgtacgtgttcaagtggacgacggtgctgatcccgcccaccagcatcctggtgctcaacatggtgggcgtggtggctggcttctcggccgcgctcaacagcggctacgagtcctggggccctctctttggcaaggtgttcttcgccatgtgggtgatcatgcacctgtacccgttcctcaagggtctcatgggccgacagaaccgcacgcccaccatcgtggtgctctggtccgtcctcctcgcctccgtcttctccctcctctgggtcaagatcgacccattcgtcggaggaaccgagaccgtcaactccaacaactgcaacacagtcatctgctga

SEQ ID NO: 1886 - protein, 980 aa, Sorghum bicolor
MESAAAQACAACGDDARAACRACSYALCRACLDEDAAEGRTTCARCGGDYAAIDSAHGNEGTEAEEVENNHAAGGLRERVTMGSHLTDRQDEVSHARTMSSLSGIGSELNDESGKPIWKNRVESWKEKKNEKKASAKKAAVKAQAPPVEEQIMDEKDLTDAYEPLSRVIPISKNKLTPYRAVIIMRLIVLGLFFHYRITNPVNSAFGLWMTSVICEIWFGFSWILDQFPKWYPINRETYVDRLTARYGDSEESGLAPVDFFVSTVDPLKEPPLITANTVLSILAVDYPVEKISCYVSDDGSAMLTFESLAETAEFARKWVPFCKKYTIEPRAPEFYFSQKIDYLKDKIHPSFVKERRAMKRDYEEYKVRINALVAKAQKTPEEGWIMQDGTPWPGNNPRDHPGMIQVFLGETGARDFDGNELPRLVYVSREKRPGYQHHKKAGAMNALVRVSAVLTNAPYILNLDCDHYVNNSKAVREAMCFMMDPTVGRDVCYVQFPQRFDGIDRSDRYANRNVVFFDVNMKGLDGIQGPVYVGTGCCFYRQALYGYGPPSLPALPKSSLCSWCCCCCPKKKVERSEREINRDSRREDLESAIFNLREIDNYDEYERSMLISQMSFEKSFGQSSVFIESTLMENGGVPESVNPATLIKEAIHVISCGYEEKTEWGKEIGWIYGSVTEDILTGFKMHCRGWRSIYCMPVRPAFKGSAPINLSDRLHQVLRWALGSVEIFLSRHCPLWYGYGGGRLKWLQRLSYINTIVYPFTSLPLVAYCCLPAICLLTGKFIIPTLSNAATIWFLGLFMSIILTSVLELRWSGIGIEDWWRNEQFWVIGGVSAHLFAVFQGILKMIAGLDTNFTVTAKATDDAEFGELYVFKWTTVLIPPTSILVLNMVGVVAGFSAALNSGYESWGPLFGKVFFAMWVIMHLYPFLKGLMGRQNRTPTIVVLWSVLLASVFSLLWVKIDPFVGGTETVNSNNCNTVIC

SEQ ID NO: 1887 - DNA, 1254 bp, Sorghum bicolor
atggcctgcgccgcggcgatgccgatcgacttgcccccggctccagctctggcggcggaggagatgagggcggttgaggaggacgaggaggtggtggtggaggtggagggtggagggtgcggcggaggcgccgtggtggtggccgcggcggacgcggaggcggagggtcacccctacgacttccacgtctccgggccgcgcaacctgccgccgcccaactggaaggagataatcagatcgagctggaaggatccaaattacaaaaggatggtaatggcctgcttcattcaagcagtctacctgcttgaactggacaggcaggaccagaaaggcgaagaggatggccttgctccaaaatggtggaaacccttcaagtacaaggtcacacagacattggtggatgagagagatggttccatctatggcgccatgctggagtgggatcgttcttctgccttatctgactttatcctcataagaccaagcggggcaccgagggctgtgttagctctcagaggaaccctcctgcagaagccaactatgaagagggacctgcaggatgaccttcgtttcttggtatgggagagcctcaaaggttcagtaagatttgttggtgctttagcagcactaaaatcagcagttgagaagtttggctgcaccaatgtttgtgttgctgggcactccttgggagctggatttgcacttcaagtctgcaaagagcttgccaaacaaggagtttttgtggagtgtcatcttttcaatccaccctctgtttcactggccatgggtgtaaggagcatgagtgagaaggccagctacctgtggaagaaagtgaaaggaagtctgccattgaaggaagaaacaacaacaccacttgagactgctaaggctgaggcaagtgacaagaagagattgcgcactgagaagaaatgggtgccacatttgtatgtcaacaacagtgattacatctgctgccactacaacgctccctcttgctcgtccacaacaacagatggtgcctccagtgaacagcaacaacaacgcaaggcaagtgagattgctggtgatgtggtcgcaaagctctttgtgacatcaaaaggcccgcagaagttccttgaggcgcatgggctacagcaatggtggtcagatggcatggagctgcagttggctctctatgacagcaagctcataaacaggcagctgaaatccatctacacaacaacaacaacaatgtcatctcctgccaagtcctag

SEQ ID NO: 1888 - protein, 417 aa, Sorghum bicolor
MACAAAMPIDLPPAPALAAEEMRAVEEDEEVVVEVEGGGCGGGAVVVAAADAEAEGHPYDFHVSGPRNLPPPNWKEIIRSSWKDPNYKRMVMACFIQAVYLLELDRQDQKGEEDGLAPKWWKPFKYKVTQTLVDERDGSIYGAMLEWDRSSALSDFILIRPSGAPRAVLALRGTLLQKPTMKRDLQDDLRFLVWESLKGSVRFVGALAALKSAVEKFGCTNVCVAGHSLGAGFALQVCKELAKQGVFVECHLFNPPSVSLAMGVRSMSEKASYLWKKVKGSLPLKEETTTPLETAKAEASDKKRLRTEKKWVPHLYVNNSDYICCHYNAPSCSSTTTDGASSEQQQQRKASEIAGDVVAKLFVTSKGPQKFLEAHGLQQWWSDGMELQLALYDSKLINRQLKSIYTTTTTMSSPAKS

SEQ ID NO: 1889 - DNA, 519 bp, Sorghum bicolor
atgctcccgctggtgaagctcggctcgctcgcgttccggacgctgagcaagcccatcgcggcccgcctcaagtacaacgccggcatccaccccaagttccgcggtctcatcatcggactcgcgcaggcaaaccatcgtttcactacaaatatgcagaggcgagtgtatggacgtgcgactgacattcacattcggcccctgaatgaggagaaagctattcaagctgccgcagatcttcttggcgaactatttgttttctcggttgctggtgctgcaattatctatgaggtgcaaagaagtgctaggtcagaagccagaaaagaggaagtccgtagtcaggaaattgaggcgataaagaaaagggatgaacaactggccctggaagtacagctcatgaaacagaagattagcgagatggagcggcagtactcgaagtggactcttccggggtttcgcggcctcggcactgctcaggcggcggcacagcctactggtactcagcagccaacagctgcgtag

SEQ ID NO: 1890 - protein, 172 aa, Sorghum bicolor
MLPLVKLGSLAFRTLSKPIAARLKYNAGIHPKFRGLIIGLAQANHRFTTNMQRRVYGRATDIHIRPLNEEKAIQAAADLLGELFVFSVAGAAIIYEVQRSARSEARKEEVRSQEIEAIKKRDEQLALEVQLMKQKISEMERQYSKWTLPGFRGLGTAQAAAQPTGTQQPTAA

SEQ ID NO: 1891 - DNA, 1014 bp, Sorghum bicolor
atggccgccgcggcgcacgaggtctccgccgtgatctttgatctcgacggcaccctccttgacacagagagggcgacaagggacgtcctcaacgaattcctggcggcgtacgggaaggtccctgatgcgcagaaagaggagaagaggctgggccagatgtatctggagtccaccactggaatcatcagagattacgggctgccgctcacggtcgaggagtactccaaggcgatgcatccgctctacctgagaaggtggcaaaaggcgaaaccgcttccaggagtgaagaggcttgtcaagcatcttcacaagaacggagtgccactcgcaattgcttctaactccgttaggagaaatattgatcacaaacttccgaaactagaagattggggagagtgtttttctgttattcttggtggagatcaagtccctaatgggaaaccttcccctgacatatttttggaggctgcaaagaggcttggtgtaaatccatcgtcgtgcttggtcatagaagattctgttgttggcgtcaagggtgccaaggcttctggggcaaaggcggttgcagtaccatcacttcaaagtcagaggaaacactattatattgctgatgtcatcatctattcacttttggactttgatcctgagctatgggctcttcctccatttgaagatcatgactgtacctacgagtgtattcctgaccaaatatcaggaatttatttgggttgggccgagtccaaagtgcatggactctccaaggttatcataggtactgggtgggacttctcacagcagactgtcgaaagagtgatgcaagtagattttcttgattcctctggcaggattgaaacagagcctgtgaagctgcttgtaattggctacatccggaagctccaaagtgatgatatattgcaagctttaagtataaccgacgaagacaggagcattgcaagggaagcattggacctcccaactttctctgaatatgctaatgaccttcatcttgcctaa

SEQ ID NO: 1892 - protein, 337 aa, Sorghum bicolor
MAAAAHEVSAVIFDLDGTLLDTERATRDVLNEFLAAYGKVPDAQKEEKRLGQMYLESTTGIIRDYGLPLTVEEYSKAMHPLYLRRWQKAKPLPGVKRLVKHLHKNGVPLAIASNSVRRNIDHKLPKLEDWGECFSVILGGDQVPNGKPSPDIFLEAAKRLGVNPSSCLVIEDSVVGVKGAKASGAKAVAVPSLQSQRKHYYIADVIIYSLLDFDPELWALPPFEDHDCTYECIPDQISGIYLGWAESKVHGLSKVIIGTGWDFSQQTVERVMQVDFLDSSGRIETEPVKLLVIGYIRKLQSDDILQALSITDEDRSIAREALDLPTFSEYANDLHLA

SEQ ID NO: 1893 - DNA, 486 bp, Sorghum bicolor
atgacgctcgtggagatgtgcgtgcacatggactgccccgggtgcgagaagaagatccggaaggcggtgcagcggctggaaggcgtgcacgacgtggagatcgacatggcgcagcagaaggtgacggtgaacggggacgtggagcagaagaaggtgctcaaggcggtgcggcggacgggccgccgcgccgtcctgtggccgctcccgtacgctccggcgggcgcggccgccggcggggccggcgccggcgcggcgcacgtcctggcgcaccagcagctcatgtaccagcccggcgccgcaggcctggcggcgcacgccagccacgcggcgcggcccgcgtcctcgtacaactactacaagcatggctacgacgactcgcgcatgtacggcgcatactaccaccacggtgccaactcggccgtcgccggcaccagggccaccgactacttcagcgacgagaacgcgcaggggtgctccgtcatgtga

SEQ ID NO: 1894 - protein, 161 aa, Sorghum bicolor
MTLVEMCVHMDCPGCEKKIRKAVQRLEGVHDVEIDMAQQKVTVNGDVEQKKVLKAVRRTGRRAVLWPLPYAPAGAAAGGAGAGAAHVLAHQQLMYQPGAAGLAAHASHAARPASSYNYYKHGYDDSRMYGAYYHHGANSAVAGTRATDYFSDENAQGCSVM

SEQ ID NO: 1895 - DNA, 2901 bp, Sorghum bicolor
atggcgcgcaatgcggtggacaaggcgacgtccatcgacgcgcagctgcggctgctggccccgcagaagctctccgacgacgacaagcttgtcgagtacgacgccctgctcctcgaccggttcctcgacatcctacaggacctgcacggcgaggacatcagggagacggtgcaagaatgctatgagttagctgctgagtatgaaaataagcttgaccccaaaatgctggatgagattgggaatgtgctgaccgactgggatcgcggagactccatggtcataaccaagtcattctcacacagacttatcctggcaaacttggctgaggaggtacaaatggcataccgcaggagaataaaactgaagaagggtgactttgttgatgagaactcagcaacaactgaatcagacatcgaggagacattaaagaggcttatgcatcagcttaagaagtcccctctggaggtattagatgctctcaagaatcaaactgttgaccttgtcctgactgcacatccaactcagtctgtccggagatcactgctccaaaagcatggcaggataagaaactgtttaactcaactttatgcaaaggacatcactccagatgagaaacaggaacttgatgaagcacttcaaagagagattcaagctgcctttagaaccgatgaaatcaggcgggcgcctcctactccgcaggatgaaatgcgtgctggaatgagttattttcatgagaccatatggaagggtgtacccaagttcttacgcagggtcgacactgctcttaagaacattggcataaatgagcggctgccatataatgcccctatcattcagttttcttcatggatgggtggtgatcgtgatgggaatccaagagtcacaccagaggttacaagggatgtgtgcttgttggctagaatgatggctgctaatttgtataatgcccagatagaagatctgatgtttgagttatctatgtggcgctgcagtgacgagttacgtgtaaaggtcgatgagttacaatgttcctccaagaaagatagaacaaaacactatatagagttctggaaacaagttccccccagtgaaccttaccgagtgattctgagtgatgtcagagataaactctacaacacgcgtgaacgagcacgccatttattagctagtgggttttctgaaattccagaggaagcaaccttcaccgatgttgaacagttcttggagcctcttgagctctgttacagatctctctgtgcctgtggtgatcaatctattgcagatggaagccttcttgacttcttacggcaagtgtctacatttggactatcccttgttagacttgatatcaggcaagaatctgaccgacatactgatgttatggatgctataactgaataccttggcatcggatcataccgtaaatggacagaggagaaacgccaagaatggctactctcagaacttaatggaaagaggccgttatttggtcctgaccttcccaagtccgatgagattgctgatgttctagatactttccacgtattagctgaacttccttcagacagctttggtgcatatgtaatatctatggcgacagctccctcggatgttcttgctgtcgagctcttgcagcgtgaatgtcatgtgaaaaaaccactgagagttgtgccattgttcgaaaaactggcagatcttgaggcagcacctgcagctttagctcggctgttctctgttgaatggtacagaaacaggatcaatggcaagcaagaagtgatgattgggtattctgattctggcaaggatgctggtcgtttctctgctgcttggcaactgtacaaggctcaagaggagctcattaatgttgctaagatgtatggggttaagttaactatgttccacggacgaggtgggactgtgggaagaggtgggggccctacccatcttgctatactgtcacaacctccagaaactattcatggatcgcttagggtaactgttcaaggtgaagtcattgaacaatcttttggagaggagcatttgtgctttagaaccctgcaacgtttcacagctgctactcttgaacatggtatgcatcctccaatttcgccaaaaccagaatggcgtgctttaatggacgaaatggctattgttgccacaaaggaataccgatcaattgtgtttgaagaaccacgctttgttgagtatttccgccttgcaacaccagagatggaatatggtaggatgaatatcggaagcagaccatcgaaaagaaagccgagtgcaggcattgaatcactgcgtgcaatcccttggatctttgcttggacgcagactcggttccacctaccagtgtggcttggttttggcgcagcattcaaacatgtcttggataaggacatacggaatcttcaaacccttcaagagatgtacaatcagtggccatttttcagggttacaatagacttggttgagatggtgtttgccaaaggtgatcctggtatagcggctctgtatgacaagcttctagtttcagaggatttgtggtcatttggcaagcgtcttagagccaactatgaagaaacaaagcaacttcttctacaggttgctgggcacaaagaccttctggagggcgacccttacctgaagcagaggctgcgcatccgtgactcttacatcaccgcgctgaacgtttgccaagcttacacgctgaagcgcatcagggaccctggcttccaggtgaacccggggcctcacctgtcgaaggacgtcatggacattggcaagccggcttcagagctcgtgaagctcaacaccacaagcgagtacgccccggggctggaggacaccctcatcctcaccatgaagggcatcgctgccggaatgcagaacaccggctga

SEQ ID NO: 1896 - protein, 966 aa, Sorghum bicolor
MARNAVDKATSIDAQLRLLAPQKLSDDDKLVEYDALLLDRFLDILQDLHGEDIRETVQECYELAAEYENKLDPKMLDEIGNVLTDWDRGDSMVITKSFSHRLILANLAEEVQMAYRRRIKLKKGDFVDENSATTESDIEETLKRLMHQLKKSPLEVLDALKNQTVDLVLTAHPTQSVRRSLLQKHGRIRNCLTQLYAKDITPDEKQELDEALQREIQAAFRTDEIRRAPPTPQDEMRAGMSYFHETIWKGVPKFLRRVDTALKNIGINERLPYNAPIIQFSSWMGGDRDGNPRVTPEVTRDVCLLARMMAANLYNAQIEDLMFELSMWRCSDELRVKVDELQCSSKKDRTKHYIEFWKQVPPSEPYRVILSDVRDKLYNTRERARHLLASGFSEIPEEATFTDVEQFLEPLELCYRSLCACGDQSIADGSLLDFLRQVSTFGLSLVRLDIRQESDRHTDVMDAITEYLGIGSYRKWTEEKRQEWLLSELNGKRPLFGPDLPKSDEIADVLDTFHVLAELPSDSFGAYVISMATAPSDVLAVELLQRECHVKKPLRVVPLFEKLADLEAAPAALARLFSVEWYRNRINGKQEVMIGYSDSGKDAGRFSAAWQLYKAQEELINVAKMYGVKLTMFHGRGGTVGRGGGPTHLAILSQPPETIHGSLRVTVQGEVIEQSFGEEHLCFRTLQRFTAATLEHGMHPPISPKPEWRALMDEMAIVATKEYRSIVFEEPRFVEYFRLATPEMEYGRMNIGSRPSKRKPSAGIESLRAIPWIFAWTQTRFHLPVWLGFGAAFKHVLDKDIRNLQTLQEMYNQWPFFRVTIDLVEMVFAKGDPGIAALYDKLLVSEDLWSFGKRLRANYEETKQLLLQVAGHKDLLEGDPYLKQRLRIRDSYITALNVCQAYTLKRIRDPGFQVNPGPHLSKDVMDIGKPASELVKLNTTSEYAPGLEDTLILTMKGIAAGMQNTG

SEQ ID NO: 1897 - DNA, 1023 bp, Sorghum bicolor
atggcggaggaagtggcgcaggagcaaccgagacccacggcgccacgcccggtccgctgtatagtcaagctaggtggagcggcgattacgaacaagggcgagctggagagcatcaacgaggagaacctacggtcggcatgtgcgcagctgcggcatgccatgtctgaatctgacggcgatggcgccacggagaaggttctggggatggactggagcaggaagcccggagatccggccgacccggccgtggacgcggagtggatcgcggggatggctgggctggggctcgacactaacttcatcgtcgtgcacggcgccgggtcttttggccacttccaagcaagtagatctggagttcataaaggagggttacattcgacactggtgaaggctggctttgtcgctacaagaatttcagtgacatctctcaaccaggaaattgttagagccctagcaagagaaggaataccatctgttgggatgtcaccatttgcttgtgggtggtctacccagcaaagaaaacttgcatcagcaaatgcttctcaaataattcagtcactccatacaggctttgtcccagttttgcatggtgatgcagttcttgatgaattactggattgtaccatattgagtggggatgtcattatacgacatcttgcacagcttctaagtccaagatatgttgtgtttctgacagatgtccatggagtatatgatcgccctccaactgacccaaatgcagtactcctgaaagaaatagaggtggatgacaatggaggctggtcgattgtcaaacctgcattgctgcaaggcaacactaaaggagttgagatatcagttgcagcacatgacaccaccggtgggatggagaccaaaatactggaggctgcagtgatagctaggcttggaatcgatgtgtatattaccaaggctggaacagaacactcgctgagggccttaaagggggatgttagcaccgactcagaagattggcttggaactattatacgctcttccaaatag

SEQ ID NO: 1898 - protein, 340 aa, Sorghum bicolor
MAEEVAQEQPRPTAPRPVRCIVKLGGAAITNKGELESINEENLRSACAQLRHAMSESDGDGATEKVLGMDWSRKPGDPADPAVDAEWIAGMAGLGLDTNFIVVHGAGSFGHFQASRSGVHKGGLHSTLVKAGFVATRISVTSLNQEIVRALAREGIPSVGMSPFACGWSTQQRKLASANASQIIQSLHTGFVPVLHGDAVLDELLDCTILSGDVIIRHLAQLLSPRYVVFLTDVHGVYDRPPTDPNAVLLKEIEVDDNGGWSIVKPALLQGNTKGVEISVAAHDTTGGMETKILEAAVIARLGIDVYITKAGTEHSLRALKGDVSTDSEDWLGTIIRSSK

SEQ ID NO: 1899 - DNA, 306 bp, Sorghum bicolor
atggctgccgcttcctttccaccagcatcttcctccggcggctgggacttcacttgtaaccttgaagttgattatgggtctgaagaaaatgcatccatcgtctacaaaacgttagcggttgacaaggagttgcagcctgacaaggtgaagagggaaatgactctatcaggcagcaagctggccgtgcactttgcagccgtggaggcccggttcctgcgagcatcgttcagtgcatttgtggatcttatgggactcgtcacgaagcttgtcgaggaatatggtgtggccatggaagagcattcttga

SEQ ID NO: 1900 - protein, 101 aa, Sorghum bicolor
MAAASFPPASSSGGWDFTCNLEVDYGSEENASIVYKTLAVDKELQPDKVKREMTLSGSKLAVHFAAVEARFLRASFSAFVDLMGLVTKLVEEYGVAMEEHS

SEQ ID NO: 1901 - DNA, 2433 bp, Sorghum bicolor
atgctgggcgtcgagcccgagggcagaggcggcgcgtcctcctccgccgccgcagagaattttgacgctgggcagtatgccttcttcgggaaggagccactggaggggttcgagctcgggggcttggaggaagccggcggcagtgatgccaatggcggtggattcagtgggccagatgaggggctgtaccggctgaactctgttggagatgagattgatgatctgagtaacctgtctgacattgatgatcttgcaagcacctttgctaagttgaaccgaagcattagtggaacccggaatcctggtgttattggggacaggagatccatttcacgaggaagttctttaactgttgactgggctgaggatgtggagttttcaaactggggagatcaagacgtatttgaaaatgaggaattccacgaaagtaaaagatggtggtcatccaattcttcagttcagcaaggggattctaactccagaccactaagtcgaacatcttcctaccctcagcagccactgcagcaccggtcaagtgaacctatcgttttaccaaagacatcttcatttacctcattcccaccacctgttgctgctgctggtggtagatccccttaccctgctcaaggccttacacgtcatgggagcattccatcaattggtgctgggctccaaatgggttctccaggcatgtcactttctgcttctccataccatatggtcggaccatctcatgggctgccatacacaggaggaatgccttatggtgctcttaacctgcctgtaaacaatcctgtgcaaaatgattggtcgaaccatggtaaccctttcactggggaacatcttaatctactgcccaacttattgcacaaacaattatcacttcctaatagcccaatgccatcactcctgttttctcagcatcagcagagattggcacaggtccaatcaccccatcagaattacctcaatataactccacacctgctatatccccatcactctgcagagattacaggcaggtttgattctgttggcagttctcattcatcaagagacaagagatcaaggtcggggaggggaaagcatagccttcgcttctctcaaccaccatctgatactggtagccagaatggtgacagcggaggtataaagtttagatccaagtacatgtcatctgaagagattgaatcaatcttaaggatgcagcattctgcaagtcacagcagtgatccttatgttgttgattactaccatcaagcttgtatggcaaaaagaggcgccacttctaagcaaaagaccaatttctccccaacatcaatgaaagatataccatccaagtctcgatccagcagtgatcagcacacatatcttcaggttgatgctcttggaagagtatctttctcttccatacgtaggcctcggtctcttcttgaggttgaccatccttcatctgctgatggctcccatgatcagaagtctactgtgaggcccctggagaaagaaccaatgcttgcagcaagagtcactgttgaagatgccctttgccttcttcttgaggttgatgacactgaccgtctgttgcagtctagccagtcacaggacaacattttccaactgaagcggagacggcaagtcctcctggaaggtctagcagcatcactgcagtttgttgatcctctcggacccagcaaatctggtcattcatctgggttagccctgaaggacgatgttgtttttcttcgcattgtttctctgcccaaaggacgtaagtttttagcacgttaccttcggcttcttgtccctggcagcgagttgacccggatagtatgcatggcaatttttcgccatttgaggttcttgtttgggggtttgccatcagactctagtgcagcagaaactacagttgctcttgcaaagactctttcatcttgtgtgcatcacatggaacttggtgctcttagtgcctgccttgctgctgttgtctgttcatctgaacagccacccctgcgccctcttggtagttctgctggtgatggggcttctctagttattaaatcagtactggatcgagcaactgagttactgactgatcgccatgctgcagccagctacactgtgccaaaccgtgctctctggcaggcatcgtttgatgctttctttggtcttctaacaaaatactgtgtcagtaagtttgaaagtattcagcagatgtttgtcatgcaggcaccaagctcaggaattggacctgaggcttccaaagctactagtaaggagatgcctgttgagctacttcgtgcaagccttcctcatacaaacgagcagcaacgccagcggcttcttgattttgctcagagatccatgccagtaacaggtttcaatccctcaggtgctagaggtgggcacatcacttcagaatctgttcctggttga

SEQ ID NO: 1902 - protein, 810 aa, Sorghum bicolor
MLGVEPEGRGGASSSAAAENFDAGQYAFFGKEPLEGFELGGLEEAGGSDANGGGFSGPDEGLYRLNSVGDEIDDLSNLSDIDDLASTFAKLNRSISGTRNPGVIGDRRSISRGSSLTVDWAEDVEFSNWGDQDVFENEEFHESKRWWSSNSSVQQGDSNSRPLSRTSSYPQQPLQHRSSEPIVLPKTSSFTSFPPPVAAAGGRSPYPAQGLTRHGSIPSIGAGLQMGSPGMSLSASPYHMVGPSHGLPYTGGMPYGALNLPVNNPVQNDWSNHGNPFTGEHLNLLPNLLHKQLSLPNSPMPSLLFSQHQQRLAQVQSPHQNYLNITPHLLYPHHSAEITGRFDSVGSSHSSRDKRSRSGRGKHSLRFSQPPSDTGSQNGDSGGIKFRSKYMSSEEIESILRMQHSASHSSDPYVVDYYHQACMAKRGATSKQKTNFSPTSMKDIPSKSRSSSDQHTYLQVDALGRVSFSSIRRPRSLLEVDHPSSADGSHDQKSTVRPLEKEPMLAARVTVEDALCLLLEVDDTDRLLQSSQSQDNIFQLKRRRQVLLEGLAASLQFVDPLGPSKSGHSSGLALKDDVVFLRIVSLPKGRKFLARYLRLLVPGSELTRIVCMAIFRHLRFLFGGLPSDSSAAETTVALAKTLSSCVHHMELGALSACLAAVVCSSEQPPLRPLGSSAGDGASLVIKSVLDRATELLTDRHAAASYTVPNRALWQASFDAFFGLLTKYCVSKFESIQQMFVMQAPSSGIGPEASKATSKEMPVELLRASLPHTNEQQRQRLLDFAQRSMPVTGFNPSGARGGHITSESVPG

SEQ ID NO: 1903 - DNA, 1788 bp, Sorghum bicolor
atggctgtgtcgggcgcccccgagcagccacagcgggagcagccacagcaggaccacgatgaggagatgctggtcccgcatcaggatgccattgaggggccgcagcaggatgttgttgagggtccgcagccgatggaagaatctgcatccgctgttgagaaccaacttgtgccagatacctccacatccagatttacatggtgtattgaaaatttttctaggcgcaatgttagaaagcactactctgacgattttattgttgggggatacaaatggcgagtgcttgtcttccccaggggaaataatggtgaccacctttcaatgtatctggatgttgctgattcaaacttgctgcctcctggttggagtaggaatgcacaattcagccttgctgtggtaaaccaattagacagcaaagcatcattaagaaaagaagctgaggttgctgtgcgtaaaacttttgatttctggaactatgactccaaaaggatgactggttatgttggcctgaagaatcaaggggctacctgttacatgaactctcttcttcagactttataccacattccctactttcgaaagcattgtgataacagcgttgctacaaaagagctcaccaaatcttttggatgggatagctatgattcgttcatgcagcatgatgtccaagagttgaatagggtcctatgcgaaaagctggaaaacaagatgaagggaacccccgtggaaggagcaatacaaaaattgttcgagggtcaccatatgaattatatcgagtgcattaatgttgactcaaaatcgaccaggaaagagtcattctatgatctcgcacttgatgtcaaaggatgttctgatgtctatgcatcatttgataagtatgttgcacaggagaggttagaaggcgataataagtatcaatctgaggaacatggtctacaggatgccaagaaaggaatgctttttattgacttccctccagttttgcaacttcagttgaaacggtttgaatatgattttgtgcgggatacaatgctcaagataaatgaccgttatgagttcccacttcaattggatcttgatagagatgatggaaaatatctttctccagatgcggatagaagtgtgcgtaacctatatactcttcacagcgtgctggttcatagcggcggagttcatggaggacattactatgccttcattcgcccgaagctgtctgatcaatggtacaagtttgaggatgaacgagtgacgaaagaagacatgaagcgggcattggaggaacaatatggtggtgaagaagagcttcctcataccaatgggcttaaaaatgctcctatcagatttacgaagcattcaaatgcttacatgcttgtttacatccgagaaagtgacaaagagaaaatcatctgcgatttagatgatgaagatataccagaccaccttaaggttaggttaagaaaggaacaggaagagaaggaatgcaagaaaaaagagaaggctgaggctcatatgttcactgcattgaaggaggagctttcgaaagaatttggcatcccagtagaatcccaacgattttgggtgtgggcaaaacgacagaactttacctacagacccagtcggccattgaccttcctggaggaaacatctgctgaagtaaaatttgaaccagcggtgatgtgtgtaccaattgagagcaatatttcgttccgttcaagtcaggttgtctacttcagattgcttgataaaccaaaagaagaaggcttctctctggagctgtatgtgttgtga

SEQ ID NO: 1904 - protein, 595 aa, Sorghum bicolor
MAVSGAPEQPQREQPQQDHDEEMLVPHQDAIEGPQQDVVEGPQPMEESASAVENQLVPDTSTSRFTWCIENFSRRNVRKHYSDDFIVGGYKWRVLVFPRGNNGDHLSMYLDVADSNLLPPGWSRNAQFSLAVVNQLDSKASLRKEAEVAVRKTFDFWNYDSKRMTGYVGLKNQGATCYMNSLLQTLYHIPYFRKHCDNSVATKELTKSFGWDSYDSFMQHDVQELNRVLCEKLENKMKGTPVEGAIQKLFEGHHMNYIECINVDSKSTRKESFYDLALDVKGCSDVYASFDKYVAQERLEGDNKYQSEEHGLQDAKKGMLFIDFPPVLQLQLKRFEYDFVRDTMLKINDRYEFPLQLDLDRDDGKYLSPDADRSVRNLYTLHSVLVHSGGVHGGHYYAFIRPKLSDQWYKFEDERVTKEDMKRALEEQYGGEEELPHTNGLKNAPIRFTKHSNAYMLVYIRESDKEKIICDLDDEDIPDHLKVRLRKEQEEKECKKKEKAEAHMFTALKEELSKEFGIPVESQRFWVWAKRQNFTYRPSRPLTFLEETSAEVKFEPAVMCVPIESNISFRSSQVVYFRLLDKPKEEGFSLELYVL

SEQ ID NO: 1905 - DNA, 2469 bp, Sorghum bicolor
atggggatccaggggctgctgccgcagttgaagtcaatcatggcgcccattagcgcggaggagctgcggggccagacggtggctgttgacacctactcctggctccacaagggcgctctatcctgcggcgaccgcctctgcaagggcatccccaccaccaggcatattgaatattgcatgcatcgggtcaacatgttgcggcattttggcgtcaaaccaattcttgtatttgatggaggccttctgccaataaagagctatcaagagacgaagcgggcaaggtcaagaaaggaaaaccttgagcgtgccagggaacatgaggctgctgggaactcacgtgctgcttttgagtgctatcagaaagctgttgacattacacctagaattgcttctgaactgatcgaggtactgaagaaagaaaaggttgattatattgttgcaccttatgaagcagatgcacaaatgacattcttatctgttaataaacttgttgatgctgtgatcactgaggattcagatttgataccatttggttgttctagaattattttcaaaatggacaaattcgggcaaggtgttgaatttcagattacacgactagagcgaaatagagagcttgactttaatggattcacaagacaaatgttactcgagatgtgtattttaagtggctgtgactatctcccctcattgccaggaatgggtgtgaaacgagctcatgcactcatccaaaagctaaagtgtcatgagaaggtgatcaagcacctgaggtatggtgctgtttctgttccacctcaatatgaagaggacttcaagaaggcaatctgggcatttaagttccaaagggtgtatgatcctgctacagaagatattattcatttgtcaagtgtgcctcatgacctcattgaagatttggaatttttgggcccatggttaccgcagaatattgccaaaggcattgctctagggaacattgatccactcacaaaggaaccattcgagatcaaaccagagtgcagtgcacctgctgttcataaggtttgtccaaccagagagcctactgcaccttcaaatgggaggaagaagctagatttgcctgtgcagaaaaacattttgaccaactatttctgcttagcatcccttgaggcaaaacggaaattcagggcgcctaaagtaacacataagcaacaaatattgaatgaatctttgcctagccctcaaactcaaggctctgatacccctgattcagtagaagatactaggttgccaacagatcacatccaagcttctcaatgtagctctgagcatttaagctctgaacctcctcaaaatgacccaatcagtgttggctctcagtgtagctctgagcgtttcagctgtgagtaccccctcgatgattcagacaatatttcacctcaatgcagttcacttgatggtggtattgatactccttgcaaggatacgagcattatagacagaaaggttgaggctgactatggcaacgaaaatacaatatctacaagttcttgtttagtgggaaatttgtcctggacatcagagccatttttacttccccataacgtggaaccatctataccagttcaacatcatactaaaagcattgtggcctctaaaaataataacattaccgtaaggagttcatacttcaaaacggtaaataagagagtttgcacagatcaagaagactatgatgttggtactggtaatctttctggagatcaactgaggaaatctggcatgttgaagagaagaaagctttctggcatccaagatttcaaagatgaaactttacaaccaattcattctgatgatagtccaccagtcgttgatgaagatcaagatacagatgatcctgatgatacaaatacaagaactgaaagaagatttggatgcaatgtttcccatgtgaatacatacagtggaattgcagaaaaatcaatggataagtttgctgcattggtatcatctttcagataccctggtccccgtgccagcggccttcgtgcccctttaaaggatgtgaagaacacactttctgtgagatctattctcaaagctccagaacaaggcacattcagacgcacagcaaataaaacaggtctagggcccccttcaaaaagcagatatacaagtgatgataagaaaagtgctgccagcccccctgatattagcacatttgcttataggcctatgaaaactgctgcttctgatcaaggcaaaaccacaggtaaagctacagacagtactgatggccctgctgatttgggaacgtttgcatacacatccgtggcacctgctgtctgctatcctgatcggagcaaatatgcaggcacagctacgagaattgcagacacccctcctgatctgagcacatttgcatataaacctgtgaaaggtgctgtcagaaatttgggtgggagcagattcacagggacagcactgaaagca

SEQ ID NO: 1906 - protein, 823 aa, Sorghum bicolor
MGIQGLLPQLKSIMAPISAEELRGQTVAVDTYSWLHKGALSCGDRLCKGIPTTRHIEYCMHRVNMLRHFGVKPILVFDGGLLPIKSYQETKRARSRKENLERAREHEAAGNSRAAFECYQKAVDITPRIASELIEVLKKEKVDYIVAPYEADAQMTFLSVNKLVDAVITEDSDLIPFGCSRIIFKMDKFGQGVEFQITRLERNRELDFNGFTRQMLLEMCILSGCDYLPSLPGMGVKRAHALIQKLKCHEKVIKHLRYGAVSVPPQYEEDFKKAIWAFKFQRVYDPATEDIIHLSSVPHDLIEDLEFLGPWLPQNIAKGIALGNIDPLTKEPFEIKPECSAPAVHKVCPTREPTAPSNGRKKLDLPVQKNILTNYFCLASLEAKRKFRAPKVTHKQQILNESLPSPQTQGSDTPDSVEDTRLPTDHIQASQCSSEHLSSEPPQNDPISVGSQCSSERFSCEYPLDDSDNISPQCSSLDGGIDTPCKDTSIIDRKVEADYGNENTISTSSCLVGNLSWTSEPFLLPHNVEPSIPVQHHTKSIVASKNNNITVRSSYFKTVNKRVCTDQEDYDVGTGNLSGDQLRKSGMLKRRKLSGIQDFKDETLQPIHSDDSPPVVDEDQDTDDPDDTNTRTERRFGCNVSHVNTYSGIAEKSMDKFAALVSSFRYPGPRASGLRAPLKDVKNTLSVRSILKAPEQGTFRRTANKTGLGPPSKSRYTSDDKKSAASPPDISTFAYRPMKTAASDQGKTTGKATDSTDGPADLGTFAYTSVAPAVCYPDRSKYAGTATRIADTPPDLSTFAYKPVKGAVRNLGGSRFTGTALKA

SEQ ID NO: 1907 - DNA, 870 bp, Sorghum bicolor
atgggctgctgcttcagcaagaagcgcaagacccgtccggtggccggggcctccgccttcccgcgccggtgcgagcccgagaaccgcgacccgccttcgccggaggaggagacggtcaaggaggtgctctcggagacaccgagcgctaagctgagggccgagcccaagcccgtcggcaatgccgtcgtcccagccgcggacgagcgggtagtggagaaggcgaagaagaagaagcaggacagcgtcgtcgacgccgcggtgagcgacctcacgggcagctgcgtgtcgctgtcgttcgccaccgacgagcggtccgaggcggcgtcggagtcgtcggtcgcgaccagctcggtggccgggccggagcggtcgccggggaggaagccagcatccaggaggcgcccggtctccgccgatctgggcccagcgcggcgcgaccgcgaccgctccgccgcggctgcctcctcctacggcgtccgctcccgcagcgcgcgggcgtcggcgtccccgccgccgccgcggcacgtgccacgggaccgctccgtccggcgttcgccgtcgccggcggcgaagcggcattcgtctgagccacgccgcgccgccagcccaactgcgcccgtagtgcagcggaagccgcctgtaccggcaaggccgtccggccgcgtctcgccgcggcgggcacaagaggcagcgactcctcctcgtcccgcctccccaccggaagacgacgacgccgtcaccgcggcatgtgagcccagcatcccggacggcagcaccggtggcgatgttcaaggtggccggggcggcgacgacgggaaagagtcgttggagaacccgctcgtgtcattggaatgtttcatctttctgtag

SEQ ID NO: 1908 - protein, 289 aa, Sorghum bicolor
MGCCFSKKRKTRPVAGASAFPRRCEPENRDPPSPEEETVKEVLSETPSAKLRAEPKPVGNAVVPAADERVVEKAKKKKQDSVVDAAVSDLTGSCVSLSFATDERSEAASESSVATSSVAGPERSPGRKPASRRRPVSADLGPARRDRDRSAAAASSYGVRSRSARASASPPPPRHVPRDRSVRRSPSPAAKRHSSEPRRAASPTAPVVQRKPPVPARPSGRVSPRRAQEAATPPRPASPPEDDDAVTAACEPSIPDGSTGGDVQGGRGGDDGKESLENPLVSLECFIFL

SEQ ID NO: 1909 - DNA, 357 bp, Sorghum bicolor
atgatctcccaggacacttccaattcgggctcagacaagggctcctccatgcagctccaggacttcctgccgttgatggcgaggaagctcggggcggagggactgattcaggagctctgcaaagggttccagcttctcatggaacccaggacaggcaagatcaccttccagagcctgaagcagaatgtggccaggctcgggcttggagaactccgtgacgatgagctcctggagatggtgagggaaggggatctggacgaggatggggcactggatcatatggagttctgcattctcatggtcagactgagccctgagctgatggaagaagaggcacacaggatgtttcaatattga

SEQ ID NO: 1910 - protein, 118 aa, Sorghum bicolor
MISQDTSNSGSDKGSSMQLQDFLPLMARKLGAEGLIQELCKGFQLLMEPRTGKITFQSLKQNVARLGLGELRDDELLEMVREGDLDEDGALDHMEFCILMVRLSPELMEEEAHRMFQY

SEQ ID NO: 1911 - DNA, 411 bp, Sorghum bicolor
atggacggcgcccagggcaacgtcgacgcggtcgagagccactgcgacgtcgtggcgcgggccttcgtggaacactactaccgcacgttcgacgccgaccgcgccgcgctggccgcgctctacggccagacctccatgctctccttcgagggccacgccgtcgcaggcgccgaggagatctgccggaagctggcgcagctgcccttcgagcaatgccggcacaccgtctgcaccgtcgactgccagccctcgccgtccttccccggcagcatcctggtgttcgtcagcgggaacctccagctcgccggcgaggagcaccagctgaggttcagccagatgtttcagttggtacccaacgagcaggggagcttcttcgtgcagaatgacatattccggctcaactacggctga

SEQ ID NO: 1912 - protein, 136 aa, Sorghum bicolor
MDGAQGNVDAVESHCDVVARAFVEHYYRTFDADRAALAALYGQTSMLSFEGHAVAGAEEICRKLAQLPFEQCRHTVCTVDCQPSPSFPGSILVFVSGNLQLAGEEHQLRFSQMFQLVPNEQGSFFVQNDIFRLNYG

SEQ ID NO: 1913 - DNA, 609 bp, Sorghum bicolor
atgatgaggtgcgtgagcgtgttcctggcgtgccttgtggcggcgtcggtgtcgtccaccgcgtccgcgttcgtgttcaaggcgggcggcacgggcgagtggcgcgtgcctgccgcggcggccgctagcggcaacgcaagcgcgtacaacgcgtgggcgcaacgcaaccgcttccgcgtgggtgacgccatcgctttcacgtacccgcccggcaacgactcggtgctcctcgtcgacaagaggtcctacgacgcctgcgacacgaacgcgccgatcgacaccttcgccgacggcagcaccgtgttcaccttcacccgctccggccccttctatttcatcagcggcaacaaggacaactgcaaccgcggcgagaagctgatcgtcgtcgtcatggcggagcgcgccgccatcggcaacggcaccgagcctggcacggggctggcgccatcccccaatggcccattctcgtccttctctccgccgccacccattggcatcgacatctcgccgacggcggcgtacccaccaaatgccgcggcgcccaagatggcaggagttgccggcgcggccgcgttcgccattggagccttgttctgcgcgcttgtttga

SEQ ID NO: 1914 - protein, 202 aa, Sorghum bicolor
MMRCVSVFLACLVAASVSSTASAFVFKAGGTGEWRVPAAAAASGNASAYNAWAQRNRFRVGDAIAFTYPPGNDSVLLVDKRSYDACDTNAPIDTFADGSTVFTFTRSGPFYFISGNKDNCNRGEKLIVVVMAERAAIGNGTEPGTGLAPSPNGPFSSFSPPPPIGIDISPTAAYPPNAAAPKMAGVAGAAAFAIGALFCALV

SEQ ID NO: 1915 - DNA, 900 bp, Sorghum bicolor
atggcgacagcgagtgagatcgcggcggtgggggtgatcggcgcggggcagatgggctcgggcatcgcccagctggccgccgccgccggctgtgccgtccttctcctcgacgccgaccccgccgccctctcccttgccgtcgcctccatctccgcctccctacgccgtctcgccgccaagggccagctctcccaggccgcgtgcgaagactcaatcaagcggataaggtgcgtctccaccgtgcaagatctcagggacgcggatcttgtgatcgaggccatcgtggagaaggaagatgtcaagaagaagctgttcgtggagctggataagatcacgaagtcctcggccatccttgcgtccaacactagctccatctctataacccgcctggcttcagctaccagacgcccctctcaggtcataggcatgcacttctttaaccctcctccgataatgaaactgatcgagattatccgaggagctgatacatcagatgaggtgtttgctgcagtcaaatctttttccgaaagacttgggaagtccgttatatgctcgcaagattacccaggattcattgtgaaccgcatcctcatgccgatgatcaatgaggctttttgggcactgtacaccggagtggcaaccaaagaggacattgacacagggatgaagttgggcacgaatcacccgatgggccctctgcagcttgccgatttcattgggttggatgtgtgcctttcagtacttcgggtacttcatagtggcctgggagataataagtacagcccttgccctcttcttgttcagtatgttgatgctggccggcttggaaagaagcgtggagtaggtgtatattcatatggacagaagtcttcatcagtcaggccaaagtcatctatgtaa

SEQ ID NO: 1916 - protein, 299 aa, Sorghum bicolor
MATASEIAAVGVIGAGQMGSGIAQLAAAAGCAVLLLDADPAALSLAVASISASLRRLAAKGQLSQAACEDSIKRIRCVSTVQDLRDADLVIEAIVEKEDVKKKLFVELDKITKSSAILASNTSSISITRLASATRRPSQVIGMHFFNPPPIMKLIEIIRGADTSDEVFAAVKSFSERLGKSVICSQDYPGFIVNRILMPMINEAFWALYTGVATKEDIDTGMKLGTNHPMGPLQLADFIGLDVCLSVLRVLHSGLGDNKYSPCPLLVQYVDAGRLGKKRGVGVYSYGQKSSSVRPKSSM

SEQ ID NO: 1917 - DNA, 1932 bp, Sorghum bicolor
atgggtctctccggctccggcgtcgcgttgttgcttgtgttcctcggcctctgcaccgccgtgtcgagctggacgccgccgccgccggagatgctgcacgagagcttcgcagggaagtcggagttcaggacggtgaaccggaggagtctgggcgtgtgctccaaaccgagcccgtacctggcgatcagcgtgagcaccggcggggcgccgctccccgacgaggcgttcgtcagggtgaccgtggccggcgtcctcaggcccgatgccgatgactgggtcgccatgatcacgccttccaactactccagtgtctccagatgccgtttgagtggtgaaaactacgtccagaccggcgatctagcgcatctcccgcttctgtgccactaccctgtcaaggcccagtacctgaggcacgaccctggctacttgggctgcaagaccgcggcatgccagaagcgcgacgcgtcgggcgcctgcagcgtccgcacctgcgccgccacgctcaccttccacgtcgtcaacttccgcaccgatgtcgagttcgtgctcttctccggcggtttccggacgccgtgcgtcctccagcggtccggcgcgctgcggttcgccaaccccgccagcccgctctacggccacctctccagcaccgactccacggcaacatcgatgaggcttacctgggtgagcggcgaccggaggccgcagcaggttcagtacggagtgggcaagtctgctacttctcaagtggcaacgttcacgcagaatgatatgtgcagtagccccttgttaccaagccctgccaaggatttcgggtggcatgaccctggctacattcacacggccgtcatgaccggcctccagccttctcagtcctacacctaccgctacggaagtgattctgtgggttggagtagcacaaacaaattcagaatgccaccagctgcaggctcagacgagacatcatttgtgatctatggtgatatggggaaggctccgctggacccatcagtggaacactacattcagcctggatcgatttctttggccaaggcagtggctaaagaaattcagacaggaaaggtcgattcagtcttccacataggagacataagctatgctacgggctttctggttgaatgggacttcttcctaaacctcatagcaccagtcgcttctcgagtcccctacatgaccgctattggtaatcacgaaagggattatgcagagtctggttctgtatatgtgaccccagattcaggtggtgaatgtggagttgcatatgagtcatatttccacatgccagctgtcagtaaggataagccatggtattcaattgagcaagggagcattcacttcgtcgtgatgtcaactgagcataagtggtcagagatgtcggagcagcacaaatggatgaatcaagatttgtcatcagtcaatagatcgaggacaccatgggtaattttcattgggcatagaccgatgtattcatcccatgtcggaataccagctaatgtagatccaatttttgtggcctctgttgagccactcttactcaagtaccaggtggatttggttttctttggccatgtacacaactatgagaggacttgtgcagtataccggagcatatgcaaaggcgagccaaagaaggatgcaagtcgaattgatacttatgacaacagcaaatatactgcgcctgttcatgccatcgttggagctggagggtttagcttggacaagttccctaagattgtgttgaacaagtggagcttatcaagagtttcagagttcgggtatgccagggtgcatgccacaagaggtgatatgctggttcagtttgtaagctcaaatactatggagattctggaccaatttagaattgtgaagccagatccggcaaggaggctacggaaccagccagttcaaccatag

SEQ ID NO: 1918 - protein, 643 aa, Sorghum bicolor
MGLSGSGVALLLVFLGLCTAVSSWTPPPPEMLHESFAGKSEFRTVNRRSLGVCSKPSPYLAISVSTGGAPLPDEAFVRVTVAGVLRPDADDWVAMITPSNYSSVSRCRLSGENYVQTGDLAHLPLLCHYPVKAQYLRHDPGYLGCKTAACQKRDASGACSVRTCAATLTFHVVNFRTDVEFVLFSGGFRTPCVLQRSGALRFANPASPLYGHLSSTDSTATSMRLTWVSGDRRPQQVQYGVGKSATSQVATFTQNDMCSSPLLPSPAKDFGWHDPGYIHTAVMTGLQPSQSYTYRYGSDSVGWSSTNKFRMPPAAGSDETSFVIYGDMGKAPLDPSVEHYIQPGSISLAKAVAKEIQTGKVDSVFHIGDISYATGFLVEWDFFLNLIAPVASRVPYMTAIGNHERDYAESGSVYVTPDSGGECGVAYESYFHMPAVSKDKPWYSIEQGSIHFVVMSTEHKWSEMSEQHKWMNQDLSSVNRSRTPWVIFIGHRPMYSSHVGIPANVDPIFVASVEPLLLKYQVDLVFFGHVHNYERTCAVYRSICKGEPKKDASRIDTYDNSKYTAPVHAIVGAGGFSLDKFPKIVLNKWSLSRVSEFGYARVHATRGDMLVQFVSSNTMEILDQFRIVKPDPARRLRNQPVQP

SEQ ID NO: 1919 - DNA, 1344 bp, Sorghum bicolor
atgagagagatcttgcacatccagggaggccaatgtggcaaccagatcggtgccaagttctgggaggtggtgtgtgatgaacatggcattgaccctactggccgctacactggcacttctgaccttcagttagagcgtgtcaatgtctactacaatgaggcctcctgtggccgctttgtgccccgtgctgttctcatggaccttgagcctgggacaatggacagtgtccgcactggaccctatgggcagatcttccgccctgacaactttgtgttcgggcaatctggtgctggtaacaactgggctaagggtcattacactgagggtgctgagctcattgactctgttcttgatgttgtgaggaaggaagctgagaactgtgactgcttgcaaggattccaagtatgccactcccttggtggtggtactggatctggtatgggtacactgttgatctcaaagatcagggaggagtaccctgaccgcatgatgctgacattctcagttttcccctcaccgaaagtatctgataccgtggttgagccatacaatgctaccctttctgttcatcagttggttgagaatgccgatgagtgtatggttcttgacaacgaggccctctatgacatttgcttcaggactcttaagctcaccactcctagctttggggatttgaaccatttgatctctgcaaccatgagtggagtcacctgctgcctaaggttccctggtcagctgaactctgacctcaggaagctggcagtgaacctgatcccctttccccgtctccacttcttcatggttggctttgcgcctttgacgtcccgtggctcccagcagtacagggccctcactgtccctgagctcacacaacagatgtgggacgccaagaacatgatgtgcgctgccgaccctcgccatgggcgttacctcaccgcctcggccatgttccgtgggaagatgagcaccaaggaggttgacgagcagatgataaatgtccagaacaagaactcgtcctacttcgtggagtggatccccaacaacgtgaagtccagcgtgtgtgacatccccccgaggggcctgtccatggcgtctaccttcatcggcaactcgacttccatccaggagatgttccggagggtgagcgagcagttcactgccatgttcaggaggaaggctttcttgcactggtacactggtgagggcatggacgagatggagttcaccgaggccgagagcaacatgaatgacctcgtgtcggagtaccagcagtaccaggatgcgactgccgatgatgagggcgagtacgaggacgaggaggacgtgcaaggagatgaaatgtga

SEQ ID NO: 1920 - protein, 447 aa, Sorghum bicolor
MREILHIQGGQCGNQIGAKFWEVVCDEHGIDPTGRYTGTSDLQLERVNVYYNEASCGRFVPRAVLMDLEPGTMDSVRTGPYGQIFRPDNFVFGQSGAGNNWAKGHYTEGAELIDSVLDVVRKEAENCDCLQGFQVCHSLGGGTGSGMGTLLISKIREEYPDRMMLTFSVFPSPKVSDTVVEPYNATLSVHQLVENADECMVLDNEALYDICFRTLKLTTPSFGDLNHLISATMSGVTCCLRFPGQLNSDLRKLAVNLIPFPRLHFFMVGFAPLTSRGSQQYRALTVPELTQQMWDAKNMMCAADPRHGRYLTASAMFRGKMSTKEVDEQMINVQNKNSSYFVEWIPNNVKSSVCDIPPRGLSMASTFIGNSTSIQEMFRRVSEQFTAMFRRKAFLHWYTGEGMDEMEFTEAESNMNDLVSEYQQYQDATADDEGEYEDEEDVQGDEM

SEQ ID NO: 1921 - DNA, 1266 bp, Sorghum bicolor
atgatcctggtgcggcgcctggcgggggccacccgcccgcggggcctcgctggtcgaggcctcgcgtcgcggacctcgggggcgccgcgggaggcggcggacgccgtggtggtgggcgcgggcgtcgtcggcctcgcggcggcgcgggcgctggcgatggccgggcgcgaggtggtcgtggtcgaggcggcccccagcttcggcaccggcgccagttcccgtaacagcgaggtcatccacgccggcatctactaccctccgcgaagcctcaaggctaccctttgtgtaaggggaaaggaaatgctctacaagtactgcaaagaacgaggtgttgcccacaaacgaatcagcaaactcatcgttgccactggtgctgcagaggttccaaagctggacatgctcctcaggaatgccaaagaaaatggggtggatgatcttcagttgatggagggttctgaagctatggagatggaacctgagcttcgatgccttaaagctttactatcacctagtactgggataattgactctcattcactcatgctctcccttttggctgatgctgaaaacttgggaacaactgtatcatataacacagcagttatcagtgcacatgttggatccgaaggccttgaactccatgtttgcgaaagcaaagagctgcagaactgtcatgtagagtctcatgtgaactcacagattgttttgcttccgaagcttgtgataaactcagcaggtctgagtgcagttccacttgccaaacaattttgtggccttgaccaggcatttgtgcccactcctcactatgcgcgtggatgttacttcaccctctctcaaaccaagagtcctttcaggcgcttaatatatcctctgccagaggatggtggcataggggtccatgtcactatagatatgaacggccttgtcagatttggtccagacgttgaatggatatctgatggtggaaaggaccatgtgtcatgttttctgaataagtttgattactcagtaaatcccaaccgctgttctgtattttaccctgtggtaaggaagtattttccaaatctcaaggatgggtctttggaacctggttattctgggatccgaccaaagctttctggtcctggacaacccccttcagattttgttattcagggatgggatgtccatggtattcctggactggttaatttgtttggaatagaatcccctggtttgacatcaagcttggcaattgctgaacacattgtttcaaaatatttgtga

SEQ ID NO: 1922 - protein, 421 aa, Sorghum bicolor
MILVRRLAGATRPRGLAGRGLASRTSGAPREAADAVVVGAGVVGLAAARALAMAGREVVVVEAAPSFGTGASSRNSEVIHAGIYYPPRSLKATLCVRGKEMLYKYCKERGVAHKRISKLIVATGAAEVPKLDMLLRNAKENGVDDLQLMEGSEAMEMEPELRCLKALLSPSTGIIDSHSLMLSLLADAENLGTTVSYNTAVISAHVGSEGLELHVCESKELQNCHVESHVNSQIVLLPKLVINSAGLSAVPLAKQFCGLDQAFVPTPHYARGCYFTLSQTKSPFRRLIYPLPEDGGIGVHVTIDMNGLVRFGPDVEWISDGGKDHVSCFLNKFDYSVNPNRCSVFYPVVRKYFPNLKDGSLEPGYSGIRPKLSGPGQPPSDFVIQGWDVHGIPGLVNLFGIESPGLTSSLAIAEHIVSKYL

SEQ ID NO: 1923 - DNA, 1242 bp, Sorghum bicolor
atggctgccgcctttaccgtcatctctctcctgctatcggtctgcgtccagggcgcggctcccgttctcagcttcacaaggagcgacttccctgaagatttcgtcttcggatccgccacctcggcttatcagtatgagggtgctgttgctgaggatggtaggagcccaagcatctgggataccttcacccacgcaggaaacatgccggacaaaagcaatggtgatatagccgccgacgggtacaacaagtacaaggacgatgttaagctcgtaattgacagtaacctggaggcatatagattctctatctcctggtccaggcttataccaaatggacgaggtgctattaatccaaaagggttagagtactataacaatctcatagatgagctagctacacatggtgtccaagtccatgttatgattagccagctcgatccccctcagatcctggaagacgaatatggtggatggttaagcccaaagattgtggaggatttcacggcatatgcagatgtgtgcttcagggagtttggtgacagggtttcacactggaccactctggatgaagtcaatgtggctgcacttgggtcctatgatattgggcaaattgcaccaggaagatgttctgatccgtttggatttggaacaaaaaaatgtacagtggggaactcaagtgtggaaccatatatagcagctcataacatgctactggcacatgcgtcagctaccagactgtacagagaaaaataccaagctgtacaaaaaggagttgttggcataaatatatatacaatgtgggcatacccactaacaaactccactgccgatttagaagcatctcaaagatttctggacttctattgcggctggatactagaaccattggtgtttggagattatccaagtgtagtgaagaagaatgttggttctcgccttccgtcattcagaaaagttcaatctgaagccattcgtggcactatagatttcattggaataaaccactatctttctgtctatgtgaatgaccaccctttagaaaaaggcatccgtgacttcgtactggacgtcgctgctgactatagaggtaaagcaatttgtcacttgatacaggattatccttttactgcttgcaattctttagatacatccctgggacttttgattcattcatctagtgtcacatacacaatggcctacgaaaattcaacatggtatcacatggaccaaataatttgctga

SEQ ID NO: 1924 - protein, 413 aa, Sorghum bicolor
MAAAFTVISLLLSVCVQGAAPVLSFTRSDFPEDFVFGSATSAYQYEGAVAEDGRSPSIWDTFTHAGNMPDKSNGDIAADGYNKYKDDVKLVIDSNLEAYRFSISWSRLIPNGRGAINPKGLEYYNNLIDELATHGVQVHVMISQLDPPQILEDEYGGWLSPKIVEDFTAYADVCFREFGDRVSHWTTLDEVNVAALGSYDIGQIAPGRCSDPFGFGTKKCTVGNSSVEPYIAAHNMLLAHASATRLYREKYQAVQKGVVGINIYTMWAYPLTNSTADLEASQRFLDFYCGWILEPLVFGDYPSVVKKNVGSRLPSFRKVQSEAIRGTIDFIGINHYLSVYVNDHPLEKGIRDFVLDVAADYRGKAICHLIQDYPFTACNSLDTSLGLLIHSSSVTYTMAYENSTWYHMDQIIC

SEQ ID NO: 1925 - DNA, 2700 bp, Sorghum bicolor
atgggctgcgcctccaagctgctctcctccctcctcctcacctcctccccgctccgcctccgacccaccactactgccgccgccgccgcgctcttcctctccccgcccgcggcggcctcgcgccgcctgctcctgctctcctcgccctccccgccccgcaccctctccacctcgtccgctgctgccgcgtcctcctcccttccgcacggctccagctcggactccccggcgccaccaccccgagctcctttccccgagtggtcccgcctcgtcgaccgacttgccgccgccgggtacggctccggcgcgccctttcctgatgacgagctcgccctcgcgtccggatgcggtctgccggacggggcgcaggccgctgtctccacctgcctcgccttcgcgcttgaccggcctggcctcctcagttcgcttccaaggaaggatgtggaggtcctggtgaccaatgcggcgccgtctctgttcaaggatggggaggcatcagcacagcggcttcggcgctaccttgctggggaagaaatcaatgtcattgtttcagagagagctgaaactgttgatattgttcgatatctgctaagttacacatacggttcttctgacagctacccagaagacaaggaactcactgattctgctgtgagaaatatcatggctgagttagtcagttttagtggtccccagtcttccacttttgcggaatcaactcccaaccaaagttgcttgagtcagcatgaacgattttccaggcctccagggcaaaatattgaaatgaagcgaggtgactggatttgcacaagatgtagcttcatgaactttgcaagaaatgttaggtgtcttgagtgcaatgagcagcggccaaagaagatgttgactggtggagagtgggaatgccctcagtgtgatttctataattatgggaggaatatgtcatgcttaaaatgtgattgcaagaggccagcaacaatcccactgaatcctgcatctgttggtgctggtttaggtggtgtggcgcagcttcttaatgtaacgagtgttggtaaatctgaagttgagagaaagcttgctgaaaatgatgaaaaggcagaaagatggttgagcaaagtatctcaacttaatgattcagctgacttaagtagtctagcagaagatgaggactttcctgagattatgcctatgcgcaagggggtgaataagtttgtggttagcacgcgcaaaacaccactggagagaaggcttgcaaatgcacagtacagcagcaacaatagccccacattatctgacccaaagataagtcaaactttggacaggatacttgggcgttcaactcctactgcagccccaaacaatcaatctgttactagtgacaccaccactgaagctccgaagaaatcaatagaccacctcggtggcattgatcctgttccatttgtgcccctgtctgcagatctcttcgctaaaccacagagtaataatggacagagaaatgagaatgaaaaattcagtgcagaagatgacagttccatggcaaataacacagtgcctttacctgagaggaaaagtacggaatcattagataccactgagaaatggtccgagaaagtagcagaactggacaatgtaaaggattccccaagtgcaatttctgatgaaaattttcctgagattatgccaataaggaaaggtgaaaaccgatttgttgttagtaagaaaaaagatcgctcattgacatcacaacagtacaaaaggcgtagtattcttgagcaggcagacagttctgattttgtcccatttgttccatttcctcctggctactttgcaaagaaagatacgccaataaagagtactacagacacaggagttatgtcagaaggcagtcagccaaaaggtaacctgaataatgagaactggaacagaaattactatcagcatcaatcacaatctcatggggcgcaatctaggcctagtggtactgcatatactggcactcagatcacgggcaactcccaggggaactataatggtggcagaggtgaatctacttaccatgaaactaactttgaacagcaaccttataactcaggttatagcaacagcagttattggagcagtgataacaaaaacagcaacaattcctggagtgaaaacagcagttataataacaataatgcttggagtggtaacaactcctataacagcagtactaggaacggcaatagcagcgacaacagcagtcatggttataattacaatggtacatggaatgacagcagcaacagcaacaataaccaaagtggttcatttgctgataataacagtgtcagtagcagcagtagttccatgaatgctaatcacacggttcacagttcaggttatgaagggaactcaaacagaggttatactggaaagagcttggaaggatctgctgtaaaggatcctgatcctctagacatgtctgaggaagctaaggcagagagatggtttaggagggcagctcagataaaggacatctctgagctagcaaacattcccgacgaggacttccctgagataatgccgatgaggaagggggtgaacagattcgttgtgagcaagaggaagacaccattggagaggagattaacatccccgcaatacagaaggaacctgccaatcgtcagttctgaaatggacaaagatgccagctga

SEQ ID NO: 1926 - protein, 899 aa, Sorghum bicolor
MGCASKLLSSLLLTSSPLRLRPTTTAAAAALFLSPPAAASRRLLLLSSPSPPRTLSTSSAAAASSSLPHGSSSDSPAPPPRAPFPEWSRLVDRLAAAGYGSGAPFPDDELALASGCGLPDGAQAAVSTCLAFALDRPGLLSSLPRKDVEVLVTNAAPSLFKDGEASAQRLRRYLAGEEINVIVSERAETVDIVRYLLSYTYGSSDSYPEDKELTDSAVRNIMAELVSFSGPQSSTFAESTPNQSCLSQHERFSRPPGQNIEMKRGDWICTRCSFMNFARNVRCLECNEQRPKKMLTGGEWECPQCDFYNYGRNMSCLKCDCKRPATIPLNPASVGAGLGGVAQLLNVTSVGKSEVERKLAENDEKAERWLSKVSQLNDSADLSSLAEDEDFPEIMPMRKGVNKFVVSTRKTPLERRLANAQYSSNNSPTLSDPKISQTLDRILGRSTPTAAPNNQSVTSDTTTEAPKKSIDHLGGIDPVPFVPLSADLFAKPQSNNGQRNENEKFSAEDDSSMANNTVPLPERKSTESLDTTEKWSEKVAELDNVKDSPSAISDENFPEIMPIRKGENRFVVSKKKDRSLTSQQYKRRSILEQADSSDFVPFVPFPPGYFAKKDTPIKSTTDTGVMSEGSQPKGNLNNENWNRNYYQHQSQSHGAQSRPSGTAYTGTQITGNSQGNYNGGRGESTYHETNFEQQPYNSGYSNSSYWSSDNKNSNNSWSENSSYNNNNAWSGNNSYNSSTRNGNSSDNSSHGYNYNGTWNDSSNSNNNQSGSFADNNSVSSSSSSMNANHTVHSSGYEGNSNRGYTGKSLEGSAVKDPDPLDMSEEAKAERWFRRAAQIKDISELANIPDEDFPEIMPMRKGVNRFVVSKRKTPLERRLTSPQYRRNLPIVSSEMDKDAS

SEQ ID NO: 1927 - DNA, 1554 bp, Sorghum bicolor
atgttgcgcagagtcctcctcgcgagagcgatcccactctcctccgcctcctacgggttccccaaaccgctaagccctcccctccgcatcggtggaccgcgcctagccacttcttccggggaccccgtcgcggacggtggcatcggcggcgaagatgaccctttctccttcccggaccactaccacaagcagctcccgcccgatgtcgcccgaggggtggacgccctcgtagccgctgccgaggctaccggctccagtgccgcgggcgccgcgcgggccctcgacgggtgcggcgccgaggcgtccgagccgctcgtggtggccgcgctgtcgcgcctccgcaacagctgcgccgccgctcatgctgcgttccggtgggccgcggcgcagcccgggtacgcgccgggtcggcgcgcgtgccactccatgctcgccatcctcgccaagcaccgccgcttcgacgccgcgcgcgccctgctcgacgaaatgcgccgcgcgtcgatggcgtctccggccgcggtactcctcctcgtccggcgccactgcgccgcgagggacgtcgcggcagccgtcgctgccttccgagcgctcccgagcttcggattcgacactggcgtcgccgagttccatggcctcctgagcgcgctttgccggtacaagaacgtgcaggacgcggagcatttgctgatatcctgcgagaaggagttccccttcgagaccaagagcttcaacatcgtcctcaacgggtggtgtaacattgtctgcagcttgcgcgaggcgaagaggttttggagctccatggagaggaagggcattgacagggatgttgtgtcgtatgggagcatgatctcctgcttctcaaaagctgggagccttcactcagtcatgaaactctttaaccacatgaatgaggctggcgttgctccagatcggaaagtgtacaatgctattgtgtttgctctagccaagggtcggtgtgtgaaggcggcaaagatgcttgtcaggactatggaggagaagcaggttgccccagacacagccacttttaactctctcattggccccctttgtaaggctcgtcaggttcaggaggcaatggaaatgtttgatgctatgttagaaagggggctgtctccttcagtaaggacctttcacgcgttgcttaatgtggctaggaactctactgaagtgtttgatctcttggataagatgaaacagttgcagtgtgagccagagatggacacttacattatgttgatcagaaaattctgccggtggagacagcatgagagtgtggagaagttgtggagtgcaatgcctgcaaatgggctgagccctgaccggagcgcgtacattgtgttgatacatggtttattcctgaacggaagactagaggaggcagcaaagtattacggagagatgaaaagtaaaggcttttcgccagagaaaaagactgaagaaatgataacggcttggcttgaaggcagagagcttgcgaaggcgtcagttagctctaagggtggttcagtgtctctcaagcttcccaaaaagtaa

SEQ ID NO: 1928 - protein, 517 aa, Sorghum bicolor
MLRRVLLARAIPLSSASYGFPKPLSPPLRIGGPRLATSSGDPVADGGIGGEDDPFSFPDHYHKQLPPDVARGVDALVAAAEATGSSAAGAARALDGCGAEASEPLVVAALSRLRNSCAAAHAAFRWAAAQPGYAPGRRACHSMLAILAKHRRFDAARALLDEMRRASMASPAAVLLLVRRHCAARDVAAAVAAFRALPSFGFDTGVAEFHGLLSALCRYKNVQDAEHLLISCEKEFPFETKSFNIVLNGWCNIVCSLREAKRFWSSMERKGIDRDVVSYGSMISCFSKAGSLHSVMKLFNHMNEAGVAPDRKVYNAIVFALAKGRCVKAAKMLVRTMEEKQVAPDTATFNSLIGPLCKARQVQEAMEMFDAMLERGLSPSVRTFHALLNVARNSTEVFDLLDKMKQLQCEPEMDTYIMLIRKFCRWRQHESVEKLWSAMPANGLSPDRSAYIVLIHGLFLNGRLEEAAKYYGEMKSKGFSPEKKTEEMITAWLEGRELAKASVSSKGGSVSLKLPKK

SEQ ID NO: 1929 - DNA, 1680 bp, Sorghum bicolor
atggcgagctcgggagtttcgtggacgctgccagaccacccgaagctccccaaggggaagccggtggccgtcgtcgtgctggacggatggggtgaggccagccccgaccagtacaactgcatccatgtcgctcagactcctgtcatggactcgctaaagaatggtgctcctgagaaatggacactagtgaaggctcatggaacagctgtgggtctcccatctgatgatgacatgggcaacagtgaagttggccacaatgcacttggtgctggtcggatttttgcccaaggtgctaagcttgtcgatagtgctcttgcctctggaaagatttatagtggagatgggttcaactacatcaaagaatcttttgaaagtggtactcttcaccttattgggttgttgagtgatggtggtgtccactctcgtcttgaccaactgcagttacttctgaaaggtgccagtgagaggggagcaaaaaaaatccgtgtgcacatccttaccgatgggcgtgatgttttggatggcagcagtgttggtttcgtggagaccctagagaatgatctttcggagcttcgagggaagggtattgatgcacaaattgcatctggtggtggaaggatgtatgttaccatggaccgttatgagaatgactgggatgtggttaaacgtggctgggatgcccaggtgcttggagaagcaccctacaaattcaaaagtgcacttgaggctgtgaaaacactgagagcacagcccaatgctaatgatcagtacttgcccccatttgtgattgttgacgacagtggcaaagctgttgggcctgtattagatggtgatgcagttgtcactctcaacttccgagctgatcgcatggttatgcttgccaaagcactagaatacgcagattttgacaaatttgaccgtgttcgtgtccccaaaatccgatatgctgggatgcttcagtatgatggtgagttgaagcttccaagccgttaccttgtttccccaccagagatagatagaacatctggggagtacttggtgaagaatggcgtccgcacctttgcttgcagtgagacagtgaaattcggccatgtcacatttttctggaacggcaaccgttcaggatactttgatgaaactaaggaagagtatgtagaagttcctagtgacagtggtattacattcaatgttgcacccaagatgaaggcgcttgaaattgctgagaaagccagggatgctctcctaagtggaaagtttgaccaggtacgtgtcaacctgccaaatggtgacatggttggtcacactggtgatattgaggccaccgttgttgcttgcaaggcagctgatgaagctgttaagattattttggatgctgtcgagcaagttggtggtatttaccttgttactgccgatcatggcaatgcagaggatatggtgaaaaggaacaaagctggcaagccattgctcgacaagaatggtggtatccagattctaacctcgcatacccttcagccagtcccggttgccattggaggccctggtcttcactccggagtgaaattccggaaggacattgaaacccctgggctcgccaacgtcgcggcgactgtgatgaacctccatggatttgtggcccctgctgactacgagcaaaccctgattgaagtggctgacaactaa

SEQ ID NO: 1930 - protein, 559 aa, Sorghum bicolor
MASSGVSWTLPDHPKLPKGKPVAVVVLDGWGEASPDQYNCIHVAQTPVMDSLKNGAPEKWTLVKAHGTAVGLPSDDDMGNSEVGHNALGAGRIFAQGAKLVDSALASGKIYSGDGFNYIKESFESGTLHLIGLLSDGGVHSRLDQLQLLLKGASERGAKKIRVHILTDGRDVLDGSSVGFVETLENDLSELRGKGIDAQIASGGGRMYVTMDRYENDWDVVKRGWDAQVLGEAPYKFKSALEAVKTLRAQPNANDQYLPPFVIVDDSGKAVGPVLDGDAVVTLNFRADRMVMLAKALEYADFDKFDRVRVPKIRYAGMLQYDGELKLPSRYLVSPPEIDRTSGEYLVKNGVRTFACSETVKFGHVTFFWNGNRSGYFDETKEEYVEVPSDSGITFNVAPKMKALEIAEKARDALLSGKFDQVRVNLPNGDMVGHTGDIEATVVACKAADEAVKIILDAVEQVGGIYLVTADHGNAEDMVKRNKAGKPLLDKNGGIQILTSHTLQPVPVAIGGPGLHSGVKFRKDIETPGLANVAATVMNLHGFVAPADYEQTLIEVADN

SEQ ID NO: 1931 - DNA, 1908 bp, Sorghum bicolor
atgcaacatcttacagtgatagcctttttggctgcttctctcctcattgcaagcattccacatgccaaaagtgctgatctgaactctgacaaacaggctcttctcgcatttgctgcatcactgcctcatggcaggaagctcaactggagctccaccacacctgtctgcacttcttgggtgggggtgacatgcacaccagataagagccgtgtacatacactgcgcctacctgctgtaggactttttggtccaataccatcagacactcttgggaagcttgatgccctggaggtattgagccttaggtcaaatcgccttactgtcgacctccctcctgatgtaggatctattcctgccctccattccctctaccttcagcataataacctgtctggaatcataccaacttccctctcttccagcttaacgttcttagacctttcatacaacactttcgatggagaaatcccattgaaagtgcaaaatcttactcaacttactgcattgcttctccagaacaactcactttctggacccattcctgacctccaacttcctaaattgagacatttgaatttgagcaacaataacctcagtgggccaataccaccttccttgcagaggtttccatcaagttccttcttagggaatgtttttctgtgtgggtttcctttggaaccatgttttggaactgcacctactccttctccagtatcaccaccatcaaccaataagaccaagaagagcttctggaaaaagatcagaactggtgtgctaattgcaattgctgctgttggaggggtattgttgcttattttgattatcacgctcttgatatgtattttcaagagaaagagacacactgaacctaccacagcttcgtccaaaggaaaggctattgctggtggcagggcagaaaaccctaaggaagactacagcagtggtgttcaggaagcagagaggaataaattggttttcttcgagggcagttcatataattttgacttggaggatttgttgagagcttctgctgaagtccttggaaaaggaagttatggaaccacctacaaagctgttcttgaggatggaaccacagttgttgtcaagagattgaaggaagtggtggttagcaagaaggattttgaacagcagatggagatagttggtagggttggccagcatcaaaatgtcattccattgcgggcttactattactccaaggatgagaagctgttggtgtttgattatgtcccatctggtagccttgctgctgttttgcatgggaataaagcttctggaagagctccattgaactgggagacaagagtcaagatatctctggatgtagcccgcggtattgcccatcttcatgctgagggaggagggaagttcatccatggcaacatcaaagcatcgaatgtccttctatcacagaacctcgacggctgtgtctctgagtttggcttggcacagatcatgaccactccacagactgcgccacggcttgttggataccgagcaccagaagtcctcgagactaaaaaatccactcagaagtccgacgtctacagctttggtgtcttgctccttgaaatgctaactggaaaagcccctctcagatcccctgggcgcgaggattccatagaacaccttccaagatgggtgcagtctgtggttcgtgaagagtggaccgctgaggtcttcgacgtggacttgttaaggcatcccaacgtcgaggatgagatggtccagatgctccagatcgcaatggcatgcgtggccattgcccccgagcagcggcctaagatggaggaggtgatcaggaggatcacggagatccggaattcttactcttctgggacaaggacgcccctggaggacaagccagagactgcacaagcaccatga

SEQ ID NO: 1932 - protein, 635 aa, Sorghum bicolor
MQHLTVIAFLAASLLIASIPHAKSADLNSDKQALLAFAASLPHGRKLNWSSTTPVCTSWVGVTCTPDKSRVHTLRLPAVGLFGPIPSDTLGKLDALEVLSLRSNRLTVDLPPDVGSIPALHSLYLQHNNLSGIIPTSLSSSLTFLDLSYNTFDGEIPLKVQNLTQLTALLLQNNSLSGPIPDLQLPKLRHLNLSNNNLSGPIPPSLQRFPSSSFLGNVFLCGFPLEPCFGTAPTPSPVSPPSTNKTKKSFWKKIRTGVLIAIAAVGGVLLLILIITLLICIFKRKRHTEPTTASSKGKAIAGGRAENPKEDYSSGVQEAERNKLVFFEGSSYNFDLEDLLRASAEVLGKGSYGTTYKAVLEDGTTVVVKRLKEVVVSKKDFEQQMEIVGRVGQHQNVIPLRAYYYSKDEKLLVFDYVPSGSLAAVLHGNKASGRAPLNWETRVKISLDVARGIAHLHAEGGGKFIHGNIKASNVLLSQNLDGCVSEFGLAQIMTTPQTAPRLVGYRAPEVLETKKSTQKSDVYSFGVLLLEMLTGKAPLRSPGREDSIEHLPRWVQSVVREEWTAEVFDVDLLRHPNVEDEMVQMLQIAMACVAIAPEQRPKMEEVIRRITEIRNSYSSGTRTPLEDKPETAQAP

SEQ ID NO: 1933 - DNA, 492 bp, Sorghum bicolor
atggccatgagggctcttccgctgaccccttccaagacctcctcgtttggagctcaccaaatcaggccgagcagtggcaacctcagatcagttagagcttatgcaaagggaaatgaggaggagggcaacaagcagtccctattcggaagcatcaccgaggcgctggacttctcgcaagtccggtcggagaaggatgccgagctgctgtatgaggccagggagtccaccaaaggtggagggaggatgacgagggaacagtacggagcactgaggcggaagattggtggcacctaccaggatttcttcaagtcatatgttgatgtcgatgggcaatacgtggaggaaggttgggtcgataagacctgcaagatctgcaagaaggacacaaggggggagccaagacaggttgacaaactaggaagatatgctcatgtggcatgcttggagaacccaaaaccgatgaacttctttgccaaaatcttcgccagatga

SEQ ID NO: 1934 - protein, 163 aa, Sorghum bicolor
MAMRALPLTPSKTSSFGAHQIRPSSGNLRSVRAYAKGNEEEGNKQSLFGSITEALDFSQVRSEKDAELLYEARESTKGGGRMTREQYGALRRKIGGTYQDFFKSYVDVDGQYVEEGWVDKTCKICKKDTRGEPRQVDKLGRYAHVACLENPKPMNFFAKIFAR

SEQ ID NO: 1935 - DNA, 783 bp, Sorghum bicolor
atgcaacaaaccctaagtgacagctctgcccgttggacttccaccagcagggagagagtcgatgagatcgggaagaagatcaagcgagagccggatacagccgccctcgccgtcgctgtcgcctccgcctccactgtaccggccgacaaccacatcccacaccgcctcggcctcggcctcggcggtgtcctcaacaccttgacaccgtgcgccgcgtgcaagctcctccgccgccgctgcgcgcaggagtgccccttcgccccctacttctcgccgcacgaaccccacaagttcgccgccgtccacaaggtcttcggcgccagcaacgtctccaagttgctcttggaggtggcggaaggggagagggcggacgcagcgagcagcctggtgtacgaggcgaacctccggctgcgggatccggtgtacggctgcatgggcgccatctccatgctgcagcaacaggtgaacgcgttggaggccgagctggaggcggtgagggccgagatcctcaagcacaggtaccggcaggccggcggcggcaaccgtctcattgacgacgacgcgcatgctacggccagctttgtggctcctgcgtcggctccggtgcacgttaatgacgtggtatcggtggtggaggcaggccaggaggttgcagccaccggcggcggcgcgtcggggatgtcgacgtcgtcggcggtgtacgttgcggaagccgagcagccggcgagtactaatcactatagctcccgtaacccaagtgagcatcctgcatactttggttga

SEQ ID NO: 1936 - protein, 260 aa, Sorghum bicolor
MQQTLSDSSARWTSTSRERVDEIGKKIKREPDTAALAVAVASASTVPADNHIPHRLGLGLGGVLNTLTPCAACKLLRRRCAQECPFAPYFSPHEPHKFAAVHKVFGASNVSKLLLEVAEGERADAASSLVYEANLRLRDPVYGCMGAISMLQQQVNALEAELEAVRAEILKHRYRQAGGGNRLIDDDAHATASFVAPASAPVHVNDVVSVVEAGQEVAATGGGASGMSTSSAVYVAEAEQPASTNHYSSRNPSEHPAYFG

SEQ ID NO: 1937 - DNA, 981 bp, Sorghum bicolor
atgcttcgtctccccaccctcaccgcccttaaaccctcaacccccagcgccagctggaaccctgtcggctgcagccatggccgccgccgcaagctcatcttcgcctcatccgctcctccgccgtcttcttcgtcttcacggcctccgaagccgacctcgaatcccgaaccaccaaagcccacacatgaggcccgcagccggaacccggatgactccaccgaggcggggttccccaggactaaaccccggaagccgcgccgtggccgccgcagcgaagcggtggccgtggaggacttcgtccgcggccgcctcgagcaggtcttcgcctccatccgggagcgcaaccccgacgtcctcgagggcaaaggcgacatcctgaagccaaaggccgaggaggagcaagtaccagacgaggaggagggagagggagagggagaacagaagcctgtggtggaagaagaggacccgagctggccgctggatgctgatgtcgggtgggggatccgggcgtcagagtacttcgacaagcactcgatcagaaatgtcacggtggacggggtggagatcgattgggaaggggaggtcgacgaggggtgggtcaaggaaatcaattgcttggagtgggagagcttcgcattccaccccagccccttagtcgtcctagtcttcgagcgctacaacagggctgctgacaattggaagtttcttcaagaattggaaaaggctgctaaggtatactggaatgctaaagatcgcttacctcctcggacagtcaaagttgatataaatattgagagagatttggcatatgcacttcaagtaagagaatgtccacaattattgttccttaggggaaacaagatcttatacagagaaaaagagataaggactgcagatgagctggttcaaatgattgcccatttctactacaatgcaaggaggccatcttgcgttaatcctgaagccgttgcttctttctag

SEQ ID NO: 1938 - protein, 326 aa, Sorghum bicolor
MLRLPTLTALKPSTPSASWNPVGCSHGRRRKLIFASSAPPPSSSSSRPPKPTSNPEPPKPTHEARSRNPDDSTEAGFPRTKPRKPRRGRRSEAVAVEDFVRGRLEQVFASIRERNPDVLEGKGDILKPKAEEEQVPDEEEGEGEGEQKPVVEEEDPSWPLDADVGWGIRASEYFDKHSIRNVTVDGVEIDWEGEVDEGWVKEINCLEWESFAFHPSPLVVLVFERYNRAADNWKFLQELEKAAKVYWNAKDRLPPRTVKVDINIERDLAYALQVRECPQLLFLRGNKILYREKEIRTADELVQMIAHFYYNARRPSCVNPEAVASF

SEQ ID NO: 1939 - DNA, 186 bp, Sorghum bicolor
atgaaggtgtgtatgctaccacgcataacttcccacatccaagtaactggatcaagaaagatatcgctacacagcagcaacggattaatgtcgcttatgaatatgtttagcgctgacgttgtagaatctgatcagcactggaccgtcaataagcttcacgcggatactgagacgaaatccgaataa

SEQ ID NO: 1940 - protein, 61 aa, Sorghum bicolor
MKVCMLPRITSHIQVTGSRKISLHSSNGLMSLMNMFSADVVESDQHWTVNKLHADTETKSE

SEQ ID NO: 1941 - DNA, 957 bp, Sorghum bicolor
atggctcagtacagagacaatatcaagtatgaagaggacttctttgtgaattcacgaggaaacaggctgttcacctgcagttggacgccgaggaaatcacagagcagagctctgatctttatctgccatgggtacggaggtgagtgcagcatatccatgggagatacggccgctcgattagtacaccgtggctatgctgttcacggaatcgaccacgagggccacggcaaatcttcaggctcgaaaggctacatatcgagcttcagcgacatcgtcagagactgctctgaccatttcaagagtgtctgtgagaaacaggagaacgggctaaagaagaggttcctctacggcttctccatgggaggaaccgtggtgcttcagctgcatcggaaggaccctctctattgggacggtgccgtgttgcttgcccctttttgcaagatgttcgataacatgcgtcctcacccgatcatcgtcagcacactgaagatgatcagcaccgttgcgcctagctggagagtcatccctgccatagacatgattgacaaagtctgcaaagatccccagttcaagaaagagatccgttccaacccgtacatgtacaaaggaaacctcgcactgcaaacaggccgcgaactcctctccgtcggcctagacaccgagaagaacctgcacgaggtctcgttgccgttcttggtcctgcacggcactgacgacgtcgtcgctgatccttgtgggagcaagctgctgcacgagagggcgtcgagcagggacaagacactgaagctgtatcccgggatgtggcacgtgctcatgggcgaactgccggaggacgtcgagcgcgtcttcgccgacgtgatctcgtggctcgacgacagggtgggcggtacagctaccgttcccggcggcatggcagatcgtcatgagctagtagagtgtagagatgcagtagaatag

SEQ ID NO: 1942 - protein, 318 aa, Sorghum bicolor
MAQYRDNIKYEEDFFVNSRGNRLFTCSWTPRKSQSRALIFICHGYGGECSISMGDTAARLVHRGYAVHGIDHEGHGKSSGSKGYISSFSDIVRDCSDHFKSVCEKQENGLKKRFLYGFSMGGTVVLQLHRKDPLYWDGAVLLAPFCKMFDNMRPHPIIVSTLKMISTVAPSWRVIPAIDMIDKVCKDPQFKKEIRSNPYMYKGNLALQTGRELLSVGLDTEKNLHEVSLPFLVLHGTDDVVADPCGSKLLHERASSRDKTLKLYPGMWHVLMGELPEDVERVFADVISWLDDRVGGTATVPGGMADRHELVECRDAVE

SEQ ID NO: 1943 - DNA, 789 bp, Sorghum bicolor
atggagaactcgaggccgcagacggcgcactcgtgcacccgcgccctgtccctctcggccgcggccgcggccgccgctgggtcgctgagcatcctcgcctgcagccgcgtgtggctggtgcggtgcccgccgagcgcctggaacgacgggaagcgcttgctgcacgtcttgcactcgaacacgccctcggccgccatggccctgcgggccgcggccgaggacggcgccggcggcgtgccgccggtgcccaacgacgacgacgacgcgggcgccgacagcgtgagcagcgcctcggcgtgcgcccggaggccctccatctccttgctctcctccgcttcgtgtctcttccgtgcgcggcgggcgcgcgcgcggaccacgtcggccgcgggccacccgcgagtcgatccacacgggcagtcgggcacgccgcggcggcggagagtccggtggcgggaggacacgctgcgatcccgagaacgatcctgccccccacgcggcgacgttggagtggcgccggcgtcttcggagatttgcgcaggcggagacgcggcttctggtgagctggcacgttggcctaggcgctccttgtcctccagccttagactggttggacgagttcccagtcccgcgaccgccaccactacggccgaagccaccgcggttgcgcccacgggcaccgccgcgtccacgatgaagttgtcacgtgtgagcttctcagagatggagggcccaaagggtgaatggtggctatggttggcggaggaagacgacgacgccattgctggatga

SEQ ID NO: 1944 - protein, 262 aa, Sorghum bicolor
MENSRPQTAHSCTRALSLSAAAAAAAGSLSILACSRVWLVRCPPSAWNDGKRLLHVLHSNTPSAAMALRAAAEDGAGGVPPVPNDDDDAGADSVSSASACARRPSISLLSSASCLFRARRARARTTSAAGHPRVDPHGQSGTPRRRRVRWREDTLRSRERSCPPRGDVGVAPASSEICAGGDAASGELARWPRRSLSSSLRLVGRVPSPATATTTAEATAVAPTGTAASTMKLSRVSFSEMEGPKGEWWLWLAEEDDDAIAG

SEQ ID NO: 1945 - DNA, 1287 bp, Sorghum bicolor
atggggagaggcttgagcgccgctcccgtctcgccgcgcctcgtgctcggggcagcggcgctggtgctgctcgcggcggcggcgctgccttctccagcagctggggtcaacgtgacggccgtgctctcggcgttccccaacttcgccgacttcgcgcggctgctggcatccacctccgtggccggggagctgtccgggaggtcgtccctgacgctcctggccgtgccgaatgccaacctgccgcagtcaccctcggctttcgtagctggcgccggcgccgacatcgccgacgtgctgaggtaccacgtccttctggagtacctctccccgtccgacctcgcccacctctccccctccgggaagctcgtgacgacgctgtttcagaccacgggccgcgcaccctccgacttcggcgccgtcaacctcaccctgggggccaactccactgtcgtggtccgctcgccggcgccgacaccgggatcgaatgccacggtcctcggcgccgtgaccgcggttccgtacaatctcagcgtgctcgcggtgggtggccttatcctaccctccggattcgacctcgcggcctctgaaacccgcccgccaccgccggtgaacatcacccgggttctcaccgacgcgcgggggttcaacgtggcggcctccatgctgcaggcttccggtgtggcgagtgagtttgaggccgacgagcacggtgctggaatcaccgtcttcgtccccaccgacgacgcctttgccggcctccctgccaccgaccgcctccagtccctacccgctgagcgcaaggccgtcgtgctccgcttccatgtgctgcactcttactacccgctgggttcccttgagtccatcgtgaaccctgtccagcccactctcgcgacagagcacactgaggctggccacttcaccctaaacataacccgtgtcaatggctccattgccattgacacaggcatcgtgcaggcatccatcacccgcacagtgttcgaccaaaatcctgtggcagtctttgccgtctccaaggttctactgcccaaggaaatgttcagtcggggggattccggcagcactgccattgtgccaccttcggttgcgatggcgcccggcgacaccagcagcgagcagacaccacagacgaggctctcatccccgcctgacctccacggcgaagatagcgagtcgtcggctgctttggcgacagcaaagggggcttcttggtggcgtataggactcatgtatctacagctgcatctattatttctatctctggtatga

SEQ ID NO: 1946 - protein, 428 aa, Sorghum bicolor
MGRGLSAAPVSPRLVLGAAALVLLAAAALPSPAAGVNVTAVLSAFPNFADFARLLASTSVAGELSGRSSLTLLAVPNANLPQSPSAFVAGAGADIADVLRYHVLLEYLSPSDLAHLSPSGKLVTTLFQTTGRAPSDFGAVNLTLGANSTVVVRSPAPTPGSNATVLGAVTAVPYNLSVLAVGGLILPSGFDLAASETRPPPPVNITRVLTDARGFNVAASMLQASGVASEFEADEHGAGITVFVPTDDAFAGLPATDRLQSLPAERKAVVLRFHVLHSYYPLGSLESIVNPVQPTLATEHTEAGHFTLNITRVNGSIAIDTGIVQASITRTVFDQNPVAVFAVSKVLLPKEMFSRGDSGSTAIVPPSVAMAPGDTSSEQTPQTRLSSPPDLHGEDSESSAALATAKGASWWRIGLMYLQLHLLFLSLV

SEQ ID NO: 1947 - DNA, 315 bp, Sorghum bicolor
atgtcgcagccacaacccggtgacggtgacgacggaagccgcggctacggccggagcaactcgcagtacaaggagcggtggaggcacgacgacgacgacggcggccgtttcgggcggagcaactcgcggatggaggagcggtggaggcacaaggatggcaacgacggcgacaaggagaatctgatacagagcccggagccgacgccacgggtcgcgcgggaagtggaggcggaggtggaggagctgcaccaccaccacccgttccacgggttcgggcaacagcggccggaggcgatgctgctcctgagccagtga

SEQ ID NO: 1948 - protein, 104 aa, Sorghum bicolor
MSQPQPGDGDDGSRGYGRSNSQYKERWRHDDDDGGRFGRSNSRMEERWRHKDGNDGDKENLIQSPEPTPRVAREVEAEVEELHHHHPFHGFGQQRPEAMLLLSQ

SEQ ID NO: 1949 - DNA, 771 bp, Sorghum bicolor
atggcttccaggaagttcttcgtgggcggcaactggaaatgcaacggcaccggcgaggacgtgaagaagatcgtcaccgtcctcaacgaagccgaggtgcccactgaggacgtcgtcgaggtggtggtgagcccgcctttcgtttttctgcagcaggtcaaggggctgctgcggctggacttcgctgtcgcagcgcagaactgctgggtgcgcaagggcggcgccttcaccggcgagatcagtgctgagatgctggtgaacctgcaggtgccctgggtcattttggggcattctgagcgcagagctctgttgggtgaatccagtgattttgttgctgataaagttgcatatgcactcacccaaggtctcaaggtaattgcttgcattggtgagacccttgagcagagagaggcaggaacgacaatggatgttgttgctgcacaaacaaaggctatttctgaaaaaatatcagattggacaaatgttgtgttggcgtatgaaccagtttgggctattgggaccggcaaggttgcaacccctgctcaggctcaggaggttcatgatggtctaagaaagtggcttcactccaatgttagcccagcagttgctgaatcgaccaggataatttatggagggtctgtaaatggagctaactgcaaagaacttgcagctcaagcagatgttgatgggttccttgttggtggagcctcattgaagcctgagttcgtggacatcatcaagtctgccactgtcaaatcttcatgtgcctag

SEQ ID NO: 1950 - protein, 256 aa, Sorghum bicolor
MASRKFFVGGNWKCNGTGEDVKKIVTVLNEAEVPTEDVVEVVVSPPFVFLQQVKGLLRLDFAVAAQNCWVRKGGAFTGEISAEMLVNLQVPWVILGHSERRALLGESSDFVADKVAYALTQGLKVIACIGETLEQREAGTTMDVVAAQTKAISEKISDWTNVVLAYEPVWAIGTGKVATPAQAQEVHDGLRKWLHSNVSPAVAESTRIIYGGSVNGANCKELAAQADVDGFLVGGASLKPEFVDIIKSATVKSSCA

SEQ ID NO: 1951 - DNA, 2055 bp, Sorghum bicolor
atggaccccacctcgccgtcgcccgcggcccgccgcgccgccgccgtcgcgcgccacctcgctggcgccaccgcccccttcccggcgagcactcccctggaaccttcctgctgcctgagctacgtcccgccggagtccaccgaacggccggcggcgttcgcgccgggcgacctcaggcttctgctggacgggcacgacctgcccgcgcgcgattggctcttccgcgccatggaggagagcccccttttccgcagcccgagcgcgcggacgggctccagggtgttcgtgggggcggacttgaacgacggcaaggaagggcagcgggaggccaccatgcggcggatcgcgtacctgaagcagcgcggcgtgttccgcgggtggctcaccaaggacggcgctgacgccgagctccgcaaactagcgctccttgactgcatcgccatctatgaccactctctcgccatcaagattggcgtccacttcttcctctggggcagtgccatcaagtttcttggaacaaagcgccaccatgacaagtggttggttgccacagaaaattatgatatcatgggttgttttgcaatgacagaactaggccatggaagcaatgtacgaggaatagaaacaatagcaacttatgattcagaaacaagagagttcatcataaatactccatgtgaatcagctcagaagtactggattggtggagctgctaatcatgcaacacatacaatagtcttttgtcaacttcatataaatgggagaaatgaaggagtccatgcttttgtagctcaaattagggatgaagatggaactgtgttgcctaatatccgtatagctgactgtggccataagattggactgaatggcgttgataatgggcggatttggtttcagaatatacgtgttcctcgtgagaacttgcttaatttggttgctgacgttttgccagatgggcaatatgttagcatgatagatgatccagatcagaggtttgcagctttcctctctccgcttacacttggtcgagtaaacattgcagttgactcagtctacatttcaaaggtcagcctagcgattgctgtgagatacagtttgtcaaggagagccttttcaattacaccagatggccctgaaacgttgttgcttgattatcccagtcaccagcgacgccttctaccacttctagcaaaagtatgtctgatgagtagtgctgctaattttatgaaaaatatgtatgtaaagagaactcctgaaatgagcaaagccatacatatttactctagtgctctgaaggcaacactaacttggcagaatatgatgactcttcaggagtgtcgtgaggcctgtggcggtcaaggtctaaagactgagaaccgcgtaggagttttcaaagctgaatttgatgtccagtccacatttgagggtgataataatgttctaatgcagcaggtaagcaaagcactttatgctgaatttttgggtgcacaaaagaagaagcggccattcaagggattgggtttggaacacttaaatggctcaacccctgttattcctgataagctgacaagtaacatattaaggagctccaagttccagatggacctattctgcttaagggagagagatttactgaagcagtttgcagaggaggtttctctccatcttgcacaaggcgaaagcagagaaaaggctttgatgctgagttaccaacttgctgaagacttagctagagcgtttactgagcgtacaatcctccaaatatttctggaggatgagaggaatgtcccttctggttccctaaaggaggtactgggtttgctgaggtctctatatgttatggtgaacatagatgaatccacatcttttctaagatacgggtatctatcacgtgacaatgtagcccttgtgcggaaagaagtcttgaaaatgtgcagtgaactcaggccccatgcgcttgctgttgtcagttctttcggaatccctgatgccttccttagtccacttgcttttgactggattgaggcaaatacactgtcaaccgggagccactga

SEQ ID NO: 1952 - protein, 684 aa, Sorghum bicolor
MDPTSPSPAARRAAAVARHLAGATAPFPASTPLEPSCCLSYVPPESTERPAAFAPGDLRLLLDGHDLPARDWLFRAMEESPLFRSPSARTGSRVFVGADLNDGKEGQREATMRRIAYLKQRGVFRGWLTKDGADAELRKLALLDCIAIYDHSLAIKIGVHFFLWGSAIKFLGTKRHHDKWLVATENYDIMGCFAMTELGHGSNVRGIETIATYDSETREFIINTPCESAQKYWIGGAANHATHTIVFCQLHINGRNEGVHAFVAQIRDEDGTVLPNIRIADCGHKIGLNGVDNGRIWFQNIRVPRENLLNLVADVLPDGQYVSMIDDPDQRFAAFLSPLTLGRVNIAVDSVYISKVSLAIAVRYSLSRRAFSITPDGPETLLLDYPSHQRRLLPLLAKVCLMSSAANFMKNMYVKRTPEMSKAIHIYSSALKATLTWQNMMTLQECREACGGQGLKTENRVGVFKAEFDVQSTFEGDNNVLMQQVSKALYAEFLGAQKKKRPFKGLGLEHLNGSTPVIPDKLTSNILRSSKFQMDLFCLRERDLLKQFAEEVSLHLAQGESREKALMLSYQLAEDLARAFTERTILQIFLEDERNVPSGSLKEVLGLLRSLYVMVNIDESTSFLRYGYLSRDNVALVRKEVLKMCSELRPHALAVVSSFGIPDAFLSPLAFDWIEANTLSTGSH

SEQ ID NO: 1953 - DNA, 1086 bp, Sorghum bicolor
atgaaggcgctcattcttgttgggggtttcggaacccgccttcggcctttgactcttagcttcccgaagccccttgtggattttgcaaacaagcccatgattctgcatcagatcgaagctttgaaagaagttggggtcacagaggtggttttggccatcaactaccgccctgaggtaatgattaatttcttgaaggactttgaggataagcttggcatcacaatcacatgctcccaagagacggagcccttaggaactgctggtcctcttgctctagcaagggacaagcttgcggatgggtcgggcgagccattctttgtcctcaacagtgatgtcataagcgaatacccatttgctgaactcatcaaatttcacaaatgtcatggtggtgaggcaacaattatggtcactaaggtggatgaaccatcaaaatatggtgttgtggttatggaggaggcaactggcagggtggaaagatttgttgagaagccaaaagtatttgtgggcaacaagatcaatgctgggatttacttactgaacccatctgtccttgaccgcattgaactgaggccaacttcaattgagaaagaggtcttccctcaaattgcagctgatcagaagctctatgcaatggtccttccaggtttttggatggatgttggtcagccaagggactacattactggcttgcgtctttatctagactcacttaggaagaaatcagctgccaggctagctactggaacacatgttgttggcaatgtgctggtgcatgagagcgccaagattggagaaggttgtctgattggtcctgatgtcgccattggacctggatgtgttgtggaggatggcgtgaggctttcccgctgcactgtcatgcgtggtgtgcgcatcaagaagcatgcttgcatctcaaacagcattatcgggtggcactcaactgttggaaaatgggcacggatagagaatatgactatcctgggggaggatgttcatgtgtgtgatgaggtatacagcaatggcggtgttgttctcccacataaagagatcaagtcaagcattctgaagcctgagatcgtcatgtga

SEQ ID NO: 1954 - protein, 361 aa, Sorghum bicolor
MKALILVGGFGTRLRPLTLSFPKPLVDFANKPMILHQIEALKEVGVTEVVLAINYRPEVMINFLKDFEDKLGITITCSQETEPLGTAGPLALARDKLADGSGEPFFVLNSDVISEYPFAELIKFHKCHGGEATIMVTKVDEPSKYGVVVMEEATGRVERFVEKPKVFVGNKINAGIYLLNPSVLDRIELRPTSIEKEVFPQIAADQKLYAMVLPGFWMDVGQPRDYITGLRLYLDSLRKKSAARLATGTHVVGNVLVHESAKIGEGCLIGPDVAIGPGCVVEDGVRLSRCTVMRGVRIKKHACISNSIIGWHSTVGKWARIENMTILGEDVHVCDEVYSNGGVVLPHKEIKSSILKPEIVM

SEQ ID NO: 1955 - DNA, 207 bp, Sorghum bicolor
atgagggactgggcgccggcgatcatcgcgacggcgctgttcgcgctcctgtgcccgggcggcgtccttcagatgccaggccggcagcggcccgtcgacctcatgaacatgaagaccagcttcccgtccatgctcgtccatgccatcatctacttcctgctgctcatgctcttcatcgtcatcctgcagcctcatctctacatctga

SEQ ID NO: 1956 - protein, 68 aa, Sorghum bicolor
MRDWAPAIIATALFALLCPGGVLQMPGRQRPVDLMNMKTSFPSMLVHAIIYFLLLMLFIVILQPHLYI

SEQ ID NO: 1957 - DNA, 1890 bp, Sorghum bicolor
atgaccggcggcgtacggaagaggacggggttcagtaagctgctggtggtcttgctgttctttgtgtgcgccatcgtcatcgtggcgctgcttgtccgcggcaacggctgctgcgtcgtcgtccaagtggcagtactgccacggataacttcagttggatcctcttgggatgcttctcctactgctacaactcaaagtggcaaaaccatcatccctgcaacgtctacgaggggagcatcatcaccagctcatgatcttcaggaggactcagaggcagtatcagcctcggaggaagaggaggcccctgcagctgcagctgccccgtacgcggcagacagcaggtggaacatccagtgggagagcgtcgccagtgtcctttcatcattcagcagtaatggcactgggcggcgtggcatcgccagagtgggcttgctcaacttcaactcgtcggaggttgctcgctggacgagcacgttgcctgccgccgacgttcgggcggtgagcctggcgccggccgcggacgctgtcacctggcaagccctctacccgaactggatcgacgaggagagcaacagaagcagctgccccaccctccccaatccggatgccgcccctcatcatcacaattttgacctcgtcgccgtcaagcttccctgccgcggacaagactggtccagggacgtgcgcaggctccacctccagctcgccgccgccaagctcactctccatggcagcagcagcagcagcagtaaggctggcatggtgttgatcctgagcgagtcagggtgtctccccctgcccaacctcttcccctgcaagcacctcttcgcgcgccgcggccacgcctttctctaccgccccgaggccacctacctccgccaccgcctcaacctgcccgtcgggtcctgccagctcgccgttccttttctccggccttcgcctactaaactaccaagtgcaacgccgccaggtacaagcaggaccagcaggcaggcctacgccaccgtgctgcactccgccgacgcctacgtctgcggcgccatcgcgctggcgcagagcatccggcagtcagggtccacgcgcgacctggtggccctggtggacgcgcacaatgtgggcgccgagcaccgcgccgccctcgccgcggcaggctggcaagtccgcctagcgccgcgcatccgcaacccgcacgcggaggccaacgcctataacgagtggaactacagcaagttccggctgtggcagctgaccgactacgagaaggtggtgttcctggacgccgacctgctggtgctgcgcaacatggacttcctgttcgaggaggcgccggagctgagcgcgacggtcaacagcggcgcgcgcttcaactcgggggtgatggtgctggaaccgtgcagctgcaccttcgacctgctcatgtcgggcatccacgacatcgaatcctacaacggcggcgaccaggggtacctgaacgaggttttcacgtggtggcaccgcctgccgcgccacgtcaacttcctcaagtacgtctgggccgaaggggaccgggcggcacaggcgcggatgcttaccgcggagccggcggaggtgcacgccgtgcactacctgggcatgaagccgtggctgtgctatcgtgactacgactgcaactggaacgtggcggagctccggcggttcgcgagcgacgaggcgcacgcgcggtggtgggcggtgcacgaccggatagagcccgcggaactgagggacaggttttgcgcgctgccgacgagccacatggaggtgctggagcagcaaaggagggaggcggcgacggtcaacgcgccagacggccactggaaccgcaccatcaccgacccgcgccgccgcatcaaagcccattaccaccactag

SEQ ID NO: 1958 - protein, 629 aa, Sorghum bicolor
MTGGVRKRTGFSKLLVVLLFFVCAIVIVALLVRGNGCCVVVQVAVLPRITSVGSSWDASPTATTQSGKTIIPATSTRGASSPAHDLQEDSEAVSASEEEEAPAAAAAPYAADSRWNIQWESVASVLSSFSSNGTGRRGIARVGLLNFNSSEVARWTSTLPAADVRAVSLAPAADAVTWQALYPNWIDEESNRSSCPTLPNPDAAPHHHNFDLVAVKLPCRGQDWSRDVRRLHLQLAAAKLTLHGSSSSSSKAGMVLILSESGCLPLPNLFPCKHLFARRGHAFLYRPEATYLRHRLNLPVGSCQLAVPFLRPSPTKLPSATPPGTSRTSRQAYATVLHSADAYVCGAIALAQSIRQSGSTRDLVALVDAHNVGAEHRAALAAAGWQVRLAPRIRNPHAEANAYNEWNYSKFRLWQLTDYEKVVFLDADLLVLRNMDFLFEEAPELSATVNSGARFNSGVMVLEPCSCTFDLLMSGIHDIESYNGGDQGYLNEVFTWWHRLPRHVNFLKYVWAEGDRAAQARMLTAEPAEVHAVHYLGMKPWLCYRDYDCNWNVAELRRFASDEAHARWWAVHDRIEPAELRDRFCALPTSHMEVLEQQRREAATVNAPDGHWNRTITDPRRRIKAHYHH

SEQ ID NO: 1959 - DNA, 1188 bp, Sorghum bicolor
atgtctcagatggagttggtgtccccagcctcctctgcgccgaggcaggaggtcatgatggtgaccactgatgattacagctacaagccaggcctcgccgctgcgcccgctgctgctgccgccccgccaccgagctttcagcagcaccacccgctcccgctgcagctgcacggaggagacggaggaggaggagggggagaccatgacaagaggaagcatggatccacaagaaaagatggcaagttggtagatgccaagacggaacggcggctggcgcagaacagagaggctgcgaggaagagcaggctgaggaagaaggcttacgtgcagcagctcgagactagcaggatcaggcttcagcaggtcgagcatgagctccagagagcacggtcacagggcctgttcgttggagggtgcagcgccgccggggacatgagctctggcgccgccatgttcgacatggagtacgcgcggtggctggacgacgacagcaagcggctggcggagctccgagctgggctgcaggcgcagctgctggacggcaacctggggctcatcgtggaggagtgcatgcagcactacgacgagctgttccagctcaaggcggcgctcgcgcgctccgatgtcttccacctcctcaccggcgcctgggccaccgccgccgagcgctgcttcttctggatgggcggcttccgcccgtctgagctgctcaagatcctgataccgcagctggacccgctgacggagcagcagctgctggggatctgcaacctgcagcagtcgtcggagcaggcggaggaggcgctcgcccagggcctgcaccagctgcaccagtccctggccgacacagtcgccaccggcacgctcaacgacggcgccgccacccccaactacatgaacatcatggccgtcgcaattgataagctcgcctgcctagaaaacttctatcaacaggccgacaatctaaggcagcagacgttgcatcagatgcgccggatcctgaccactcggcaggctgcacggtgcttcctctccattggggagtactacagccgcctcagagctctcagcaacctctgggcttcccgtccccgcgacaacttcatcgggacagagagcctcagccccacagcaacggaactgcaagccctgcaccaccagcagcagaaccagttcactggattttga

SEQ ID NO: 1960 - protein, 395 aa, Sorghum bicolor
MSQMELVSPASSAPRQEVMMVTTDDYSYKPGLAAAPAAAAAPPPSFQQHHPLPLQLHGGDGGGGGGDHDKRKHGSTRKDGKLVDAKTERRLAQNREAARKSRLRKKAYVQQLETSRIRLQQVEHELQRARSQGLFVGGCSAAGDMSSGAAMFDMEYARWLDDDSKRLAELRAGLQAQLLDGNLGLIVEECMQHYDELFQLKAALARSDVFHLLTGAWATAAERCFFWMGGFRPSELLKILIPQLDPLTEQQLLGICNLQQSSEQAEEALAQGLHQLHQSLADTVATGTLNDGAATPNYMNIMAVAIDKLACLENFYQQADNLRQQTLHQMRRILTTRQAARCFLSIGEYYSRLRALSNLWASRPRDNFIGTESLSPTATELQALHHQQQNQFTGF

SEQ ID NO: 1961 - DNA, 918 bp, Sorghum bicolor
atggcgggcggcctgcccccagggtaccgcttctacccgacggaagaggagctgatatccttctacctgcgcaacaagctggacaacctccgccgcgacgacatcgagcgcgtcatccccgtcgtcgacgtctactccgtcgacccctggcagctcccagggatccacgagatgctgcgcggcggcggcgctgccggggagggggagccgtggttctacttctgcccgcggcaggagcgggaggcgcggggcgggcggcccagccggacgacgccgtcggggtactggaaggccgcgggcacgcccggggtcgtctactcctcctcggcggcgccggccgaccgccgcgccatcgggatgaagaagaccatggtcttctaccgcggccgcgcgccgtcggggaccaagaccaactggaagatgaacgagtacagggcgctccagtacgacgaagcccccgccggccccgccgccgtcggaaccgacgggtcctcgtcgtcgtcgtctaccgcccaccaccaccacgccgtacccgtaccaccaccaccaccaaacgttgccccgcagctaaggagcgagtttagcctgtgtcgactctacaccaaatctgggagcctgagacagtttgaccggcggccgctcggagctgcgggaggcgtcgtcgtcgtccctggcgaggacccggcggggccatccacggcaggagtcgccgcgtcgccgccggacgatgacgatggctccggcagcagctccatgcaacaacagcagcggcagcaggtgacggaggagagagctgccaacgatccatacggtgacgacatggtggtgacgacggagagagaagatgcccacggccacgatcctttcggtgacgacgtggccatcttggatgcccttttatactggcccggagactag

SEQ ID NO: 1962 - protein, 305 aa, Sorghum bicolor
MAGGLPPGYRFYPTEEELISFYLRNKLDNLRRDDIERVIPVVDVYSVDPWQLPGIHEMLRGGGAAGEGEPWFYFCPRQEREARGGRPSRTTPSGYWKAAGTPGVVYSSSAAPADRRAIGMKKTMVFYRGRAPSGTKTNWKMNEYRALQYDEAPAGPAAVGTDGSSSSSSTAHHHHAVPVPPPPPNVAPQLRSEFSLCRLYTKSGSLRQFDRRPLGAAGGVVVVPGEDPAGPSTAGVAASPPDDDDGSGSSSMQQQQRQQVTEERAANDPYGDDMVVTTEREDAHGHDPFGDDVAILDALLYWPGD

SEQ ID NO: 1963 - DNA, 1422 bp, Sorghum bicolor
atgggggacgccaacggcggcagtatgcacgtcgtgctgctgccatggctggcgttcggccacatcctccccttcacggagctcgccaagcgcatagctcggcagggccaccgggtcacgctcttctccacgccaagaaacacccggcggttaatccgcatccctccagaactcgcggggcaaatccgcgtcgtggacatcgcactgccgcgcgtggagcgcctgccggaggacgccgaggcgagcatcgacctcccgtccgacgacctccgcccgtacctccgcgtagcctacgacgccgcctttgccgacaacctctcggccatcctgcaggagccggggccggagcggcccgactgggtggtcatcgactacgccgcgtactgggcgcccgcggccgcggcgaggcacggcgtgccgtgcgcgttcctgagcctgttcggcgccgcgacgctcagtttctatggcccccccgaggggctcatgggacgcggcaagtacgccaggacgaagccggaggacctcaccgtggtgcctgactacgtgccgttcccgaccaccgtcgcgcaccgcgtcttcgaggcgcgcgagttgttcaacggcttggttccggacgactccggcgtgtcggaaggccaccggttcgccgtgtccatcggagagagccaggtcgtaggcatccggagcagaccggagtttgagtcggagtggttgcaggtgcttgacaagctctaccagaagccggtgatcccggtcggcctgttccctccgccgccgacacaagacatcgccggccacgaggcgactttgcggtggctggacagacaggctcggggatccgtcgtgtacgcggccttcggcagcgaggcgaagctgacaagcgcgcagctccaaacaatcgcgctgggtttggaggcgtccggcctgccattcatctgggcgttcaggccgccagccgacggcgacgccgaacccggacaaggcacaggcgggttgccggaaggcttcgaggagcgtgtcaatggccggggattggtctgccgcggctgggtgcctcaacccaggctgctggcccatgaatcggttggtgggtttctgacccacgccggctggaactccatctccgagggcctctcgcggggcgtcaggatggtgctgctgccgctgatgttcgatcagggcctcaacgccaggcttcttgtggagaagaagatcggcatcgaggtggagagggacgaagacgacggcacgttcgctcccaaagacatcgcggatgctctgaggacggccatggcggagaaccaaggcgggactagggtcaaggaactggccgaggtgtttggaaatgatgaggcgaatgatcagtgcctgcgagatttcctccggtatctgtcggaatacagcaggcaacatcaagggtag

SEQ ID NO: 1964 - protein, 473 aa, Sorghum bicolor
MGDANGGSMHVVLLPWLAFGHILPFTELAKRIARQGHRVTLFSTPRNTRRLIRIPPELAGQIRVVDIALPRVERLPEDAEASIDLPSDDLRPYLRVAYDAAFADNLSAILQEPGPERPDWVVIDYAAYWAPAAAARHGVPCAFLSLFGAATLSFYGPPEGLMGRGKYARTKPEDLTVVPDYVPFPTTVAHRVFEARELFNGLVPDDSGVSEGHRFAVSIGESQVVGIRSRPEFESEWLQVLDKLYQKPVIPVGLFPPPPTQDIAGHEATLRWLDRQARGSVVYAAFGSEAKLTSAQLQTIALGLEASGLPFIWAFRPPADGDAEPGQGTGGLPEGFEERVNGRGLVCRGWVPQPRLLAHESVGGFLTHAGWNSISEGLSRGVRMVLLPLMFDQGLNARLLVEKKIGIEVERDEDDGTFAPKDIADALRTAMAENQGGTRVKELAEVFGNDEANDQCLRDFLRYLSEYSRQHQG

SEQ ID NO: 1965 - DNA, 1410 bp, Sorghum bicolor
atggacgccagcagcgggagcatgcacgttgtgatgctgccatggctggctttcggccacatcctcccgttcaccgagctcgccaaacgcatagctcggcagggccaccaggtcaccatcctttccacgccaagaaacactcgacggcttatccacatcccaccggacctggctggccttgtccgcgtcgtggacgtacagctgccgcgcgtggagcgcctgccggaggacgccgaggctagcatcgacctaccctccgacgacctccgaccgtacctgcgccgggcctacgacgcggccttcgccgacaagctttcggacatcctgcaggagccggggccgcggaagccggactgggtgatcatcgactacgccgcgcactgggcgcccgcggccgcggcgaggcatggcgtgccatgcgcgttcctgagcctgttcggcgccgcggcggtcactttctacggccccgcggaggcgctcatgggacgcgggaagcacgcaaggacgaagccagagcagctaaccatggtccccgactacgtgccgttcccgaccaccgtcgcgtaccgcggcttcgaggcgcgcgagtttttcacgccggtgttggtccctgacgaatctggcgtgtcggaaggctaccggttcgccaagtgcatcgaaggcagccagctcgtgggcatcaggagcagcgcggagttcgagccggagtggctgcaggtgctcggcgggctataccggaagccggtcatcccagtcggcctattccctccaccacccacacaagacatcggcggccacaaggcagcgctgcaatggctggacaggcaggcgcggggctccgttgtgtactcggcgttcggcagcgaggcgaagctgacgagtgcacagctgcagaccatagcgctcggtctcgaggcttctggcctgccgttcctgtgggcattcaggcaaccggtcgatgccaacgaaggcgaaagcggattgccggaaggtttcgaggagcgcgtcgacggccgcggactcgtctgccgcggctgggtgccacaggccaggttcttggcccacgaatctgtcggagggttcttgacccacgccggctggaactccatcattgaaggcctcgcccgcggcgtcaggctggtgctgctaccgctgatgttcgatcaaggcctcaacgcgaggcatctgacggagaagaagataagcgtcgaggtgccgcgagacgaggaagatggctcgttcgcgcccaaagacattgcagctgctttgaggagggtcgtggtggaggaagaatgcgaggtgttcggggataaggccaaagagctcgccaagttgtttggaaatgacgagatgaatgatcagtgcgtgcgagattttctcaagtgcctatcggaatacaacaggcagtga

SEQ ID NO: 1966 - protein, 469 aa, Sorghum bicolor
MDASSGSMHVVMLPWLAFGHILPFTELAKRIARQGHQVTILSTPRNTRRLIHIPPDLAGLVRVVDVQLPRVERLPEDAEASIDLPSDDLRPYLRRAYDAAFADKLSDILQEPGPRKPDWVIIDYAAHWAPAAAARHGVPCAFLSLFGAAAVTFYGPAEALMGRGKHARTKPEQLTMVPDYVPFPTTVAYRGFEAREFFTPVLVPDESGVSEGYRFAKCIEGSQLVGIRSSAEFEPEWLQVLGGLYRKPVIPVGLFPPPPTQDIGGHKAALQWLDRQARGSVVYSAFGSEAKLTSAQLQTIALGLEASGLPFLWAFRQPVDANEGESGLPEGFEERVDGRGLVCRGWVPQARFLAHESVGGFLTHAGWNSIIEGLARGVRLVLLPLMFDQGLNARHLTEKKISVEVPRDEEDGSFAPKDIAAALRRVVVEEECEVFGDKAKELAKLFGNDEMNDQCVRDFLKCLSEYNRQ

SEQ ID NO: 1967 - DNA, 4626 bp, Sorghum bicolor
atggaagactcacccgccgatgccgccggctccggccgccgcacgcgcacgcgcacgcggggcgcggaggcgtcggggcgggccgccaggctccagcagctccgcgccgtccgcaacggtgagatccgcgcttccgacgtcatccaggtgaaggttgacgccccgatctacgacaccgtcccggaggaggagtacaacgtgctcgtcgctcgccgcaagaaggaagccggcgagttcatcatcgacgacgacgggctcggttacgtcgatgacggccgcgaggaggactggagccaccgcgctctcccttcctcctccgatgaaggatcagatgacgaggacggcgccccccgcaagcggaagcagccgcgccctccccaggcgaagcgccagccgcagcagtccgccaaggcggcggcgtctttctccgccgctgccgcaaagacgggccagcagatctcctctttgttcacatcctcggtatttaagaggaccggcagcgaccgcaccaagagcttggcgctggccgccgacagcatcgtggacgacatcatcgccgagttcgcgcccgacgagaacgaccgtgaggagaggcgtcggcgggttggtagggtttctgcgccgcagccgcctcctccaacagtttcctacgtcaagcctcaaaaggtaattgtcgatgctgaaatggttagatcggacaatggaaatgatatggcggtggaattgaagaacgatactgagatggaaaccaatttggaggaaattcctggttctagtgctgaattggtggttgataatctggaagaaattcctggttctagtgctgaattggtgtttgataataagagtttggaggaaccaaagcaggaggctaatggggaagtaaaggtagaaaagacacaccgcctcaatgcaaagattaaggcggaggagagcagaaataatgatgtgacgagtgcaacagcaggatggatgaagatatgtgggaatgggcagaatgcagtaggtgaagaaggagtgacagttgatggtaacaccaatgtggatgaaagttcagagtttgagctgaaagatggagcactgccattctacatacttgatgcatacgaggaaccatttggtgctaattcaggcacagtgtatttatttgggaaggttgaagttggcaagcggttccatagttgctgcgtcattgtgaaaaatattcaaagatgcatatatgctattccaaaccattcagtgtttccaagggactccatatcagggatagaaagaaaccccacaagtgctgatcttttgccatcacttcgagcaactctacatgagttggcgtcaggattaaagagtgaaatagctgacaaattgtcagacctcaatgtgtcaaatttcgtaatgactccagtcaagaggaactatgcatttgagaggactgatctaccaaatggagagcagtatgtcctgaaaattaattatccttacaaggatcctgctctaccagcagacctcaggggtgaacattttcatgcactgcttgggacaaacaatagtgctcttgaattatttcttatcaagaggaaggtcaaggggccttcatggctgtcggtttccaaatttgtgacacggccatccactcagcgggtcagctggtgtaaatttgaagttacagttgattgcccaaaggatatatctgttttgacgacaagtacaaatctagaagttcctactgttgtagttgcagcagttaatctcaaaactatcataaatgagaaacacaatgtgcatgagattgtgtcagcatctctcatatgctgtcatggggtgaagattgatagtccaatgcgtccagaagattggcagaaacggggaatgctcagccattttactgttatgcgcaaacttgaaggtagcatatttcctataggccttgctaagggtgcttctgataggaacgagcaggctggtagcaatgtgctggcactagaaagcagtgaacgtgcattattaaatcgcttgatgattgagcttagcaaacttgactgcgacgtacttgtgggacacaatatttcaggattcgatttggatgtgcttctacaccgtgctcagacatgcaaagtgctaagcagcatgtggtccaagattggtcgtctcaggcgatcgtcaatgcccaggcttaccaaaggaagtacactctatggttctggagcaagtccaggaattatgtcctgtattgctggccgtcttctctgtgacacctatttatgctctcgtgaccttctgaaggaggtgagttattccttgacacaacttgcagaaacacaattaaaaaaggtcaggagagaggtttctccacatgatatacctctgatgttccagtcttcgactgaactgctcaaactggttgaatatggtgagacagatgcatggctttctttggagctcatgtttcacttgagtgttctcccactgacacggcaactgaccaacattagtggtaacctgtgggggaaaactcttcagggtgctagggctcagagagtagaatatctactactgcattcatttcatgcaagaaaatttattgtaccggataaatttgcacgcaacaaagagctgaactccacaaaaagaaaaatgaatgctgatactgagggtgcaaatgctgatgatggtgctgctgatccttccgttgatgatgaagtgcataatggtgatcaaggtaaagccagaaaaggaccttcatatgctggtggattagttttggagcctaagaagggtctatatgacaagtatgttctacttcttgacttcaacagcctttatccttcaataattcaggaatacaacatctgctttaccaccgttgagcgttcttctgatggcagtgtacctaatttgccagcatcaaaagctactggtgttttacctgagttgctgaggagtttggtggagaggagaaggatggttaaatcatggttgaagactgcttctggtcttaaaaggcagcagtttgatattcaacaacaagcattgaaactcactgcaaatagcatgtatggttgcttgggcttttccaattccaggttttatgcaaagccacttgctgagcttattacactccaaggtagagagatattgcaaaacactgtagatctggttcagaataatttgaatttggaggttatctatggtgatacggattccatcatgatacatactggacttgatgacatctccagggcaaaagcaattgcaggaaaagttattcaggaggtgaacaaaaagtaccgttgtctggagattgatcttgatggcatatacaagagaatgttacttcttaaaaagaagaaatatgctgctattaaagtggcactggatggcagcttacgagagaacattgaacgcaaggggctcgatatggtcagacgtgattggagtttgctgtcaaaagacattggagatttttgtctcaatcaaattttgtctggagggacatgtgatgatgttgttgagtcaatacacagttctcttgtccaggtgcaagagcaaatgagaagtggtcaaatagaacttgaaaaatatgttatcacaaagagcttaacgaaagcgccagaagattatccagatgctaaaaatcagcctcatgttcaggttgctttgagactcaagcaaaatggttactctggctgctcagctggtgacacagtcccttatataatttgctctcagcaggactcagataatacacattctgtgggaatagctcagagagctagacatcccgaggagttaaaaagagaccctgacaagtggatgattgacattgactattatttgtcacaacagattcatcctgttgtttctcgtctgtgtgcttccatccagggtactagtccagctcgtctggctgaatgtttgggacttgattcggctaagttccaatcaagagtgactgagtctagcaatcaagatacatctacgatgctgttatctgtgatcgatgatgaagatgagagatatcgtggttgtgagccactgcgtttatcatgcccaagctgttctggtaccttcgactgccctcctgtatctagtctgattactagtgctacaagtgtatcagatccaaatgaaggaaaggatgctactgctaatttctggcgccatatgcggtgcccaagatgcccagataacgctgacgagtccaaaatttctcctccaatgcttgccaatcagatgaaaagacaagctgataatttcattagtctatattataaaggtctgcagatgtgtgacgatgagggttgcaaatactcgactcacagcgtaaaccttagagttatgggggattctgagagaggaaccatctgccctaactacccactctgcaatggtcgcctagtaagacagtacacggaggcagatctatacaggcaactgtcatacttttgctatgtacttgatgcaacccggtgtcttgaaaagctggaccagaaggcaaggctccccttcgagagagagtttgtagcagtaggccaaacaattaacttggcactgcaagagatccagaaaatccgagatagatgtgcatttggatgggttcagctaaaggaccttgccgtgtcaatatga

SEQ ID NO: 1968 - protein, 1541 aa, Sorghum bicolor
MEDSPADAAGSGRRTRTRTRGAEASGRAARLQQLRAVRNGEIRASDVIQVKVDAPIYDTVPEEEYNVLVARRKKEAGEFIIDDDGLGYVDDGREEDWSHRALPSSSDEGSDDEDGAPRKRKQPRPPQAKRQPQQSAKAAASFSAAAAKTGQQISSLFTSSVFKRTGSDRTKSLALAADSIVDDIIAEFAPDENDREERRRRVGRVSAPQPPPPTVSYVKPQKVIVDAEMVRSDNGNDMAVELKNDTEMETNLEEIPGSSAELVVDNLEEIPGSSAELVFDNKSLEEPKQEANGEVKVEKTHRLNAKIKAEESRNNDVTSATAGWMKICGNGQNAVGEEGVTVDGNTNVDESSEFELKDGALPFYILDAYEEPFGANSGTVYLFGKVEVGKRFHSCCVIVKNIQRCIYAIPNHSVFPRDSISGIERNPTSADLLPSLRATLHELASGLKSEIADKLSDLNVSNFVMTPVKRNYAFERTDLPNGEQYVLKINYPYKDPALPADLRGEHFHALLGTNNSALELFLIKRKVKGPSWLSVSKFVTRPSTQRVSWCKFEVTVDCPKDISVLTTSTNLEVPTVVVAAVNLKTIINEKHNVHEIVSASLICCHGVKIDSPMRPEDWQKRGMLSHFTVMRKLEGSIFPIGLAKGASDRNEQAGSNVLALESSERALLNRLMIELSKLDCDVLVGHNISGFDLDVLLHRAQTCKVLSSMWSKIGRLRRSSMPRLTKGSTLYGSGASPGIMSCIAGRLLCDTYLCSRDLLKEVSYSLTQLAETQLKKVRREVSPHDIPLMFQSSTELLKLVEYGETDAWLSLELMFHLSVLPLTRQLTNISGNLWGKTLQGARAQRVEYLLLHSFHARKFIVPDKFARNKELNSTKRKMNADTEGANADDGAADPSVDDEVHNGDQGKARKGPSYAGGLVLEPKKGLYDKYVLLLDFNSLYPSIIQEYNICFTTVERSSDGSVPNLPASKATGVLPELLRSLVERRRMVKSWLKTASGLKRQQFDIQQQALKLTANSMYGCLGFSNSRFYAKPLAELITLQGREILQNTVDLVQNNLNLEVIYGDTDSIMIHTGLDDISRAKAIAGKVIQEVNKKYRCLEIDLDGIYKRMLLLKKKKYAAIKVALDGSLRENIERKGLDMVRRDWSLLSKDIGDFCLNQILSGGTCDDVVESIHSSLVQVQEQMRSGQIELEKYVITKSLTKAPEDYPDAKNQPHVQVALRLKQNGYSGCSAGDTVPYIICSQQDSDNTHSVGIAQRARHPEELKRDPDKWMIDIDYYLSQQIHPVVSRLCASIQGTSPARLAECLGLDSAKFQSRVTESSNQDTSTMLLSVIDDEDERYRGCEPLRLSCPSCSGTFDCPPVSSLITSATSVSDPNEGKDATANFWRHMRCPRCPDNADESKISPPMLANQMKRQADNFISLYYKGLQMCDDEGCKYSTHSVNLRVMGDSERGTICPNYPLCNGRLVRQYTEADLYRQLSYFCYVLDATRCLEKLDQKARLPFEREFVAVGQTINLALQEIQKIRDRCAFGWVQLKDLAVSI

SEQ ID NO: 1969 - DNA, 4215 bp, Sorghum bicolor
atggacgcgccgagagagctgcagtgcgtcggccggctcgagatcgccgcgccgccgccggcgcgctaccttcgcgtcggctccctccccgtccccaccgactcctctgcctgtctcccagccctcctgccctctccgtccccgactggtgctccaaggtatcaaatgctgccactagagactgatctcaacacactccctatgattccaaacatcccagagaaggttttttcaagtgatgcaaagagtactgaaggactacggtatgatagtggtcatatcaaccagaacttatcaaggaagtgtgaagcattagctgtgtcaggtttggcggaatatagcgacgaaatagatgtgattgctccagctgatatcatgaagcagattttcaaacttccatactccaaggcacaagtatctattgctgtaaaccgcataggagatacactcattctaaacacagggcctgatgttgatgaaggtgaaaagatattcagaagacaaggtaaccagcctaaaggatctgatccatcaatatttctgaattttgcaatgcactctgtccgagcagaagcttgtgattgtcccccaagtcatcaagcttcgcaggagaagcaagcagcgtctgcagtattgcgtggaacctttggctgtagcgagggttcttttgattcatccccatcatctagttttagcacatcaccttatctggatcagaatgacagtaaaagtagaaaagctccgcatagtactcatgaaagcctgtacttgggagcaatggaaaacaagcggaaagttaaaggatctgatcctattaaaaaaaccgctcgtgttggtgaaaaaaacagctgtgaggtgcaagaatctgagaagagcaagagagtgggaaataatggatttcgtaaagtttgcttttggcaattccacaatttccatatgcttttgggtagtgacttgcttatatttagcaatgagaaatatatggcagtcagtttgcacctatgggatgtctctagacaggttactccattgaactggcttgaagcttggcttgacaatgtaatggcaagtgttcctgaattggcaatatgctaccatcagaatggtgttgttcaaggttatgagcttttaaagaatgatgatatatttctccttaagggtgtctcagatgatggcacacctgcatttcatccacaggttgtccagcaaaatggccttgctgtgctgaggttcattcaggataactgtaagcaagaccctggtgcatattggctgtacaaaggcgctgaagaagatgtcatacagttatatgatctgtctatcttacctgaaaaacatacaactggtgatcatagatctccatgcggtcctatgtcatcttttatagacaagggaaggaaggagtcattgttctctctgggtacactcctttaccgtgttgctcacaggatgtccctgtcaaaggtgcctagtaatagagcaaaatgtgcaaaattcttcaggaaatgtttggattttctcagtgagcaggatcacctggttgtccgggcatgtgcacatgaacagtttgcaagactcatcctcaaatgttatgaggagctggagctgacatctgaatcatttatgattgaatctgaagtcacccttactgatttggatgatggttctccagaactgagacttgagaatttaccagcaaaacaaaatgtactgccagagcttggcaagaatgagccagcagtgttagatgatgtgttggaatgcacaccatcagtgtcttctggtatgacaaatagtttagtggaaccaagccaagttgttggtggttcatcatcttcagttacaaaagatgtttctctggacagcttggtcatgtgtcaggctggtatatcaaaaacaattgccgatgccatctcctctaagttggctgccatacaccacatatctcaagctatcaaatcccttagatggaatcgacagctgcagaataatactcagcatggttgtggggacaatgcagataccatttgggagagatcagtcgacttctctttatgccgatgtggtgatgttgattgtattgaggtctgtgacatcagggagtggctgccaaaatcaaaaatggatcataagttgtggaaacttgttcttttgctaggggaatcttatttggcacttggagaggcatacaagaatgatgggcagcttcagcgcacccttaaagttgttgaattagcttgtttggtatatgggtctatgcctggacatattgatggtgacgagttcatctcatccatgtccaacagtttgttgagtcaagaagatgttgatctaaaaactaaacttgtactggatgaggcagattattgcaatatcagaagatgcttcagttatgatgtttcttcccaccaattgccaccaaattatttattctgggccaaggcatggatgcttgttggtgatgtctatgcggaatatcacagattgaatggtcatcaagcaaagttggtaccagaacagaagtctcatggcgaagttagaatgtcaaatgaagttgcattggaggtcaaacgccttaagagaaaactgggaaaggataagcagaattgtgacacatgctctttgataaactgtagctgccaaagtgacagggcaagtagtggcagcagtgcaagcagcagtagttcggaggcctctaagctttatgtccgaaagaaaaataaaaaatcacttggcaggaaccttcaatcacaatatagagaggccagcaagaaccccaatgcacaagaagctacgcaaggttctgaaaaaaagcagcatgatgtgaatgatacttgtattgagaataacccagtgttaaatgacgatgttggtcattacagtcaagccagggaaaatcagtcaagaaatgtcgatggggttcctgaaaaatctcaagcaagtgttcctactgtgagggatggtggtatcttcaagttcctcggtggtccaaaacctggagatattgagtacaacttgtcttctgctattcactgctatggtgcggccaagggagcattgtacgcatttcctgtgcattcagtagaaacttccacagttcttaagaaaagaggctgggcatttaatgaactgggccgttgtagactggagtgtagaaatctgggtagcgctgagattgcttttgcggatgctattaaagcatttcaagaggtctttgaccacacaaatgttatactgatcaactgtaacttaggtcatggtaggagagctttagcagaggaatgtgtatccaggattgatgaatttcagaagcatgatcttcctgaaggcacatatatgcaatccttcaagtcagccaagtcagaatattttcaagcaataaactactacaccgcagctaagaggcaactgaagtatgtcaatactgaggtcgataaagtactataccatgaggtttacacacagtatgcccatacctacctgaggcttggaatgcttttggcaagggaaagcttcttaactgatagttatgaaggcggacttgtcgatgactcatctaacagaacagttctagagatttcagcgagtgatgctttttgggaggctttgtctacgtatgaatcccttggtgaacatcgcaaacaggaagctgcttttggtcattttcagctcgcttgttatcagagggatttgtgcttaaggtttctggatttagtcgacaaggaggttaaacagaaaaatgaggataaatatcgtcagaaaagtaagtggtatggttcactagctgagaagaactggcagaaggctttagaattttatgggccgaagacacatcctactatgtttcttaacattcttatggcgcagtctgccctttctattaatatttctaattccttccactcaaccgcgatgcttgacactgctctgactcacttgttggaaggccggcatgtggttgaagcaaatgaagactactccaatgatatggatctggacataaaaccaaagttctggagccagctgcagagcctgctgaagaggatgctggtgggatccctgcctagcagcacaggcagagtagtttcttctgtcagccaggtcagcactaacaacagaacagaagctgctaagctgaaagagatgtatcgtttgtcgctcaaatcttctactctgggccagctgcatgagttgtacaagctttgggtatcttag

SEQ ID NO: 1970 - protein, 1404 aa, Sorghum bicolor
MDAPRELQCVGRLEIAAPPPARYLRVGSLPVPTDSSACLPALLPSPSPTGAPRYQMLPLETDLNTLPMIPNIPEKVFSSDAKSTEGLRYDSGHINQNLSRKCEALAVSGLAEYSDEIDVIAPADIMKQIFKLPYSKAQVSIAVNRIGDTLILNTGPDVDEGEKIFRRQGNQPKGSDPSIFLNFAMHSVRAEACDCPPSHQASQEKQAASAVLRGTFGCSEGSFDSSPSSSFSTSPYLDQNDSKSRKAPHSTHESLYLGAMENKRKVKGSDPIKKTARVGEKNSCEVQESEKSKRVGNNGFRKVCFWQFHNFHMLLGSDLLIFSNEKYMAVSLHLWDVSRQVTPLNWLEAWLDNVMASVPELAICYHQNGVVQGYELLKNDDIFLLKGVSDDGTPAFHPQVVQQNGLAVLRFIQDNCKQDPGAYWLYKGAEEDVIQLYDLSILPEKHTTGDHRSPCGPMSSFIDKGRKESLFSLGTLLYRVAHRMSLSKVPSNRAKCAKFFRKCLDFLSEQDHLVVRACAHEQFARLILKCYEELELTSESFMIESEVTLTDLDDGSPELRLENLPAKQNVLPELGKNEPAVLDDVLECTPSVSSGMTNSLVEPSQVVGGSSSSVTKDVSLDSLVMCQAGISKTIADAISSKLAAIHHISQAIKSLRWNRQLQNNTQHGCGDNADTIWERSVDFSLCRCGDVDCIEVCDIREWLPKSKMDHKLWKLVLLLGESYLALGEAYKNDGQLQRTLKVVELACLVYGSMPGHIDGDEFISSMSNSLLSQEDVDLKTKLVLDEADYCNIRRCFSYDVSSHQLPPNYLFWAKAWMLVGDVYAEYHRLNGHQAKLVPEQKSHGEVRMSNEVALEVKRLKRKLGKDKQNCDTCSLINCSCQSDRASSGSSASSSSSEASKLYVRKKNKKSLGRNLQSQYREASKNPNAQEATQGSEKKQHDVNDTCIENNPVLNDDVGHYSQARENQSRNVDGVPEKSQASVPTVRDGGIFKFLGGPKPGDIEYNLSSAIHCYGAAKGALYAFPVHSVETSTVLKKRGWAFNELGRCRLECRNLGSAEIAFADAIKAFQEVFDHTNVILINCNLGHGRRALAEECVSRIDEFQKHDLPEGTYMQSFKSAKSEYFQAINYYTAAKRQLKYVNTEVDKVLYHEVYTQYAHTYLRLGMLLARESFLTDSYEGGLVDDSSNRTVLEISASDAFWEALSTYESLGEHRKQEAAFGHFQLACYQRDLCLRFLDLVDKEVKQKNEDKYRQKSKWYGSLAEKNWQKALEFYGPKTHPTMFLNILMAQSALSINISNSFHSTAMLDTALTHLLEGRHVVEANEDYSNDMDLDIKPKFWSQLQSLLKRMLVGSLPSSTGRVVSSVSQVSTNNRTEAAKLKEMYRLSLKSSTLGQLHELYKLWVS

SEQ ID NO: 1971 - DNA, 720 bp, Sorghum bicolor
atggcgagcagcgcgggggaccggttcctgaggcagctgagcgcgagcaacggcggcgacgacgaaggggtctgcggcggcctgcagctggaccagcaggagtacggcggcgccggcgcggggaggaggggctcccggcggtggtccaagaagcgggccgccgccgccgccgccgcgaggggctacggcgccggcgccggcgggtacggcgtgaagcagcaggcggaggccgccgcaactgccgcgaggaagcgggtgatggtggtggtggatgagacctcgggctccaagcacgccatgatgtgggcgctcacccacgtcgccaacaagggggacttcctcacgctgctccacgtcctgccgcactccggcagcggccggggcgaggaggcctcctccctcgccaactcactcggcacgctctgcaaggcctccaggccagaggtggaggttgaagcccttgtgatccaagggcccaagctgggcaccgtgctcagccaggtgaagaagctggaggcctccgtgctggtgctcagccaatgcaagccatctccttactgctggctaagctgtttgctacggagcagcagcgaggagtttgtggagcaatgcatcaaccaggcggagtgcctgacgctggcggtgaggaagcagagcaagggcgtcggtgggtacctcgtcagcacccggtggcagaagaacttctggctgctggcttga

SEQ ID NO: 1972 - protein, 239 aa, Sorghum bicolor
MASSAGDRFLRQLSASNGGDDEGVCGGLQLDQQEYGGAGAGRRGSRRWSKKRAAAAAAARGYGAGAGGYGVKQQAEAAATAARKRVMVVVDETSGSKHAMMWALTHVANKGDFLTLLHVLPHSGSGRGEEASSLANSLGTLCKASRPEVEVEALVIQGPKLGTVLSQVKKLEASVLVLSQCKPSPYCWLSCLLRSSSEEFVEQCINQAECLTLAVRKQSKGVGGYLVSTRWQKNFWLLA

SEQ ID NO: 1973 - DNA, 495 bp, Sorghum bicolor
atgagcgggatcgggcagaggtcgtcgcggccatggccgggggaccccgcgtccacgccgtcagagccagccgccgcggtggccgcggccgcggacgcgcggggcgaggcgtccacgctcagggacttcggcacgtccatggacgccatctccttcgggttcgcggccacggccatcctcatctcgctcttcctcctcatggccatcttcgagcacctcatcaagccccgggccttcccgccggactccgccgacgacgacggcaggcgtccgcacgctgctgtccgccaccggcatggccgccgctcgcccggcaagctccgggggacgcccatggtggaggcggtgctgcaggcggcggacctgtcggtgctgatgccggggcagcggtacccgacgtacctggcacagccggcgccgctgccgccgtcgtgccccagggaaggtgtgcattggccgccgcacgaccaccacaactcctacatgccaccctga

SEQ ID NO: 1974 - protein, 164 aa, Sorghum bicolor
MSGIGQRSSRPWPGDPASTPSEPAAAVAAAADARGEASTLRDFGTSMDAISFGFAATAILISLFLLMAIFEHLIKPRAFPPDSADDDGRRPHAAVRHRHGRRSPGKLRGTPMVEAVLQAADLSVLMPGQRYPTYLAQPAPLPPSCPREGVHWPPHDHHNSYMPP

SEQ ID NO: 1975 - DNA, 1146 bp, Sorghum bicolor
atggatggtgcacagccaccgagtgggcaattgaacaactcgttcaatactcttatggtttctggagatgagcagagtcaacagccgcaggatgctgggaatgaaaccagcttcacgaattggaaagaccttcccatggagctgcttctgcgtatcatttcactagttggagatgacaggatagtcattgtggcctctggtgtatgcacaggatggcgtgacacattagggtggggagttgcaaatctttcgctgtcatggtgccaggaccacatgaatgacttggtgatgtcactggctcacaaattcacgaagctccaagttctatctctacgccaaatcagagctcagctagaagacagtggggtggaggccgtggcgaacaactgccatgatttacgcgagctggatcttagcagaagctttaggctcagcgacctgtccttgtacgctctggcgcacgggtgccctcaccttacaaggctcaacatcagtgggtgctccaatttcagtgattcggctcttgtgttcctctctagccagtgcaagaacctcaaatgcttgaacctgtgcgggtgtgtgagggcagcttctgacagagcgctacaggccatcgcatgtaactgtggccagctgcaatcgttgaacctgggctggtgtgatagcatcactgacaagggagtgaccagcttggcttcaggatgccctgagctcagggctgtggacttgtgcggttgtgttcttataacagatgagagtgtggttgcgctggcgaacggctgccctcacctgcgttccctgggtctgtactactgccagaacatcacggaccgcgccatgtactccctggccgccaacagccgtgtgcgcagccagggcaggggatgggacgctgcagtgaagagcggcggcagcagcaaggaccgggagcgggacgggctggcgagcctgaacatcagccagtgcacggcgctgaccccgccggcggtgcaggcggtgtgcgactcgttcccggcgctgcacacgtgcccggagcggcactcactcatcatcagcgggtgcctcagcctcacctccgtgcactgcgcctgcgcgctgcaccctcaccgagccgggcgcgtcatcctctccaaccacgcctactga

SEQ ID NO: 1976 - protein, 381 aa, Sorghum bicolor
MDGAQPPSGQLNNSFNTLMVSGDEQSQQPQDAGNETSFTNWKDLPMELLLRIISLVGDDRIVIVASGVCTGWRDTLGWGVANLSLSWCQDHMNDLVMSLAHKFTKLQVLSLRQIRAQLEDSGVEAVANNCHDLRELDLSRSFRLSDLSLYALAHGCPHLTRLNISGCSNFSDSALVFLSSQCKNLKCLNLCGCVRAASDRALQAIACNCGQLQSLNLGWCDSITDKGVTSLASGCPELRAVDLCGCVLITDESVVALANGCPHLRSLGLYYCQNITDRAMYSLAANSRVRSQGRGWDAAVKSGGSSKDRERDGLASLNISQCTALTPPAVQAVCDSFPALHTCPERHSLIISGCLSLTSVHCACALHPHRAGRVILSNHAY

SEQ ID NO: 1977 - DNA, 2376 bp, Sorghum bicolor
atggcatttggccgaggtgggaagatggacggccgccggccgtcctcgacgtcgtcgtcgttctgcacgaccaccacggtcgtcgtctttgtggcgctctgcctggtcggcgcgtggatgatgacctcgtccactgtcttcccgctggagatctcctcgaataagaagccggtggtgaagcagcagcctgcgcctgtcaattttggggcctcacaggacaatgctggtgaaggttctgagaaatttgaggacaccgacaacaatgatgccacgatgccggaggagccgaataacaaggatgccacgatggaagagaagttcactgagaagccagaggagaagcctgaagagaaggagccggaagtgccgacagagaaagctgagaccaaggatatgtttgatgatgcaaatggaaaatcagaagggcggtcagatgacatgaagaacgatggtgacggggagaagagtggggagaagaaagatgatgaaatcacaaatgagagtggtgatgaaaaacctgatggagagagcaaggatgatcaagaagagaagcctgaaggtgatgccactcaggaggagcaacctcagatagaagagaaggtggaagaaaatggagagaaggatcagagctcaaactccaacgaggtatttcctgatggggcccaatcagagcttctgaaggagtcaaatacccagaatggttcattccccacacaggctgcagagtccaagaatgaaaaggaagtccaagcgtcatcaaagtcttcaggtgatgcgactagctattcctggaaactatgtaatagcagtgcctcgacagattacataccttgccttgacaacgagaaggctatcaagaagcttcgaactactaaacattatgaacatcgtgagaggcattgccctgaggagcctcctacctgccttgttccactcccagaaggatataaacgcccaattgagtggccaaggagcagggacaaggtatggtacagcaatgttcctcacactaggctcgcagagtacaagggacatcaaaattgggttaaagtatcaggtgactacctcctgttccctgggggtgggactcagttcaagaatggtgccctccactatattgatactattcagcaggcactgcctgatattgcatggggcaaacgaagccgcgtcattctagatgtcggttgtggagttgccagctttggaggctacatgtttgatagagatgtgcttaccatgtcttttgctccgaaagatgagcatgaagctcaagtacaatttgcattagaaaggggaattccagcaatatcagctgtgatgggcaccaagagacttccataccccagcagagtctttgatgtcattcattgcgctcgctgcagggtcccttggcacattgaaggtggcatgcttttgctggaattgaaccgcttgttacgccctggtggttactttgtctggtctgccactcctgtttaccaaaagctcccagaggatgttgagatttggaatgcgatgtccactttgacaaagtccatgtgctggaagatggtcaacaagactaaggataagttaaatcaagttggtatggtcatatttcagaaaccaatggacaacatttgctatgagaaaagatccgaaaacaacccaccattgtgcaaggaatctgatgatgcagatgcagcttggaatgtacctttggaagcatgcatgcacaaactgcctgttggctcgaaagttcgagggtcaaaatggccagagttttggccacaaaggcttgagaagactcctttctggattgatggttccaaggttggggtctatggaaagcctgcaaatgaagatttcgaggcagataatgctcactggaaaagggttgtaagtaaatcgtatgtgaatggcatgggaattgactggtccaaagtgagaaatgtaatggacatgagagctgtgtatggaggttttgctgcagctctgagggaccaaaaggtctgggtcatgaatattgtgccgattgattcaccagacacactgcccatcatttacgagcgtggtttgtttggtatgtaccatgactggtgcgagtctttgagcacttacccaagaacttatgaccttctgcacgcggaccatctattctcaaagctcacaaagagatgcaaattgatggcagtttttgccgaggttgatcgtgtactgaggccccaaggcaaactgattgtgagggacactgcggacacaataaacgaactggaaagcatggccaagtccctgcagtgggaggtgcgaatgacctacaccaagggcaacgagggcttgctttgcgtcgagaagtcgatgtggcggcccaaggaactcgatgcaagcacgtga

SEQ ID NO: 1978 - protein, 791 aa, Sorghum bicolor
MAFGRGGKMDGRRPSSTSSSFCTTTTVVVFVALCLVGAWMMTSSTVFPLEISSNKKPVVKQQPAPVNFGASQDNAGEGSEKFEDTDNNDATMPEEPNNKDATMEEKFTEKPEEKPEEKEPEVPTEKAETKDMFDDANGKSEGRSDDMKNDGDGEKSGEKKDDEITNESGDEKPDGESKDDQEEKPEGDATQEEQPQIEEKVEENGEKDQSSNSNEVFPDGAQSELLKESNTQNGSFPTQAAESKNEKEVQASSKSSGDATSYSWKLCNSSASTDYIPCLDNEKAIKKLRTTKHYEHRERHCPEEPPTCLVPLPEGYKRPIEWPRSRDKVWYSNVPHTRLAEYKGHQNWVKVSGDYLLFPGGGTQFKNGALHYIDTIQQALPDIAWGKRSRVILDVGCGVASFGGYMFDRDVLTMSFAPKDEHEAQVQFALERGIPAISAVMGTKRLPYPSRVFDVIHCARCRVPWHIEGGMLLLELNRLLRPGGYFVWSATPVYQKLPEDVEIWNAMSTLTKSMCWKMVNKTKDKLNQVGMVIFQKPMDNICYEKRSENNPPLCKESDDADAAWNVPLEACMHKLPVGSKVRGSKWPEFWPQRLEKTPFWIDGSKVGVYGKPANEDFEADNAHWKRVVSKSYVNGMGIDWSKVRNVMDMRAVYGGFAAALRDQKVWVMNIVPIDSPDTLPIIYERGLFGMYHDWCESLSTYPRTYDLLHADHLFSKLTKRCKLMAVFAEVDRVLRPQGKLIVRDTADTINELESMAKSLQWEVRMTYTKGNEGLLCVEKSMWRPKELDAST

SEQ ID NO: 1979 - DNA, 111 bp, Sorghum bicolor
tacaacaatcctgtgcacatcaccttgacatataatcaccttccatcagaacttacaacattcaacaacactacagcaccaagttgcaaatcttaccaatatctaaagtag

SEQ ID NO: 1980 - protein, 36 aa, Sorghum bicolor
YNNPVHITLTYNHLPSELTTFNNTTAPSCKSYQYLK

SEQ ID NO: 1981 - DNA, 1866 bp, Sorghum bicolor
atggagcccaggagacgagagcgccgggtcatcgccatcgccggtgcggcagcgctcgtcgccgtcggcctcaacatcgccttctccgccgtcaccgcccaccgtcggaggaaacgacgagagcttccagggtttactgctcaagtcaacctgtcagcagctgagattaaaaaaatagctgaccgtatcatctccaagtcaaaggaaacatacgattctgtggccgcagtgcccctagataaagtcagttttgcaaatgtcgttgtaccattggcagaattagatgcgctgcaatttcctctggttcaagcttgtgttcttcccaggatggtatcaccatctgaggatgttcgcaaggcaagtgctgaagcagagaagctgttggattcccactttgtgctgtgcaggcagcgtgaagatgtttatcgcgtcataaaagcgttcacagtgaaagagtttgagcgtaatggagtaaagctatctcaaagcaagagaaaggaaatggagaaattgaaatctcatatggatgcattaaacctgaagtatctacaaaatttgaatgatttcaccaaattccttcttttaggtgaggatgagctagctggaatgccctttgagttcctaaaggatctggaaaaggctgatggaaagtttaaggttccgttgaccagttaccatgttactccaattcttgagcactgcaaggttggctctaccaggaagcagattgctgtcgcttatggacagaaaggtgggaaggataatctagccatcctagaaaatttggttcagctaagacacaagtttgctagattactggggtacaccaactatgctgattttgctattgagcccagaatgccaagaacttcaaggaaggtcttagagtttttggaagagatgtcagaacaattaagtgatgtagctaatagagagctcagcatactcaaagaccttaagatcaaggaggaaggaaatgctttgtttggaatggaagatttattgtactacatcaaaagagctgaagaattcaaggttgatcttgacatcggtgaaattaaacaatacttccctgttagcctggtcatatctggaatgttgaagatgtttcaggatctatttgcactacgattcgatgaaattaaggatgttgaagtttggcatgatacagttcgtgtgttttctgtttgggatgcaagttcaagtgatcttttgggttacttttttcttgatatctttgccagggaaggaaagtatacccacacttgtgttgtgacacttcagaatggatgcttgtgttctaatggtgcacgcaaggttccggctgctgtgatattatctcagtgtccaaaagagcttgatgggaattcagcattactgcggttccctgaagtcgtgaggctattccatgaatttagccatgtggtccatcacgtatccaacagagccaccttttcaagattttcaggtcttcgactggagggtgactttactgaaattccaagcctgctactcgagaattggtgctatgagagtatttctctgaaaatgatgtccggcttccatcaggtaatgctgggtatacctttattggaagggaccagtccagcttcatgttttcctcgtattgcttttggctatgatgctgtgtgctacagttacatatggagtgaggtgtttgctgctgatctttttgtatcaaaatttaaagatgacttgctcaatcagcatgctggattgcggttcagaaataaggtgttggctctaggaggctcaaaagatcccctggagataataaccgactacctaggaagagaaccatcactccaaccttttattcagagcagaacaagaaatagtttgtga

SEQ ID NO: 1982 - protein, 621 aa, Sorghum bicolor
MEPRRRERRVIAIAGAAALVAVGLNIAFSAVTAHRRRKRRELPGFTAQVNLSAAEIKKIADRIISKSKETYDSVAAVPLDKVSFANVVVPLAELDALQFPLVQACVLPRMVSPSEDVRKASAEAEKLLDSHFVLCRQREDVYRVIKAFTVKEFERNGVKLSQSKRKEMEKLKSHMDALNLKYLQNLNDFTKFLLLGEDELAGMPFEFLKDLEKADGKFKVPLTSYHVTPILEHCKVGSTRKQIAVAYGQKGGKDNLAILENLVQLRHKFARLLGYTNYADFAIEPRMPRTSRKVLEFLEEMSEQLSDVANRELSILKDLKIKEEGNALFGMEDLLYYIKRAEEFKVDLDIGEIKQYFPVSLVISGMLKMFQDLFALRFDEIKDVEVWHDTVRVFSVWDASSSDLLGYFFLDIFAREGKYTHTCVVTLQNGCLCSNGARKVPAAVILSQCPKELDGNSALLRFPEVVRLFHEFSHVVHHVSNRATFSRFSGLRLEGDFTEIPSLLLENWCYESISLKMMSGFHQVMLGIPLLEGTSPASCFPRIAFGYDAVCYSYIWSEVFAADLFVSKFKDDLLNQHAGLRFRNKVLALGGSKDPLEIITDYLGREPSLQPFIQSRTRNSL

SEQ ID NO: 1983 - DNA, 1437 bp, Sorghum bicolor
atgccgctggcgctcgcgcagctgcaggacctgcgggaccgcatctccgaccacctccgcccatggagccgctccgcgcagttctgggtccgcgccgcggacatctacaccagctataaggtgtgccagctgcgggcggggtttgtgaaggatgaggacgagcgggaggccatgtgggagcagcagcacgagctcggcgcccagaagatgtactccctctgctccgagctcggcggtcttttcctcaaggctgctcaaattctgggaaaacctgacctggcaccgatggcttgggtgaagagacttgtcacgctgtgtgatcaggccccagccacgccatttgttgtggttagagatgttgtggagaaacagtttggaaagaacttcgatgacatattcgaattcttcgatgtcgagcctgttgggtctgcttctattgcacaggtgcatcgagcaaggcttaaattatcaaaggcagacgttgctgtcaaggttcaacatccaggagccgagcatttgatgatggttgatattcggaatatgcaagcaatggccttgtttctgcagaagtatgacatcaactttgatctattctctgccaccaaagagatggaaaagcagatatgctatgaatttgactttgtgcgtgaagcaagagcaatggaaagaatacgagaattcctacgtgtcaccaataagaaacctccagttatggtgcctcgtgtgattcctgggatggttagcagagaggttttggtaatggaattcatcaaagggaccccaataatgaatcttggcaatgaaatggctaaaaggggcatcgatcctggtggtaagattgcagcaatggaaaagcagaagattttgtcagatcttactcttgcatatggtcaaatgatcttgaaggatggctttttccatgcagatccacacccaggaaacatccttatctgtaaggacacagaggtggctttacttgattatggacaagtgaaagaaatgccagaagatttgcggcttgcttatgcaaatcttgtagttgcaatggctgatgatgatttcttgagggctgaggaaagtttcagggagctcggtatccgaacatgggccataactgataacaagctagaagaattgtttcaattatccctgcgaatgtttgatacaagattaccaccaggtgtaactgttatgtcaccttttgccgatgattcttcgcttaataaaattggagtggagagcttcccggaagagttattttcagtgcttcgaacaattcagcttttgcgagggttgactgtaggcatgggccttacattctcgtgcgctcagcattggagaccaatcgctgaggaagtattgttaaaggctggaagacaaaatgcttcaaaatcaagaaatcaaaagagaagttttctcaggagacttttttggtga

SEQ ID NO: 1984 - protein, 478 aa, Sorghum bicolor
MPLALAQLQDLRDRISDHLRPWSRSAQFWVRAADIYTSYKVCQLRAGFVKDEDEREAMWEQQHELGAQKMYSLCSELGGLFLKAAQILGKPDLAPMAWVKRLVTLCDQAPATPFVVVRDVVEKQFGKNFDDIFEFFDVEPVGSASIAQVHRARLKLSKADVAVKVQHPGAEHLMMVDIRNMQAMALFLQKYDINFDLFSATKEMEKQICYEFDFVREARAMERIREFLRVTNKKPPVMVPRVIPGMVSREVLVMEFIKGTPIMNLGNEMAKRGIDPGGKIAAMEKQKILSDLTLAYGQMILKDGFFHADPHPGNILICKDTEVALLDYGQVKEMPEDLRLAYANLVVAMADDDFLRAEESFRELGIRTWAITDNKLEELFQLSLRMFDTRLPPGVTVMSPFADDSSLNKIGVESFPEELFSVLRTIQLLRGLTVGMGLTFSCAQHWRPIAEEVLLKAGRQNASKSRNQKRSFLRRLFW

SEQ ID NO: 1985 - DNA, 279 bp, Sorghum bicolor
atggctcactaccaggaggtggactactgctcggaggaggtgaagtcggtggccgccggcggccctgccggctttggtcgccatcatggcggccacggcggcgtccagcagcacgtcgtcaaggagaagttcgaggaggtcgacagcgtctcacgcgccggcggcggccgccacggccacttcgaggcccgcgagtccaagttcgaggaggacgtcaacacccgcaccggcgagttccacgagcgcaaggagaacttcgtcgtcaaggccgacaactga

SEQ ID NO: 1986 - protein, 92 aa, Sorghum bicolor
MAHYQEVDYCSEEVKSVAAGGPAGFGRHHGGHGGVQQHVVKEKFEEVDSVSRAGGGRHGHFEARESKFEEDVNTRTGEFHERKENFVVKADN

SEQ ID NO: 1987 - DNA, 279 bp, Sorghum bicolor
atggcctacttccaggaggtggactactgctcggaggaggtgaggtcggtggccccggccggcggcttcggccgctacggcggcggcgtccagcagcacgtcgtcaaggagaaattcgaggaggtcgacacggtgtcacgcgccggcggccaccaccacggccacggtcaccacggccacggcgtcgtggtgcgcgagaccagggtcgaggaggacttcaacacctgcaccggcgagttccacgagcgcaaggagagcttcctcgccagggctaactga

SEQ ID NO: 1988 - protein, 92 aa, Sorghum bicolor
MAYFQEVDYCSEEVRSVAPAGGFGRYGGGVQQHVVKEKFEEVDTVSRAGGHHHGHGHHGHGVVVRETRVEEDFNTCTGEFHERKESFLARAN

SEQ ID NO: 1989 - DNA, 504 bp, Sorghum bicolor
atgacgcctcgggtgctcctctcccgcctgcgcctcacccctctcctccacgacggccaccacctgagacgccctttctccgccgctgctgccaaactacctgacgagttgcctcctggcgcgccgccgccgacctccgactccaggctcttcgtcgccgggttgtcgtggtccgtggatgagcgctccctcacggacgccttctcctccttcggcaccgtcactgaagaccgtgagccactccatggcgcccaggcctgcagcctgctcaatgaaattcctgtttgggacgtggtcacctgctcagcagcaatctatcggcatgcaaggagcgggtcgttccatgagtcatctgagctgtttgtcagcatgatgagggcagttagaataatgtatgacaaaaactctggaaggtcaagaggctttggatttgttcatttctcaaatgatcatgaagctaagtgtgccaaggatgctatggatgggaagaccgaaaaaagttga

SEQ ID NO: 1990 - protein, 167 aa, Sorghum bicolor
MTPRVLLSRLRLTPLLHDGHHLRRPFSAAAAKLPDELPPGAPPPTSDSRLFVAGLSWSVDERSLTDAFSSFGTVTEDREPLHGAQACSLLNEIPVWDVVTCSAAIYRHARSGSFHESSELFVSMMRAVRIMYDKNSGRSRGFGFVHFSNDHEAKCAKDAMDGKTEKS

SEQ ID NO: 1991 - DNA, 1455 bp, Sorghum bicolor
atgaactgtgggccgcccgaccagctgccgccggcgtcggcgccggcgtgcttcctcaacctcaactgggaccagtccatggccgccgccacggccggcgaccacctcgacccggcgctcagctcgatggtctcctccccggcgtccaactcgacggccgccgcggcgactgacggcctcgctctccacgggatctcgccacagccgcagtacggaggcacccctctcagctcgccccccaagctcaacctctccatgatgggccagttccaccactacccgccgccgcaggtcggtggcgctgcgcccagcggcctgccaatcctcgagaacttgatgccgatggctcatctagaccagttcctcgccgacccaggcttcgccgagcgcgcggcgaggctctccggctttgacggccgccccggtggaagtggctatggcggcgccgtcccgggacagtttggcctcccggacgctgaccccatcgacgcattgaaggagctggagctcgggaacggccgggacgagtcatcggtgtccgatccggcgtccgccagcgcggagatggcgctcaaggggccttccgatggcaatgcaaagaaacgcaaggctagcggaaaggggaaaggcaaggacggccccgggtccaccgccgccaaggatctcgcgaaggaggaatccggtgggaagcggtgcaaatcggcggacgagagcaatggcgcggaggacaactccaccaagggcaaggccgcgcagagcaatagcgagaatggtggaaagaagcaggggaaggacagcacatcgaagcctcccgagccgcccaaggactacatccatgtccgggcgaggcgcggtgaggcgacagacagccacagcctcgcggagagggtgagaagggaaaagatcagccagcggatgaagctgctgcaggatcttgttccgggttgcaataaggtggttggcaaggcagtcatgctcgatgaaatcataaactacgtgcagtccttgcaacggcaagtcgagtttctgtccatgaaattggccactgtgaatccccagctggacttcaacaacctgcctaacctccttcctaaagatatacaccagtcctgtggcccgctgcagaactcgcatttcccgctggagacctcaggtgcaccgctgccataccttaaccagcctcaccaggggaaccctctaggttgcagcctaaccggcatggacagccagagttctatgcacccacttgacccggcattttgccggccaatgaattcgcaacatcctttcctcaacggtgttagtgatgctgcatctcaggtcgggactttctggcaagacgaccttcaaagcgtagttcacatggatatcgggcaaagtcaggagatcgctcccacctcttcgaatagctacaacggttcactgcaaacagtccacatgaaaatggagctttga

SEQ ID NO: 1992 - protein, 484 aa, Sorghum bicolor
MNCGPPDQLPPASAPACFLNLNWDQSMAAATAGDHLDPALSSMVSSPASNSTAAAATDGLALHGISPQPQYGGTPLSSPPKLNLSMMGQFHHYPPPQVGGAAPSGLPILENLMPMAHLDQFLADPGFAERAARLSGFDGRPGGSGYGGAVPGQFGLPDADPIDALKELELGNGRDESSVSDPASASAEMALKGPSDGNAKKRKASGKGKGKDGPGSTAAKDLAKEESGGKRCKSADESNGAEDNSTKGKAAQSNSENGGKKQGKDSTSKPPEPPKDYIHVRARRGEATDSHSLAERVRREKISQRMKLLQDLVPGCNKVVGKAVMLDEIINYVQSLQRQVEFLSMKLATVNPQLDFNNLPNLLPKDIHQSCGPLQNSHFPLETSGAPLPYLNQPHQGNPLGCSLTGMDSQSSMHPLDPAFCRPMNSQHPFLNGVSDAASQVGTFWQDDLQSVVHMDIGQSQEIAPTSSNSYNGSLQTVHMKMEL

SEQ ID NO: 1993 - DNA, 612 bp, Sorghum bicolor
atggagatgggagggatgagtgatgcggagcggctgttcttcttcgagatggcctgcaagaactccgaggccgtgtacgagcagaaccccaacgacgccgacaacctgacgcgatggggcggcgcgctgctggagctgtcgcaggtgcgggccggccccgacggcctcaagctccttgaagatgcggaagccaagctggaggaggcactgcaaattgatcccaacaagtctgatgcactctggtgcttgggaaatgctcagacctctcatggattcttcactccagacactgcaatagctaatgagttctttgcaaaggcaaccgggtgtttccagaaggctgttgatctggaacctgcaaatgagctgtacaggaagtctttagacttgtcaacgaaggcacctgaactgcatttggagatccagaggcaaatggtttctcaagcagcgacacaagcatcctcagcctcaaatccaaggcaatcaaggaagaagaagaaggatagtgacttctggtacgatgtttttggatgggtgatccttggcgctggcatttttgcttgggttggattggcaagatcaatgcctccaccgccaccaccggccaggtga

SEQ ID NO: 1994 - protein, 203 aa, Sorghum bicolor
MEMGGMSDAERLFFFEMACKNSEAVYEQNPNDADNLTRWGGALLELSQVRAGPDGLKLLEDAEAKLEEALQIDPNKSDALWCLGNAQTSHGFFTPDTAIANEFFAKATGCFQKAVDLEPANELYRKSLDLSTKAPELHLEIQRQMVSQAATQASSASNPRQSRKKKKDSDFWYDVFGWVILGAGIFAWVGLARSMPPPPPPAR

SEQ ID NO: 1995 - DNA, 1212 bp, Sorghum bicolor
atggattgggacgccaagatgcttcctgcctgggacctcggcacggtggtcgggcccagcagcagcggaggcgtaggcgtaggcggtggcggcgcgctggacctgaagctgggcgcgccgacgagctcgagggtggtggccacggccgccgcggccgtcggtgccgcgcccacgctgccgtcagcgaaccatccgcctccgccggcaccggcaccggcaccggcgccgtcgtcgtccgcgccggcgaagcggccgcggccggggcacgcgcagcaggcggtgccggcgtgctccgtgcagggctgcgacgccgacctgtcccgctgccgcgactaccaccgccgccacaaggtctgcgaggcgcactccaagacgcccgtcgtcaccgtcgccggccagcagcagcgcttctgccagcagtgcagcaggtttcatctgctcggggagttcgatgaggtgaagaggagctgcaggaagcgccttgatgggcacaaccgccgccgccggaagccacagccggaccctctcaaccctgccggcttgtttggcaatcaccatggagtgacaaggttcacatcgtacccgcagctcttcaccacatccatggcagagcccaaatggtcggtggttaagacggagaccgacgtgttccaagaccagtactacccggccgtccacctcgatggtgccggcgccggttccctcttccacggcaaggaccggaagcacttcccgttcctgaccaaccacaacaatggcggcggtgacgtggccgccgcggccctgggctgccaacccttcaccatcaccacgacggcttcctcagagagcagcagcaagcagagcaacggcaactgtgctctctctcttctgtcagacaacccgacaccagcacagacggccatgatcccaaccgcgcagcccctcggcccggcgatgcagtacggcaggctccctggcagcggcggcggcagcggcgacgtctccctcaccgggatgtcgtacatgagggtggcagacagcaggcaggcatccatgctgacaacttcgtcacccagtcacactgcagttgcttcccctggtccggctactgcagctgcaacacagcaccagctgcagtaccaccatggctactaccatgtgagcggtggcgagcagggcaacaacccagatggtgctgccattcaggcccttcccttctcatcgtggtag

SEQ ID NO: 1996 - protein, 403 aa, Sorghum bicolor
MDWDAKMLPAWDLGTVVGPSSSGGVGVGGGGALDLKLGAPTSSRVVATAAAAVGAAPTLPSANHPPPPAPAPAPAPSSSAPAKRPRPGHAQQAVPACSVQGCDADLSRCRDYHRRHKVCEAHSKTPVVTVAGQQQRFCQQCSRFHLLGEFDEVKRSCRKRLDGHNRRRRKPQPDPLNPAGLFGNHHGVTRFTSYPQLFTTSMAEPKWSVVKTETDVFQDQYYPAVHLDGAGAGSLFHGKDRKHFPFLTNHNNGGGDVAAAALGCQPFTITTTASSESSSKQSNGNCALSLLSDNPTPAQTAMIPTAQPLGPAMQYGRLPGSGGGSGDVSLTGMSYMRVADSRQASMLTTSSPSHTAVASPGPATAAATQHQLQYHHGYYHVSGGEQGNNPDGAAIQALPFSSW

SEQ ID NO: 1997 - DNA, 297 bp, Sorghum bicolor
atgaactacgcgggcatgaactacgcctacgcggacagaggaggcatgaacgccgcgggcagaagcagcatgtcgtcgccacggccgggcacggactggggccccatcatcgtggcggtgatcctcttcgtggtgctctcgccgggcctgctgttccagctcccctcgcggacgcgggtcgtcgagttcggcaacatggccaccagcgccatcgccatcctcgtccacgccgtcatcttcttctgcctcctcaccatcttcgtcgtcgccatcggcatccacgtctacgccgcctag

SEQ ID NO: 1998 - protein, 98 aa, Sorghum bicolor
MNYAGMNYAYADRGGMNAAGRSSMSSPRPGTDWGPIIVAVILFVVLSPGLLFQLPSRTRVVEFGNMATSAIAILVHAVIFFCLLTIFVVAIGIHVYAA

SEQ ID NO: 1999 - DNA, 855 bp, Sorghum bicolor
atgagcgacgacgtgatatggcactgcatccgccacaaccactgcagcttcatggccaagatcacgacagggatattctgccgcaacccctacaacgcgacgggtatctgcaaccggagctcctgtccgcttgccaacagtcgctatgctactatccgggatcatgacggtgttttctatctgtacatgaaaactgctgaaagagctcatctgccaaacaaattatgggagagagtcaaactgccaaagaattacgagaaagcaatggatgtcataaacaagcatcttgaattttggcctaagttacttgtgcacaagatcaaacaacggctgacaaaaatgactcagtatcgtataagaatgaggaaacttcaactgaaagtgagggagaaggtcatgacaatgcccaggaaacaaacacagcgtgatctccggagattagacaaagctgaaagggctgctcaactagaaaagaatattgaaaatgaattgaaggaacgcctgactaaaggtgtttatggtgacatctacaattatcccttcaaagcgtttgatgttgttcttgatatggaaaaaggtgaagtggctcctgaagaagaggaggaagaagaaggcgagatagaatatgtcgaaggtgatgatatggaagagatggatgatatggaagatatggaagacttcgaaggcctcagtgacggaggcacagatgaagatgatgttttggatgatccagtatcaaagaaacccaagggatcatcttcttcgaagcaaaacgccgggaaaaggtctaggaaggttatgactgaggtggaacaagacgaagagataaatacgaggcagaggcgaagggcatga

SEQ ID NO: 2000 - protein, 284 aa, Sorghum bicolor
MSDDVIWHCIRHNHCSFMAKITTGIFCRNPYNATGICNRSSCPLANSRYATIRDHDGVFYLYMKTAERAHLPNKLWERVKLPKNYEKAMDVINKHLEFWPKLLVHKIKQRLTKMTQYRIRMRKLQLKVREKVMTMPRKQTQRDLRRLDKAERAAQLEKNIENELKERLTKGVYGDIYNYPFKAFDVVLDMEKGEVAPEEEEEEEGEIEYVEGDDMEEMDDMEDMEDFEGLSDGGTDEDDVLDDPVSKKPKGSSSSKQNAGKRSRKVMTEVEQDEEINTRQRRRA

SEQ ID NO: 2001 - DNA, 1176 bp, Sorghum bicolor
atgaacggagcgagcgccagcgctggcgtcggcaccggcgccggcgctgctggggaggcgccgctggtgtacaaggcctggaagggtaacaatgtgtttttactgaaggggaggttcatatttggtcctgatgcaagatccttgtttgtcaccatgttccttattatcgcgccagcatcaatcttctgtgcattcgttgcgaagggattgatggataggttctcttatgccctgggattgccggttatgattgcagcagttctattcacagcatatgatctgagtcttctgcttctaacttctgggagagatccggggatcatacctcgcaatgcacatcctccagaacctgaaggttttgatggcaatgcagaggttggggctaaccagactccacctgtgcgtttgccccgagtgaaggatgttgttgtcaatgggatcactgtgaagacaaaatactgtgacacttgcatgttgtacaggcctcctcgctgctctcattgctctatctgcaacaactgtgtggagcgttttgaccatcactgtccatgggttggacaatgcataggacttaggaattacaggttcttctatatgtttgtattctcaacaactctgctctgcctgtatgtctttgggttctgctgggtgctcattgttaagatcagaaatgcagagcagattacaatttggaaggcaatggcaaagacccctgcatctattgctttagtcatctacacattcattgcggtttggtttgttggtggcctctctgtgttccatttgtatctcatgagcacaaatcagaaaacatcaaagagatcttctttacaacaatccctccttccaagaacaacttctgtggtagggtccacaggagcatggtctgaggcctcgtccacaaatggtttcatgagtccaaacatggggagagctgttggcgacattgagatgggtagaaaaccagtggcatgggatgagcctaggatggcagctgagattggtgatttaggagcaggtctgagcaacttgttggaggacaaggatggcaggtttcgtagcgcatctccagatctcagccgtgacgcccttgcagttggaggaggcttagaagagcaaggctcctcggcgatgaaccctgggcgttcaagctggggagttgaagcaggtcgatga

SEQ ID NO: 2002 - protein, 391 aa, Sorghum bicolor
MNGASASAGVGTGAGAAGEAPLVYKAWKGNNVFLLKGRFIFGPDARSLFVTMFLIIAPASIFCAFVAKGLMDRFSYALGLPVMIAAVLFTAYDLSLLLLTSGRDPGIIPRNAHPPEPEGFDGNAEVGANQTPPVRLPRVKDVVVNGITVKTKYCDTCMLYRPPRCSHCSICNNCVERFDHHCPWVGQCIGLRNYRFFYMFVFSTTLLCLYVFGFCWVLIVKIRNAEQITIWKAMAKTPASIALVIYTFIAVWFVGGLSVFHLYLMSTNQKTSKRSSLQQSLLPRTTSVVGSTGAWSEASSTNGFMSPNMGRAVGDIEMGRKPVAWDEPRMAAEIGDLGAGLSNLLEDKDGRFRSASPDLSRDALAVGGGLEEQGSSAMNPGRSSWGVEAGR

SEQ ID NO: 2003 - DNA, 1263 bp, Sorghum bicolor
atgaggcggtgggtcttggccatcgccattctttccgctgcttcggcggcggcgctcttccttggggctgaggcccaggcggtccagcagcagggccaccagacagagaggatctcagggagtgctggtgacgtgttagaagataaccctgttgggaggctcaaggtttacgtctatgatctccccagtaaatacaacaagaagctgctgaagaaggatcctaggtgcctgaaccacatgtttgccgcagagatcttcatgcaccggttcctgttgtcaagcgctgtccgaacttttaatcctgaagaagcagattggttctacacgcctgtgtacaccacatgtgacctgactccttcgggtcttccccttcccttcaaatctcctcgcatgatgcgcagcgcaattgagctgattgccacgaactggccttactggaacagatcagagggtgcagatcatttctttgtcacaccacatgactttggtgcttgcttccattatcaggaagagaaagcaatcggacggggaatccttcccttgcttcagcgtgctacactggttcagacctttggacagaagaaccatgtctgcctgaaggacgggtccatcacaatcccaccatttgcacctccccagaaaatgcaggctcaccttatccccgcagacacccctcggtccatcttcgtgtacttccgtggtctgttctatgacaccagcaacgatcctgagggtggttactatgcaagaggtgctcgtgcatcagtctgggagaacttcaagaacaacccgctctttgacatctcaaccgatcacccaccgacttactacgaagacatgcagcgttcagtgttctgcctgtgcccattgggttgggctccatggagtcccaggctggtggaagccgtggttttcggctgcatcccggtgatcattgccgatgacattgtcctgcccttcgcggatgccatcccgtgggaggagatcggtgtgtttgtcgctgaggaggatgtcccaaagctggacagcatcttgacgtcaatcccaacagatgttatactgaggaaacagcgtctcctcgcaaacccatcgatgaagcaggccatgctgttcccccagcctgctcaggcgggtgatgcattccaccagatcctgaatgggctcgcacgcaagctcccgcatggtgacaacgtcttcttgaagcccggggagagggtcctgaactggaccgccgggccgccaggcgacctgaagccttggtag

SEQ ID NO: 2004 - protein, 420 aa, Sorghum bicolor
MRRWVLAIAILSAASAAALFLGAEAQAVQQQGHQTERISGSAGDVLEDNPVGRLKVYVYDLPSKYNKKLLKKDPRCLNHMFAAEIFMHRFLLSSAVRTFNPEEADWFYTPVYTTCDLTPSGLPLPFKSPRMMRSAIELIATNWPYWNRSEGADHFFVTPHDFGACFHYQEEKAIGRGILPLLQRATLVQTFGQKNHVCLKDGSITIPPFAPPQKMQAHLIPADTPRSIFVYFRGLFYDTSNDPEGGYYARGARASVWENFKNNPLFDISTDHPPTYYEDMQRSVFCLCPLGWAPWSPRLVEAVVFGCIPVIIADDIVLPFADAIPWEEIGVFVAEEDVPKLDSILTSIPTDVILRKQRLLANPSMKQAMLFPQPAQAGDAFHQILNGLARKLPHGDNVFLKPGERVLNWTAGPPGDLKPW

SEQ ID NO: 2005 - DNA, 2085 bp, Sorghum bicolor
atggcgaaggtggattcggtggcgccggtgccgagcccgacgttcatggacgccgctcccctgaccttgccgccgccgctggtggtggaggagctcgtgctgcgccgcagtgctcgttgcctcaataggccaacccgtcccagctacgcggaccaggagcctcctaaaaagcccggtggccggggccggggcaagcggaagagggatgaggagaagccggagctggcggcggcgcagcagggtgccaagagcccgggcaggaagtactccaaggtggaggcgggtgagaggaagccgatgcccgtgattgcggcggtgccggtctcttgcgctggcgttgctacggaagacgatgcgatgggaaccgggaagagcgccaagctgagggtgaaagagacattgagggcgttcaacagccactacctccactttgtgcaggaggagcagaagagagcacaggctgcgctacaagagattgaggctaagactaagagtggcctcaaacgtcagaccaaagggggtaaaaagaagagcagtaagcaacaagctgaagctgaggagaaagagaaacgcccgtcaaagcggcctgatctgaaggcaatcaccaagatgcaagaaatgaatgccgtgctttatccagagaagaggattgggcatttaccagggattgatgttggtgatcgattttattctcgtgctgaaatggtagtgttgggcatccacagccattggctcaatggaattgactacatggggatgaaataccaaggaaagaaggagtatgagaagttaacttttccactagccacctgtattgtaatgtcggggatatatgaagatgatctagacaaggccgatgaaattatttatacgggtcaaggaggaaacgatttacttggtaaccatcgccaaattggctctcagcaattgacacgtggcaatttagcattgaagaatagcaggtacaatggtaatcctgtccgagttattcgaggccatttatcaaagaatagctatacaggaaagatctacacctacgatggactttacaaggttgtacatgactgggtgcagactggagtgcaaggccatgttgttttcaaatataaattgaagcggcttgagggtcagccatcattgactacttctgaggtgcgatttactcgtgcagaagctcccacaactatttctgaattacctggactggtttgtgacgacatctctggagggcaagaaaatattccaattcctgctactaacttggttgatgatccgcctgttcctccatctggtttcacatacttgaagtctctaaaaattccaaaggacatcaagattccatctagtattattggctgtgattgtgaaggagattgtgctaccaacaaaaattgttcatgtgctcagcgcaatggttctgatctgccttatgtatcacataagaacattggcaggttggtggagcccaaagcagttgtatttgaatgtggggctaactgcagttgcaaccatgattgtgtaaacagaacatctcaacagggtttgcagtatcggttagaggtatttaagacagcttcaaaaggttggggagttaggacttgggacactatcctccctggggctcccatctgcgagtacacaggggtgttgaggaggactgaagatttggatggttcgcaaaacaactattgttttgacatcgactgtcttcaaaccatgaagggtttggatggaagggagaaaagagctggatctgaaatgcacctgcctaatcttcatcctgaggatgattcagatgcaccacctgcacctgagtactgcatagacgctagttctattggcaattttgccagatttataaatcacagctgccaacctaaccttttcgtccagtgcgtcttgagctcacacaatgatgttaaactggcaaaagtgacgctttttgctgctgacactatacttcctcttcaggagctatcctatgactatggttatcgcttggacagtgttgttgggcctgatggaaaaattgtgaagctgccttgccactgtggtgctcctgattgccggaagcgcctctactag

SEQ ID NO: 2006 - protein, 694 aa, Sorghum bicolor
MAKVDSVAPVPSPTFMDAAPLTLPPPLVVEELVLRRSARCLNRPTRPSYADQEPPKKPGGRGRGKRKRDEEKPELAAAQQGAKSPGRKYSKVEAGERKPMPVIAAVPVSCAGVATEDDAMGTGKSAKLRVKETLRAFNSHYLHFVQEEQKRAQAALQEIEAKTKSGLKRQTKGGKKKSSKQQAEAEEKEKRPSKRPDLKAITKMQEMNAVLYPEKRIGHLPGIDVGDRFYSRAEMVVLGIHSHWLNGIDYMGMKYQGKKEYEKLTFPLATCIVMSGIYEDDLDKADEIIYTGQGGNDLLGNHRQIGSQQLTRGNLALKNSRYNGNPVRVIRGHLSKNSYTGKIYTYDGLYKVVHDWVQTGVQGHVVFKYKLKRLEGQPSLTTSEVRFTRAEAPTTISELPGLVCDDISGGQENIPIPATNLVDDPPVPPSGFTYLKSLKIPKDIKIPSSIIGCDCEGDCATNKNCSCAQRNGSDLPYVSHKNIGRLVEPKAVVFECGANCSCNHDCVNRTSQQGLQYRLEVFKTASKGWGVRTWDTILPGAPICEYTGVLRRTEDLDGSQNNYCFDIDCLQTMKGLDGREKRAGSEMHLPNLHPEDDSDAPPAPEYCIDASSIGNFARFINHSCQPNLFVQCVLSSHNDVKLAKVTLFAADTILPLQELSYDYGYRLDSVVGPDGKIVKLPCHCGAPDCRKRLY

SEQ ID NO: 2007 - DNA, 2115 bp, Sorghum bicolor
atgccgcccgcagcagccatggcgctgccgtcccaggccccgtctaactcaggggatccgctgtacccggagctctggcgcgcctgcgccggcccgctcgtcaccgtccctcgcgtcggcgacctcgtcttctactttccccagggacacatcgagcaggtggaggcgtccatgaaccaggtcgccgggaaccagatgcgcctctacgatctgccctccaagctgctctgccgcgtgctcaacgtcgagcttaaggcggagacggacaccgacgaggtctacgcgcagatcatgctcatgccagagcccgagcaaaccgatgtggcggctgagaaggcgagttctgcgtccgctgcgtcgccgaggccagcagtgaggtccttctgcaagacgctcaccgcctccgacaccagcacacacggaggcttctctgtgctgcgccgccacgcagacgagtgcctcccaccactggatatgacgcagtcgcctcccacacaggagctggtggcgaaggatctgcatggcatggagtggcgcttccgccacatctttcgcgggcaacccaggaggcatctccttcagagtggttggagtgtttttgttagttccaaaaggcttgttgctggagacgccttcattttcctcagaggagaaaatggtgaacttcgggttggtgttaggcgggctatgaggcagttgtctaatgtaccttcttcagtcatatctagccaaagcatgcacctcggagtccttgcgactgcatggcacgccatcaacaccaaatccatgttcactgtctactacaagcctaggacgagcccttcagagttcatcataccatatgatcaatatatggagtcagtgaaaaataactattcaattgggatgagattcagaatgaggtttgaaggggaagaggcaccagagcagaggtttactggtacaatcgttggctgtgaaaatcttgacccactatggcctgattccagttggagatacttgaaggtgcgctgggatgagccttctactatcccacgaccagatagggtctctccttggaagatagagcctgcttcatcacctccagttaatccactcccgctttcttctagagtaaaaagacctagacaaaatgctcctccaccttcacctgaagcatctgttctcacaaaagaaagtgcagccaagatcgatattgactctgctcaaacacaacatcaaaattcggtcttgcaaggtcaagagcaaatgaccttgaggaacaacctgactgaaagcaacgactctgattccactgttcaaaagccgatgatgtggtccccatcacccaatgggaaagcccacactaactttcagcagagacctgctatggatagttggatgccaatgggaaggcgtgaaacggacttcaaggactcacgttccgccttcaaggatgcccgcactgcctctcaatcatttagagatacacaggggttcttcatgcaagcttatgatgacaatcatcaccgtctttctttcaacaaccagtttcaggatcagggttcagctcatcgctttgcggatccatacttctatatggcccaacaaccttctctgactgttgaatcaagcacaaggacacaaacagcaaacaacgacttgcgtttctggggcgaccagaattcgatctatggtaatccaggtgatcaacagcagcagggtttcagctttggacaaaacccatcaagttggttgaaccagccatttccccaggttgaacagccacgagtggttaggcctcatgcaacagttgctccatttgatttggaaaagaccagagaaggcagcgggttcaagatctttgggttccaagttgatacaaccagtccatctcctgcccagttgagctctccattatgtgctatccgggagcatgtggtacaaacccgaccatcggcaccagtgaatgaattgcaacctgtgcaaaatgagtgcttgcctgagggatctgtaagcactgctggaactgcaactgagaacgagaaaaacattcagcaagcccagccaagttcaaaagatattcaaagcaagtcccagggtgcttcgacaaggagctgcacaaaggttgtgtga

SEQ ID NO: 2008 - protein, 704 aa, Sorghum bicolor
MPPAAAMALPSQAPSNSGDPLYPELWRACAGPLVTVPRVGDLVFYFPQGHIEQVEASMNQVAGNQMRLYDLPSKLLCRVLNVELKAETDTDEVYAQIMLMPEPEQTDVAAEKASSASAASPRPAVRSFCKTLTASDTSTHGGFSVLRRHADECLPPLDMTQSPPTQELVAKDLHGMEWRFRHIFRGQPRRHLLQSGWSVFVSSKRLVAGDAFIFLRGENGELRVGVRRAMRQLSNVPSSVISSQSMHLGVLATAWHAINTKSMFTVYYKPRTSPSEFIIPYDQYMESVKNNYSIGMRFRMRFEGEEAPEQRFTGTIVGCENLDPLWPDSSWRYLKVRWDEPSTIPRPDRVSPWKIEPASSPPVNPLPLSSRVKRPRQNAPPPSPEASVLTKESAAKIDIDSAQTQHQNSVLQGQEQMTLRNNLTESNDSDSTVQKPMMWSPSPNGKAHTNFQQRPAMDSWMPMGRRETDFKDSRSAFKDARTASQSFRDTQGFFMQAYDDNHHRLSFNNQFQDQGSAHRFADPYFYMAQQPSLTVESSTRTQTANNDLRFWGDQNSIYGNPGDQQQQGFSFGQNPSSWLNQPFPQVEQPRVVRPHATVAPFDLEKTREGSGFKIFGFQVDTTSPSPAQLSSPLCAIREHVVQTRPSAPVNELQPVQNECLPEGSVSTAGTATENEKNIQQAQPSSKDIQSKSQGASTRSCTKVV

SEQ ID NO: 2009 - DNA, 1182 bp, Sorghum bicolor
atgagaaaagtcaaggaagggctagataaagtagtagaggaacaaaaaaattttaattttctgcacctcatagacacaaggcagtctgtgaacataaaaaaccaagaaacatctgtggtttcgagtgataaagttgatatggtaggaagagaaagtgaacaaagaagggtactaaatttggtattgcagaaagacagtcaaacaaaaatatccattattcccattgttggacttggtggtatgggtaagactacacttgcaaaatctgttttcaatgctaaagagacaaatatgtttgatgtgaaagcatgggtccatgtatcaatggagtttgatgtgaagaagattgtagcttctattatctctcatattgaggttaccttccaagcaaatgatgctacactacagaatctgaattctcgcattgagcgcatactctcagggaagatttattttattgttttggatgatatgtgggagacaaggggagattcattggataatttgatgaaaatgttacaatatggtaatgaaggcagcaagataatagtaacgacacgaagtgatcaagttcctacagcattgtctatcatcaggacttcagaatatcatattgtttcaccaactaaattgaaggccttatcaagtgatgattgcttttctattattaatccttcaatgcaaggaagaaataggctggatgttgaccttataaaaattggagaagaaattgctaagaaatgtggtggagtaccgatagttgctaaagctcttggttatgtgatgaataagcattgcacaaaagaatcatggaaagcacttaaagacagcaatattcttgagataaaagatgatgactataggattatgaggcgcttgatgctaagttattaccccatgccctcacttcagaaactatgtttcatgtattgctctatctttcctaagggccataacatagatcatgatagcttgattcatcaatgggttgctttgggattcattcaagatgctcatgaggccccacttcacctaattggtcaggaatatattaatgatttcttagggatgtctttccttagtctttcaactacccctgaggtgagctgcattcgtcatataattgtattactgtatatactattttctgattttgcttttacagatattccccaaagctag

SEQ ID NO: 2010 - protein, 393 aa, Sorghum bicolor
MRKVKEGLDKVVEEQKNFNFLHLIDTRQSVNIKNQETSVVSSDKVDMVGRESEQRRVLNLVLQKDSQTKISIIPIVGLGGMGKTTLAKSVFNAKETNMFDVKAWVHVSMEFDVKKIVASIISHIEVTFQANDATLQNLNSRIERILSGKIYFIVLDDMWETRGDSLDNLMKMLQYGNEGSKIIVTTRSDQVPTALSIIRTSEYHIVSPTKLKALSSDDCFSIINPSMQGRNRLDVDLIKIGEEIAKKCGGVPIVAKALGYVMNKHCTKESWKALKDSNILEIKDDDYRIMRRLMLSYYPMPSLQKLCFMYCSIFPKGHNIDHDSLIHQWVALGFIQDAHEAPLHLIGQEYINDFLGMSFLSLSTTPEVSCIRHIIVLLYILFSDFAFTDIPQS

SEQ ID NO: 2011 - DNA, 1365 bp, Sorghum bicolor
atggcggaggacggggacaaggccgcggcgtctgcgggggaggcaggaggaggcggaggaggagggaacgagggcggcgaggaggagaagagcgtcaagctcttcgtgggccaggtgcctaagcacatgaccgaggccgacctgctcgccatgttccgcgaggtcgccgccgtcgacgaggtcaccgtcatcaaggacaaggtcaccaaggtctcccgagggtgctgcttcgtcatatgcccgtcaagggaggaagctgacaaggcggtgaatgcctaccacaacaagcgcacactctctggggcatcaagtcctttgcaagtaaaatatgctgatggagagttggagaggctggaacataagcttttcattggaatgcttccgaaaaatgttacagacactgagttgactgatttgttttccaaatatgggaatgtcaaggatttgcaaattttgagaggttcacaacaaacaagcaaagctggctgtgccttcattaaatatcaaacaaaagatcaagcattggcagctattgaagctctaaacgggaagcacaaaatagagggttctagtgtgccgttggttgtcaaatgggccgatacagaaaaggaaaggcaggctcggaaagcacaaaaggctcagttacagctatctaatatgcccagtgcaagtccaatgcagcagtcttcagtatttggagctttacagatgggatatatgcctcaatacaatggatttggctatcagccaccagggacatatggacttatgcagtaccctttatctcctatgcaaaatcaaggccccttccagaatatggttcaacctcttaatcaagggaactcgataagaggagtcaatcctgaactgtctcccagttcagttcaaaggtcctttgcaatgcagttagggagcccttatcctgctatccctggtatgcagtatcctgggtcatatcctggtggtcccatgaacaatcgtccttttggaaattctcacaattcaatttcaattaaagttccaaattcgaatgccaattccgccatttcttctagtcccagcagcaatgccggtggacaggttgaaggtcctcctggagccaatctatttatttaccatatcccacaagactatggtgaccaagagctttccagtgcctttcagagttttggtagagtactaagtgctaaggtgtttgtagacaaagcaacgggtgtcagcaaatgcttcggttttgtgagctacgattctcctacctctgcacaggcagccatcaataggatgaatgggtaccaattaggcggtaaaaaactcaaagtacaactcaagagagaaaacaacaacaagcacagtaaaccttattga

SEQ ID NO: 2012 - protein, 454 aa, Sorghum bicolor
MAEDGDKAAASAGEAGGGGGGGNEGGEEEKSVKLFVGQVPKHMTEADLLAMFREVAAVDEVTVIKDKVTKVSRGCCFVICPSREEADKAVNAYHNKRTLSGASSPLQVKYADGELERLEHKLFIGMLPKNVTDTELTDLFSKYGNVKDLQILRGSQQTSKAGCAFIKYQTKDQALAAIEALNGKHKIEGSSVPLVVKWADTEKERQARKAQKAQLQLSNMPSASPMQQSSVFGALQMGYMPQYNGFGYQPPGTYGLMQYPLSPMQNQGPFQNMVQPLNQGNSIRGVNPELSPSSVQRSFAMQLGSPYPAIPGMQYPGSYPGGPMNNRPFGNSHNSISIKVPNSNANSAISSSPSSNAGGQVEGPPGANLFIYHIPQDYGDQELSSAFQSFGRVLSAKVFVDKATGVSKCFGFVSYDSPTSAQAAINRMNGYQLGGKKLKVQLKRENNNKHSKPY

SEQ ID NO: 2013 - DNA, 1377 bp, Sorghum bicolor
atggttgggagcgtgcacgtcaatggatcggtccacggtggcaatggcacggccacggaggagcggctggacgagctgcgccggctgctcggcaagtcggagggcgacttgctgaagatcgtcagcgtcggcgccggtgcgtggggcagtgtcttcgcggctctcctgcaggatgcctacggccatttccgggacaaggtgcagataaggatctggcgccgcccggggcggacggtggaccgctccaccgcggagcacctgttcgaggtgatcaactccagggaggacgtgctcaggcgcctcatccgccgctgcgcctacctcaagtacgtcgaggcgcggctcggagaccgcacgctgtatgctgacgagatactcaaggatggcttctgtctgaacatgatcgagacgccgctctgccctctcaaggtcgtcaccaacctgcaggaggccgtctgggatgccgacatcgtcgtgaatggggtgccgtcaaccgagacgagggaggtgtttgatgagatcagcaagtattggaaggagaggatcagtgttccagtgataatttcccttgccaagggaatagaagcctcgttggatccaatacctcgtatcattacacctactcaaatgattagctctgcaactggagttccaactgagaatatactgtatctaggaggaccaaacatcgcctcagaaatttataacaaagaatatgcaaacgctcgaatctgtggatccaacaagtggaggaagcctcttgctaagtttttgaggcagccacatttcattgtctgggacaacagtgatcttgtcactcatgaggtgatgggtggcctgaagaatgtctatgcaattggcgctggaatggtggctgctttaacgaatgagagtgcaacaagcaaatctgtatatttttctcattgcacatcagaaatgatcttcatcactcatttgctgacagaacaacctgagaaactcgctggtcctctgctggctgacacttatgtaactctcctaaaaggtcgcaatgcatggtatgggcaaatgcttgccaagggagagttgagtcctgacatgggcgatagtatcaagggaaagggaatgattcagggtgtctctgccgttggtgcattttttgagctgcttagtcaacccagcttaagtgtgcagcacccggaagaaaacaagctggtcgctccagctgagctatgcccaattctgaagaggctttatagaatactgataaaaagggagctcccagcaagggacatcctccaagcactgagggatgaaacgatgaatgatcctcgggaaaggattgagatggcacaaagccatgcattctaccgcccgtctctccttggaaaaccatga

SEQ ID NO: 2014 - protein, 458 aa, Sorghum bicolor
MVGSVHVNGSVHGGNGTATEERLDELRRLLGKSEGDLLKIVSVGAGAWGSVFAALLQDAYGHFRDKVQIRIWRRPGRTVDRSTAEHLFEVINSREDVLRRLIRRCAYLKYVEARLGDRTLYADEILKDGFCLNMIETPLCPLKVVTNLQEAVWDADIVVNGVPSTETREVFDEISKYWKERISVPVIISLAKGIEASLDPIPRIITPTQMISSATGVPTENILYLGGPNIASEIYNKEYANARICGSNKWRKPLAKFLRQPHFIVWDNSDLVTHEVMGGLKNVYAIGAGMVAALTNESATSKSVYFSHCTSEMIFITHLLTEQPEKLAGPLLADTYVTLLKGRNAWYGQMLAKGELSPDMGDSIKGKGMIQGVSAVGAFFELLSQPSLSVQHPEENKLVAPAELCPILKRLYRILIKRELPARDILQALRDETMNDPRERIEMAQSHAFYRPSLLGKP

SEQ ID NO: 2015 - DNA, 462 bp, Sorghum bicolor
atggcagcgccggcggcgatgcaggtcaaggtgcgtgttccagagaacgaggaggtcgctcgctgccttcacgagaagcggctgtcgatgagggagcagccggccggtttcaaggagcacctggaccgcacgtttgccaaagcctaccgcaatgtctgcgccgccaatgagcccatccggactctcaaggagttctctaagatcaatggtgtggggccatggctaatacgttgtatgaaaggcttctttccagagtccaaacaggattctccaacgaaaggaacattggagctgcaatcgtgtggtaaaacgggttcttctgacttcagtatggacaaggatgttgtatcaatggacaattgtatactggctatgccaccttgtcaatcaagtgaagagtttcttgaagcttacgaggttgttctgatattggatgatcgtgagaattttgggtttgtatga

SEQ ID NO: 2016 - protein, 153 aa, Sorghum bicolor
MAAPAAMQVKVRVPENEEVARCLHEKRLSMREQPAGFKEHLDRTFAKAYRNVCAANEPIRTLKEFSKINGVGPWLIRCMKGFFPESKQDSPTKGTLELQSCGKTGSSDFSMDKDVVSMDNCILAMPPCQSSEEFLEAYEVVLILDDRENFGFV

SEQ ID NO: 2017 - DNA, 678 bp, Sorghum bicolor
atggccaacatgctcgctacttccctcctcgccgccgccgtcctcctggcgctcgccgcccctgctgcagtgctcgccggcgaccccgacatgctccaggacatctgcgtcgccgactacaaatccctcaagggcccactgcggctgaacggattcccgtgcaagaggccggagaacgtgacggcgaaggacttcttctccaacgcggtggcgatcgccggcaacacgagcaacgcgttgggttccgcggtgacgtcggcgaacgtgcagacgctgccggggctgaacacgctgggcgtgtcggtgtcgcgcatcgacttcgcggcgtggggcgtgaaccccccgcacgtccacccgcgcgccaccgaggtcatcttcgtcctcgagggattcctcgacgtcggcttcgtcaccaccggcaaccgcctgtacgcgcgcaccgtcagcgccggcgaggtcttcgtcttcccccgggggctcgtccactaccagaggaacaacggccgcggcgccgccgcggtgctctccgccttcgatagccagctgcctggcacgcagtccgtcgccgaggccctctttggcgcctcgccgccggtgcccaccgacgtgctcgctaggagtttccaggtcgacgcaggactcgtggaggacatcaaatccaagtttccttccaagtag

SEQ ID NO: 2018 - protein, 225 aa, Sorghum bicolor
MANMLATSLLAAAVLLALAAPAAVLAGDPDMLQDICVADYKSLKGPLRLNGFPCKRPENVTAKDFFSNAVAIAGNTSNALGSAVTSANVQTLPGLNTLGVSVSRIDFAAWGVNPPHVHPRATEVIFVLEGFLDVGFVTTGNRLYARTVSAGEVFVFPRGLVHYQRNNGRGAAAVLSAFDSQLPGTQSVAEALFGASPPVPTDVLARSFQVDAGLVEDIKSKFPSK

SEQ ID NO: 2019 - DNA, 711 bp, Sorghum bicolor
atggggaacggactctccttctccccgtcgtgcctgcacctgccggcggcggcggcgcccacggcggtgcggctggtgtactggggcggtctgtcgaggcagctggtgatcacgggcggcggcggcggcgacgtcacggccggggacgtcgcggcggagctcccggcgccgaccgcgggctacgccgtgtgccccgccgacgccttcttcgtcggcctcccgatcccggccatgtctccgggcgaggagctccttcccggcaggacctacttcgtgctccccgccgcgcgcctcccctgcctcaaggcgctcacgcccgctacgctcgccgcgctgtcgtacggcgacggcggcagcaatggcaatggcaatggcaatggcaagaggaagcagcccttgtttgcggtggcgggcccgtgcccgttcgagcacgtcaagggcgccgacggcgccgcgcccctcatcagggtcctcccggagttcatcgagaagctcatcacctgcgacgcagcaggtggccgcggcgccaactcaaaagccaaggacaaggacgcggagctgtgcagcacgcccgagctgaagcggcattacgcgcagctcgtcgggaccggcaggagccgcccctggtcgcccaggctggagaccatctccgagcgcaataggagccgctggatgacggcggcggcgaggaccatgctgtcctcgcgctag

SEQ ID NO: 2020 - protein, 236 aa, Sorghum bicolor
MGNGLSFSPSCLHLPAAAAPTAVRLVYWGGLSRQLVITGGGGGDVTAGDVAAELPAPTAGYAVCPADAFFVGLPIPAMSPGEELLPGRTYFVLPAARLPCLKALTPATLAALSYGDGGSNGNGNGNGKRKQPLFAVAGPCPFEHVKGADGAAPLIRVLPEFIEKLITCDAAGGRGANSKAKDKDAELCSTPELKRHYAQLVGTGRSRPWSPRLETISERNRSRWMTAAARTMLSSR

SEQ ID NO: 2021 - DNA, 1629 bp, Sorghum bicolor
atgaacacggtgtcttcgctgtctttggtgccgcacctgctcattaagccctccatcgcctgcttctccagaaagggcgttggccgctatggcggaatcaaggtgtacgccgtgctcagggaagacggagctgagttcgccaagaacaacaacctggaggccctgttccatgtggatgaccccgggccgaggtgccccatcaagaagggcaagttcctggatgtgaacgaggcactcgaggtggtccgattcgacatccagtactgcgactggagggcgcgccaggatctcctcaccatcatgcttctccacaacaaggtggtggaggttctcaatcccttagcgagggagttcaagtcgatcggaaccttgaggaaagagcttgccgagctgcagcaggagctggaaaaagctcacaatcaggtccatctatctgaagctagagtttcatctgcactcgacaagctagcgcatatggagaccctggtgaacgacaggctattgccaccagatggagcctccggtacttccacagccgagtccacttccctggttccaagcacatcgtccaccgcccatgtccgagccaagaaacagccacgtcggagtcttaacgtgtccggcccagtgaagccgtacaatcccagcctgaagaacttctggtacccagttgccttctccagtgatctgaaggatgacaccatggtgccgatagattgtttcgaggagcagtgggtgatattccgaggaaaagatggaaggcctgggtgtgttcagaacacatgtgctcacagagcttgcccactgcatcttggttcagtgaacgagggtagaatccagtgcccttaccatggttgggagtattcaactgatgggaaatgtgaaaaaatgccatcaacaaagatgctcaacgtgcgcatccagtcattgccatgctttgagcaggaaggaatggtttggatttggcctggggatgatccaccaaaggctacaatcccttctttgctgcctccttcaggatttacgattcacgcagagatagtgatggaactaccagttgaacatggactcctcctggataatctcttggaccttgctcatgctccttttacacacacatccacctttgccaagggctggagtgttccaagcttggtgaagttcttaacacctgcgtcggggctccaagggtactgggatccttacccgatcgacatggaattccgaccaccgtgtatggtcttgtcgaccatcgggatctcaaagcctggaaagctagaagggaagagcacccagcaatgttctacacatctccaccaactccatgtctgcttgccctcctctaggaataaaactaggctgctgtaccggatgtcactagactttgctccatggctcaagcacgtaccgctcatgcacctgctgtggtcacatttcgcagagaaggtgttgaacgaggacctacggcttgttcttggtcagcaagagcgaatgatcaatggcgccaacatctggaactggccggtatcatatgacaagctcgggatccggtatcgattgtggagggacgccgttgagcggggctctgaccggttgccattcagtaaccaagccgagagtggatcatag

SEQ ID NO: 2022 - protein, 542 aa, Sorghum bicolor
MNTVSSLSLVPHLLIKPSIACFSRKGVGRYGGIKVYAVLREDGAEFAKNNNLEALFHVDDPGPRCPIKKGKFLDVNEALEVVRFDIQYCDWRARQDLLTIMLLHNKVVEVLNPLAREFKSIGTLRKELAELQQELEKAHNQVHLSEARVSSALDKLAHMETLVNDRLLPPDGASGTSTAESTSLVPSTSSTAHVRAKKQPRRSLNVSGPVKPYNPSLKNFWYPVAFSSDLKDDTMVPIDCFEEQWVIFRGKDGRPGCVQNTCAHRACPLHLGSVNEGRIQCPYHGWEYSTDGKCEKMPSTKMLNVRIQSLPCFEQEGMVWIWPGDDPPKATIPSLLPPSGFTIHAEIVMELPVEHGLLLDNLLDLAHAPFTHTSTFAKGWSVPSLVKFLTPASGLQGYWDPYPIDMEFRPPCMVLSTIGISKPGKLEGKSTQQCSTHLHQLHVCLPSSRNKTRLLYRMSLDFAPWLKHVPLMHLLWSHFAEKVLNEDLRLVLGQQERMINGANIWNWPVSYDKLGIRYRLWRDAVERGSDRLPFSNQAESGS

SEQ ID NO: 2023 - DNA, 330 bp, Sorghum bicolor
atggccaccttcgagctgtaccggaggtccaccattggcacctgcctcaccgagacgctggacgagctcgtctccagcggagccgtcagcccagagctcgctatccaggtccttgtgcagtttgacaagtccatgactgaggcgctggagatgcaggtcaagagcaaggttaacgtcaagggtcatctgcacacctacaggttctgcgacaatgtctggaccttcattctaacagatgcaaccttcaagagcgaggagattcaagaaacactgggcaaggtgaagatcgtggcctgcgattccaagttgctgcagcctcaacaaccataa

SEQ ID NO: 2024 - protein, 109 aa, Sorghum bicolor
MATFELYRRSTIGTCLTETLDELVSSGAVSPELAIQVLVQFDKSMTEALEMQVKSKVNVKGHLHTYRFCDNVWTFILTDATFKSEEIQETLGKVKIVACDSKLLQPQQP

SEQ ID NO: 2025 - DNA, 2061 bp, Sorghum bicolor
atggatctctacatgaaacttctcctggcctccctcagctgtattctcctgatgcaagcagcatcatgtgatggcaccacaggcgaaactgaaacggcaaactggacatgtgtatgcgcagctcatccactagatgaaccaaactctaacagcagcctgttgtccaattgctcttcatcctgccattgccaacaagatgataatggtggcacagggtcatggaactgcacatgtgccgctgataagggccttcagaaagaagaacatgctgtgctacgtgccaggagttgcttcacttcctgtaactgcacatctggtattggaagttcagaggaagggaaaaggcatgtctccagcaaaacagtcataattacgctcctagtttgtgtgattctcaccactactgctttccttgtcaccaccgtatactacttccgccgcaaggatgctctctctccacgatcgcagatatactccttcgataaatacactagctggagcagcagatcgaaccttgtcagcaatcgatcgtctccacttccccaattgaaatcaaaaccaaggcttggtgttttaaaagagtttctgtgtagctgcaacctcatctgcgggggcgaaagcggcacgttccctggtgtcattatccggttttcatacgcggagttggagcaagcaaccgggaaattctcagacgagcatcttatcggagttggtgggtcgagcaaggtgtaccgaggccagctcggcgatggcaaagttgttgccgtgaagaagcttaggcccctaggaggtgcagatgaagacttcgaattcctatcagagatcgagctgctgtcgaggctgaaccactgccacgtagtgccattgctggggtactgctcggagagccagggccggcagctggagaggctgctggtgttcgagtgcatgtccaacggcaacctgagggactgcctggacctgaagcaagggaggaggcccatggactggcagacccgggtgagcatcgctctcggcgccgctaggggggtggagtacctccatgaggcagccgccccgcgtatcctccaccgtgacatcaagtccaccaacatcctgctggatgacaagttcagagccaagatcactgaccttggcatggccaagtgcctgatgaacgacggcgtgacgagctgctcgagctccccggcgcggatgctgggcacgttcgggtacttcgcgccggagtacgccatcgtgggcaaggcgtcgctcaagtcggacgtgttcagcttcggcgtcgtcgtgctggagctcatcaccgggcggccgcccatccacaagtcgtcgtcgacgagggccgacgagagcctcgtcatctgggcgacgtcgcggctgcgggacagcaggctggtggtgacggagctgccggacccgacgctgcagggcaagttcccggcggaggagatgcagatcatggcgcacctggcgcgggagtgcctgcaatgggaccccgaggcgaggcccaccatgacggaggtcgtccagatcctcgccaccatcgcgccactccagcagggcgccaagcgccggaacctccccatcgccgccgccttcaacctcacgctccttctcctctcggccatgtacacgcacgccgcaggcggtctgtgctctgacatcgcacgcaccgtgcacgtacgctcaacgactctgcaggcgtcgccgcacgttgggaggtgcgacccggagcctaaggacgacgacgacgacatcgagaggcaacagctgcagcagcaggagtgctcgccgacgacgcccgtccagtggaaacagcaagcgcggcgcgcgccgtcgccgccaccgggccgcgcgtcgtggcccggcgacagggggaacgttgtgagcagaggcgcggtggtgtcgggcgagctggtgaacgggacgctgctgatgagcccccacgggcggggaagctggcggcggccgccaccgccgcctggcgacgacgaggaggcggtggacgtggacctgacggagcctcggatggaggcgttcacgcagccggcggcattcagatga

SEQ ID NO: 2026 - protein, 686 aa, Sorghum bicolor
MDLYMKLLLASLSCILLMQAASCDGTTGETETANWTCVCAAHPLDEPNSNSSLLSNCSSSCHCQQDDNGGTGSWNCTCAADKGLQKEEHAVLRARSCFTSCNCTSGIGSSEEGKRHVSSKTVIITLLVCVILTTTAFLVTTVYYFRRKDALSPRSQIYSFDKYTSWSSRSNLVSNRSSPLPQLKSKPRLGVLKEFLCSCNLICGGESGTFPGVIIRFSYAELEQATGKFSDEHLIGVGGSSKVYRGQLGDGKVVAVKKLRPLGGADEDFEFLSEIELLSRLNHCHVVPLLGYCSESQGRQLERLLVFECMSNGNLRDCLDLKQGRRPMDWQTRVSIALGAARGVEYLHEAAAPRILHRDIKSTNILLDDKFRAKITDLGMAKCLMNDGVTSCSSSPARMLGTFGYFAPEYAIVGKASLKSDVFSFGVVVLELITGRPPIHKSSSTRADESLVIWATSRLRDSRLVVTELPDPTLQGKFPAEEMQIMAHLARECLQWDPEARPTMTEVVQILATIAPLQQGAKRRNLPIAAAFNLTLLLLSAMYTHAAGGLCSDIARTVHVRSTTLQASPHVGRCDPEPKDDDDDIERQQLQQQECSPTTPVQWKQQARRAPSPPPGRASWPGDRGNVVSRGAVVSGELVNGTLLMSPHGRGSWRRPPPPPGDDEEAVDVDLTEPRMEAFTQPAAFR

SEQ ID NO: 2027 - DNA, 1041 bp, Sorghum bicolor
atggccgtcgtgggggagttcctcttccagcgcatcgccgccagccacctcgccaacccgctcgagctgcccccgctcgacggcgtctccatcgtcgtcaccggcgccaccagcggcatcgggctccagatcgcaaggcaactcgctcttgctggggcacatgttgtgatggctgttaggagacccaaggtggcacaagacttgattcagaagtggcagaatgaaaattcagaaacaggaagaccattaaatgccgaggtgatggaacttgacctgctctccctcgactcagtcgtaaagtttgctgatgcttggaatgctcgtatggcacccctacacgtgttgatcaacaatgctggcatcttcgctataggagaaccccagcgtttttcaaaggatggacatgaagaacacatgcaagtgaaccacctagcacccgcgttactggcgatgctgcttataccttcccttctccgaggttctcccagcagaattgttaacgttaattcaattatgcacactataggttttgttgatgctgaagatatgaacttgagaaaacataaatatagaagttggttgggatattcaaatagcaagttggcacaggtaaaattcagtagcatgcttcataagaaaattcctgcagaagctgggatcaatgtagtttgtgcttctcctggaattgtcgacacgaatgttgcaagagaccttcctaagattgttgtagctgcatatcatttgattccctacttcatatttgatgctcaagaaggttgtaggagtgcattattcgcagcatctgatccccaagttccagaatactgcgagatgctgaagtcggaagactggccagtctgtgcttgcattaactatgactgtaatccgatgaatgcatctgaagaagcgcacaatcttgaaacctcacagctggtctgggagaagacgctcgagatgattggccttccgccagatgccctggagaagctcatcgccggagaaacagttcagtgccgttatggacaacaggaggcagaatag

SEQ ID NO: 2028 - protein, 346 aa, Sorghum bicolor
MAVVGEFLFQRIAASHLANPLELPPLDGVSIVVTGATSGIGLQIARQLALAGAHVVMAVRRPKVAQDLIQKWQNENSETGRPLNAEVMELDLLSLDSVVKFADAWNARMAPLHVLINNAGIFAIGEPQRFSKDGHEEHMQVNHLAPALLAMLLIPSLLRGSPSRIVNVNSIMHTIGFVDAEDMNLRKHKYRSWLGYSNSKLAQVKFSSMLHKKIPAEAGINVVCASPGIVDTNVARDLPKIVVAAYHLIPYFIFDAQEGCRSALFAASDPQVPEYCEMLKSEDWPVCACINYDCNPMNASEEAHNLETSQLVWEKTLEMIGLPPDALEKLIAGETVQCRYGQQEAE

SEQ ID NO: 2029 - DNA, 1158 bp, Sorghum bicolor
atggccatggccgccccgccgccgcccacggctgtctgcgctcgccacttccggctccacctcccctgctcctcccgcctgcccatggccgccgcctctgcctcctcctcttcaccgctccggcgccgccgccggctcgccgtctccccgcgcgccgaagctggtacagggactgggacggggaccgggaccggggacgtggaggcgctcagggccggggtgtccgtgtacaagccgcgctcctacgacgtgctcgtcactgacgccgcgcgctccctcgcctgcgccatcgacgacggcaagacccggctcgagatcgagttcccgcctctgccaagcagcatatcttcttacaagggctcctcagatgagttcatcgatgcgaacatccagcttgctcttgttgttgctaggaagctcaaagagctcaaggggactaagtcctgtatagtgtttcctgatcaacctgaaaagcgcagggcgtcacagttgttcaggacagctatagatacgattgagggtgtaactgtcagttccctggatgatgtacccaccgaccctgtcaacagcttcttcaaatcaataagaaacaccctggattttgacttctcagatgacaatgaagatagatggaaatctgatgaaccaccgtcattatatatcttcattaacagcagcacacgtgaccttgcttctatagagaagtatgtggaaaagtttgccacatctgttccagcccttctattcaatcttgaactagatacattgcgttctgacttggggcttctggggtttcccccaaaagatttgcactatcggttcctttctcagttcaccccagtattttatatcagacaacgtgactattccaagacaatcgcagtcgctccatacatagtgaattacagtggagctgtattccgtcgatatccaggcccctggcaggtcatgctgaagcagctcgatggctcctatgcatgtgttgcagagagtgaagctcggttcactttgggacaggcgaaagaagaactattgagggttattggtttacaagaagaagagggaagctcacttgaatttctcagaagaggatacaagaatgctacttggtgggaagagaacgttgatcaagagacgtcggctgcgtggcgaacttga

SEQ ID NO: 2030 - protein, 385 aa, Sorghum bicolor
MAMAAPPPPTAVCARHFRLHLPCSSRLPMAAASASSSSPLRRRRRLAVSPRAEAGTGTGTGTGTGDVEALRAGVSVYKPRSYDVLVTDAARSLACAIDDGKTRLEIEFPPLPSSISSYKGSSDEFIDANIQLALVVARKLKELKGTKSCIVFPDQPEKRRASQLFRTAIDTIEGVTVSSLDDVPTDPVNSFFKSIRNTLDFDFSDDNEDRWKSDEPPSLYIFINSSTRDLASIEKYVEKFATSVPALLFNLELDTLRSDLGLLGFPPKDLHYRFLSQFTPVFYIRQRDYSKTIAVAPYIVNYSGAVFRRYPGPWQVMLKQLDGSYACVAESEARFTLGQAKEELLRVIGLQEEEGSSLEFLRRGYKNATWWEENVDQETSAAWRT

SEQ ID NO: 2031 - DNA, 1170 bp, Sorghum bicolor
atgggttacattggccaccacggcgtcgccacgctgcggcgctacaagtacagcggcgtcgaccactcgctcgtcgccaagtacatcctccagcccttctggtcccgattcgtcaacatcttcccgctatggttcccaccaaacatgattacactaacaggcttcatgtttctactgacatcagcattccttggctttttatattcaccacatctagatacagcaccccctagatgggttcaccttgctcatggactgcttctcttcctttatcagacttttgatgctgtggatggaaaacaagcaaggcgtaccaactcatcaagtcctctaggcgagctttttgaccacggatgtgatgcgcttgcctgtgcttttgagtccttggcttttggaagcacggcaatgtgtggaaaggctaccttctggttttggttcatttcagctgtcccattttacttcgcaacctgggaacacttttttacaaatacacttattcttcctatagtcaatggaccaactgaaggccttatgctgatctacttgtgccattttttcacctttttcacaggagccaagtggtgggcacaggattttcagaagtcaatgcccctgctgggttgggttccttttatatctgaaatcccggtgtatgacattgtgctatgtcttatgattgcttttgctgtaatcccaacaattgcatctaacattcacaatgtatataaagtcgttgaagcaagaaaaggaagtatggtgctggcactagccatgctctttccttttggtttgctcttggctggagttcttgtctggtcctacttttctccttcagatataatgagaaatcaaccacatttgctaattattggaactggttttgcatttggatttcttgtggggagaatgattctggctcacttatgtgatgaacccaaaggtctcaaaacagggatgtgcatgtcccttgcgtattttccatttgcaattgcaaatgcgctgactgcccggcttgatgatggaaatccccttgttgatgagcagctagttctcctgatgtactgcttatttacagtggctttgtacatgcattttgctacgtctgttattcatgagatcaccaatgcgcttgggattcactgtttcaggatcactacgaaaaaggcatag

SEQ ID NO: 2032 - protein, 389 aa, Sorghum bicolor
MGYIGHHGVATLRRYKYSGVDHSLVAKYILQPFWSRFVNIFPLWFPPNMITLTGFMFLLTSAFLGFLYSPHLDTAPPRWVHLAHGLLLFLYQTFDAVDGKQARRTNSSSPLGELFDHGCDALACAFESLAFGSTAMCGKATFWFWFISAVPFYFATWEHFFTNTLILPIVNGPTEGLMLIYLCHFFTFFTGAKWWAQDFQKSMPLLGWVPFISEIPVYDIVLCLMIAFAVIPTIASNIHNVYKVVEARKGSMVLALAMLFPFGLLLAGVLVWSYFSPSDIMRNQPHLLIIGTGFAFGFLVGRMILAHLCDEPKGLKTGMCMSLAYFPFAIANALTARLDDGNPLVDEQLVLLMYCLFTVALYMHFATSVIHEITNALGIHCFRITTKKA

SEQ ID NO: 2033 - DNA, 663 bp, Sorghum bicolor
atggaaggcggcggcggcggcggtgaccgggccgctgccacgcccacgcgtatgaccaccgtatcgcggcactacttcggaggcagtgcgtccgagcgccaccacgacctccgggtcgacatcatcgagaacatcgaagaggactacggcatgtttgtctggccatgcagtgtcattcttgcagagtatgtctggcagcagagatcacggttctctgcttccagagttgttgagcttggtgcgggaacctcactgccgggattagtagctgcaaaggtactaaacaacatcagaagcatatgtgctctcaataacgccagttgtactgtttcaggacttacatggggagactgggatgaaacggtatttgatttacgtcctgacattattcttggagctgatgtactttatgactcatcaaattttgatgatctgttcgccacggtgacctttcttctcgaaaattcttctggggcggttttcataaccacataccacaaccgcagtggtcatcatctgattgagtttttgatggtcaagtggggcttgaagtgtttgaaactcctggatggtttctccttcctcccaccatgcaaggctgcttcacttcaggggaatattcagcttgttgaaatcacgcttgacaaggaaaaacataaatga

SEQ ID NO: 2034 - protein, 220 aa, Sorghum bicolor
MEGGGGGGDRAAATPTRMTTVSRHYFGGSASERHHDLRVDIIENIEEDYGMFVWPCSVILAEYVWQQRSRFSASRVVELGAGTSLPGLVAAKVLNNIRSICALNNASCTVSGLTWGDWDETVFDLRPDIILGADVLYDSSNFDDLFATVTFLLENSSGAVFITTYHNRSGHHLIEFLMVKWGLKCLKLLDGFSFLPPCKAASLQGNIQLVEITLDKEKHK

SEQ ID NO: 2035 - DNA, 1407 bp, Sorghum bicolor
atgggcggcgggcggaagcggcggcggcgcggcggctcggatgctccgtcgatgcacccgcggaaccgctacgccgccgccgcgccggacttcgccgcgctggcggagctctacccgtccttccgccccttcgtctccgtctccgaccgcggccgcgcgtccgtcgacttcaccgatttctccgccactcgggagctcacgcgtgtactcctcctccatgaccatggcgtcaactggtggattccagatggacagctctgccctactgttccaaacaggtccaactacattcactggatcgaggatcttctctcctcagatctgataccaccaatatccagctcaagtgagagagtgaagggctttgacattggaacaggtgccaattgcatctaccctctccttggagcatctttactgggatggacctttgttggatctgatgtcactaatgttgctcttgaatgggctcagaagaatgtggagagcaatccacgcctagcagaactaattgaaatcagaaatgcaaatgcaccgtcctctgagtctgaatctgttgtcagggaagcagcaagggagaagattttagagcctgcggaggatgtagctatgccaaagccacatatccttgttggtgttgtaaaggagagtgagagctttgacttctgtatgtgcaatcctccattctttgagagcatagaggaagctggtcttaacccaaaaacatcgtgcggtgggacagctgaagagatggtttgccctggtggcgagctggcatttgttacacaaatcattgaagatagtgtttcccttaagaactctttcagatggtttacatcgatgatcggcagaaaggcaaacttaaagttattgatctcaaaggttcgtgaggctggggcctcagtcgtgaaaactactgaatttgtacaagggcagacagctagatggggccttgcttggtcattcattgctccaagaccaagaaaaatggtcctcagctccactgctccagcaaaaaaccaccattcctttatgcttcagggccttcggcgtgaacatggcgcgttccaagttctgaaatcaactgaggctttctttctagcttctaatctatcatgcaaaactgatccgttatcctttgcggttgatgtcacattgtctgatgagcagattgaggctgcaatattgcatggggatgattatgccggttctctagaagacagctctgcaaagttacaaagtgttgtcaaaggaatatcatttcgtattacagtgtttgaacaaattcctgggaccctcctaatcaaaggctcatcattgaataaagcattgtcaggtaccttctcatcattattctctcagttggaggacgcgttaaggatggaatgtctcagtaaggcacgatag

SEQ ID NO: 2036 - protein, 468 aa, Sorghum bicolor
MGGGRKRRRRGGSDAPSMHPRNRYAAAAPDFAALAELYPSFRPFVSVSDRGRASVDFTDFSATRELTRVLLLHDHGVNWWIPDGQLCPTVPNRSNYIHWIEDLLSSDLIPPISSSSERVKGFDIGTGANCIYPLLGASLLGWTFVGSDVTNVALEWAQKNVESNPRLAELIEIRNANAPSSESESVVREAAREKILEPAEDVAMPKPHILVGVVKESESFDFCMCNPPFFESIEEAGLNPKTSCGGTAEEMVCPGGELAFVTQIIEDSVSLKNSFRWFTSMIGRKANLKLLISKVREAGASVVKTTEFVQGQTARWGLAWSFIAPRPRKMVLSSTAPAKNHHSFMLQGLRREHGAFQVLKSTEAFFLASNLSCKTDPLSFAVDVTLSDEQIEAAILHGDDYAGSLEDSSAKLQSVVKGISFRITVFEQIPGTLLIKGSSLNKALSGTFSSLFSQLEDALRMECLSKAR

SEQ ID NO: 2037 - DNA, 1653 bp, Sorghum bicolor
atggttgctgcacctgcgcgcatcatcttctccttctcctctgtggagcctcttctcattgcagcttcgccggcagcagctagaaacagccggcaaggccgccaccgtggccaattcatccgccctttggcggcatccaacactctgctgggcaatgattttgatctccaggagggcctgacggacgtccaaaagattcttcatcaacgtcaaaagagcaaccgggagatgatggtcaccatcgataacctcaagcgcctctgcgtcgaccactacttcgaagaagagatcgagagcgccatgagtgcttgcatgaatctcgtccacagcaatgatctcttcgatgcaacccttgcattcaggctcctgagagaggcaggctatgatgtttcagcaaaagatgatgttttatggaggttcactgacaacagcggcgaattcaagcttcctcttagcaaggacatccgagggctcctaagcctgcatgacatgtctcacatgaacattggaggagaggcattgctcgacaaggcaaaagagttctcaagcaagcaccttgcatctgccattaggtacctggagccaagccttgcagagtatgtgaggcagtccctggaccacccttaccacctgagcgtgatgccgtacaaagctaggcatcacctcacctacctgcagagcctgcccaccagagacacggcggtggagaaactagcaattgcagagtttcagctcaacaaattgctgcatcagaaagaaatgcaagagattaaaagatggtggatggacctaggattggctcaagaaatacctgtggtgcgggaccaggtgctgaaatggtacatgtggtccatgacagccctccaaggatattctttctccagatatcgggttgagatgacaaagataatctcgcttgtctatgttgtggacgacatatttgaccttgttggcacactagaggagctctctctcttcactgaagctgtcaaaatgtggaatactgcggctgctgattcactccctagttacatgagatcatgctacaaggctctttacaccattacaaatgagattgcagatatggctgaaaaggagcatggattgaacccagctaataatcttagaaaagcatggacggtgttgtttgatggatttatggttgaggcaaaatggctagcaaaccatcaggttcctactgcagaggattacctgagaaatggtgttgtcacgtcaggagtgccgcttacatttgtacacatattcattatgctagggtgtgatcaaaatagtgaagcactcattgaccacatgccctctgtcatctcttgcccagccaagattctccgactttgggatgacatgggcagtgcagaggatgaatctcaggaaggattcgatggatcgtataaaaatttctacctcatggagaaccctagatgcagccctactgatgcggaagcacatatgcgtagcttgatcgcaagggagtgggaggagctcaatagggagtgtttatgcacgaggaccttctcctctaacttcacacaggtctgcttgaacatcgcgagaatggtcagtgtcatgtactcgtacaacaaggaacaaaggcttcttgtccttgaggactatgcaagaatgttgatactttga

SEQ ID NO: 2038 - protein, 550 aa, Sorghum bicolor
MVAAPARIIFSFSSVEPLLIAASPAAARNSRQGRHRGQFIRPLAASNTLLGNDFDLQEGLTDVQKILHQRQKSNREMMVTIDNLKRLCVDHYFEEEIESAMSACMNLVHSNDLFDATLAFRLLREAGYDVSAKDDVLWRFTDNSGEFKLPLSKDIRGLLSLHDMSHMNIGGEALLDKAKEFSSKHLASAIRYLEPSLAEYVRQSLDHPYHLSVMPYKARHHLTYLQSLPTRDTAVEKLAIAEFQLNKLLHQKEMQEIKRWWMDLGLAQEIPVVRDQVLKWYMWSMTALQGYSFSRYRVEMTKIISLVYVVDDIFDLVGTLEELSLFTEAVKMWNTAAADSLPSYMRSCYKALYTITNEIADMAEKEHGLNPANNLRKAWTVLFDGFMVEAKWLANHQVPTAEDYLRNGVVTSGVPLTFVHIFIMLGCDQNSEALIDHMPSVISCPAKILRLWDDMGSAEDESQEGFDGSYKNFYLMENPRCSPTDAEAHMRSLIAREWEELNRECLCTRTFSSNFTQVCLNIARMVSVMYSYNKEQRLLVLEDYARMLIL

SEQ ID NO: 2039 - DNA, 3174 bp, Sorghum bicolor
atgcttgctccagtgaaccaccttgctgaactttttcttttggctggtgatatccatgctacgttgtacactggctcaaaagctatgcacagtgagattctgaacatattcaaggaggaaactggaaagttcagtaaattctcagctgttcagaatgtgaggattacggtgcaaagaaggtaccaaaattttgtgaatgatagttctcgtcaaaagcagttagagatgttccttggattgaggctctataagcatctcccgtccatccccatgttccctctcaaagtgctatcaaggccgtctggatgcatgttgaaaccagttcctagtatcaccccaatgactgatggtggttccagtcttctcagcttcaaaaggaaggatcttatttgggtgtgtcagcaaggtgcagactacgttgaactttttatataccttggggagccatgtcatgtttgtcaactgcttcttactgtctcccacggtgctgaagattcttcatatccagcaaccgtagatgttagagttggctcaagcatagactccctcaaactcgtggtcgagggcgcttgcatcccacagtgctcaaatgggacaaatttactgattccagtcactgggagaattgatccagaggacttggctgttacagggaaaagtgctaggcccaatgttcaagagagctcctatcttcctttgttatacgactttgaagagctagaaggagaactaaactttttgaatcgagttgttgcattatcttttcatccatctgctgtatcaagaacacccattactcttggtgagattgaagtacttggagtttctcttccatgggcagacatgttaaccaatagtgaacatgctcctgaatttatggagtttctcaataaaaattcatcaagtgttcaccgtgatctaggttccaagtcttttggaaattcttccatgcctgggaatgattctcatggtattgatgggtcttacactaaaagttcatcatcagttcaaacaggtggttcggaaaatttgttggattttctcacaggtgattttgacaagtcggagccgcatataactgaaaatacttttggtaatggggaacaaacaaacttcttagatgatggatttgatgttaatccttttgcccctgcattggaagtgcctgttcctaaagtgaataagcaggttgaagaatgtggcagcacacagctttatcttaaattttttgaatccctttgtggctataataagggaaagggtcttgactttgagcaaatgatgaagcttgaaataaaacgtctctgtcttggtctttctgccgctgaaagggaccaggcattgttatcaattggtgtaattcctgccacattggatccaaaccgttcagttgattattcttacctattgaagttatccagcttagctgataatctggcactgctgggccatacagtccttgaggatcgtgttaatgcttcaatagggcttgaaaagggcagtgaacacactatagacttttggaacatcagtgaaaatgatgaatcctgctatggtggggcatgtgaagtccatgctctgtcttcgtcacaagctttagccactagagaaaaccagtcagtatttgtggaatgttttcggtgtgaaaggacagtttgcaaagcttgctgtgctgggaaaggggccttccttttgcttaacacctacagggagttgaagatttatggtgggagtcaaagtggtggctattcagcactcgcagatagttttgtgtgcaaatcttgctgcagtgaaattatcaaacgtgcattgtatgtggattatgtccgggttctccatagtttgcgcagaaaagatcgttcagagaaagcggcactcagtgctgtgaatcaggtctgccaactggagtacaggaaagcatctgatttttctcaaagtgttcaatttggtcagagacaattgaagcagatccttgatggtgaagaatccctcgcagaatttccatatgcaaactttttacaaatggttgaaactgccaatgactctgaaccactgctttcgttactggcaccttttggtactggagagtacaagtcttactggaaagctccgcaagataacacttcagtggagttctcaattgttcttggtggtttatcagatgttgcaggagttgctataattgtcagttcttgtgggtactcgacatctgactgcccaattgtagagatatgggcgagtaataaaatacaccgagaagatcgtacgttcataggaaagtgggatgtacaggatatgatatcttcatctccacagctttgtggacctgaaacatctagtagatttagtgaagaaccaagacacattaaatttcacttcccaaatactattcgttgtcgtataatttcaataaaaattacacttccccataatggttctcgttcaaccaagtttagtgaggagtttgatcttctatcattggatgatagctcagtttatgaatcaaagccaaccaatccacagaattcatttatccatgcgaaaagaattgttgtttttggcagttctttgagaaaggagatggggcctgacacatcagggggaataatgagaatgaaaagttatttagacagatcaccacccttggggagatttaggattccagttgaagctgagaggctgagagataatgatcttgttcttgagcaatatcccttagctaattcacctggaatagctggattccggcttgattttttcagtgttataagacctcgtgtgacccattcaccttcctcatcagaattggacatgaggaagttttcattgacacgaatggaggatagatttgtaaatccagcaattctttatatacaggtcacagttgttaaggagtctggcaagttggttgtagaggaataccgtttaccagaagtaaaagcgaatacaccactatattttgatttcccagatctacaacaggatgctcgctgtgttatctttagattacttggtgatgtcactgcctttgttgatgacatttctgagcttgagaacttaaacttgcgaaatcttcctttggcatccggactgtctttgtcaaataagatcaagttgtactactatgctgatacatatgagatgggaaagattggcagtctctcagctgtataa

SEQ ID NO: 2040 - protein, 1057 aa, Sorghum bicolor
MLAPVNHLAELFLLAGDIHATLYTGSKAMHSEILNIFKEETGKFSKFSAVQNVRITVQRRYQNFVNDSSRQKQLEMFLGLRLYKHLPSIPMFPLKVLSRPSGCMLKPVPSITPMTDGGSSLLSFKRKDLIWVCQQGADYVELFIYLGEPCHVCQLLLTVSHGAEDSSYPATVDVRVGSSIDSLKLVVEGACIPQCSNGTNLLIPVTGRIDPEDLAVTGKSARPNVQESSYLPLLYDFEELEGELNFLNRVVALSFHPSAVSRTPITLGEIEVLGVSLPWADMLTNSEHAPEFMEFLNKNSSSVHRDLGSKSFGNSSMPGNDSHGIDGSYTKSSSSVQTGGSENLLDFLTGDFDKSEPHITENTFGNGEQTNFLDDGFDVNPFAPALEVPVPKVNKQVEECGSTQLYLKFFESLCGYNKGKGLDFEQMMKLEIKRLCLGLSAAERDQALLSIGVIPATLDPNRSVDYSYLLKLSSLADNLALLGHTVLEDRVNASIGLEKGSEHTIDFWNISENDESCYGGACEVHALSSSQALATRENQSVFVECFRCERTVCKACCAGKGAFLLLNTYRELKIYGGSQSGGYSALADSFVCKSCCSEIIKRALYVDYVRVLHSLRRKDRSEKAALSAVNQVCQLEYRKASDFSQSVQFGQRQLKQILDGEESLAEFPYANFLQMVETANDSEPLLSLLAPFGTGEYKSYWKAPQDNTSVEFSIVLGGLSDVAGVAIIVSSCGYSTSDCPIVEIWASNKIHREDRTFIGKWDVQDMISSSPQLCGPETSSRFSEEPRHIKFHFPNTIRCRIISIKITLPHNGSRSTKFSEEFDLLSLDDSSVYESKPTNPQNSFIHAKRIVVFGSSLRKEMGPDTSGGIMRMKSYLDRSPPLGRFRIPVEAERLRDNDLVLEQYPLANSPGIAGFRLDFFSVIRPRVTHSPSSSELDMRKFSLTRMEDRFVNPAILYIQVTVVKESGKLVVEEYRLPEVKANTPLYFDFPDLQQDARCVIFRLLGDVTAFVDDISELENLNLRNLPLASGLSLSNKIKLYYYADTYEMGKIGSLSAV

SEQ ID NO: 2041 - DNA, 537 bp, Sorghum bicolor
atgcaggcagacgccgtcgccatggcgtcccttaccaccgcgctcctcccccgtgccggcgtgcccctcctccgcgcgccatccgtgttccgcatcgccgcctcttcgtcgggctcggggagcaagaagaagagcaagaagcccaagagcggcagcaagggcaaggacaccaaggcgctggagcctccggcgcccgtagtccgccgcgcgccggcgggaagcgcgtccatcttccagcagcagcaggaggcagcgtccaagtccggaggcgccgatgggaaggggcccacggaggaggagctgcggcagcggcaggccaacgagaacgccttcctcctcgcctggctgggactcggcatcatcatccttgtcgagggcatcgcgctcgccgcctccggttttcttccagaggaatatgacagcttctttgtcaagtacctttatccatcgttcactccaacagttgttctatttttggctggtacggttggatatggtgtcctcaaatactttgaaagtgagaaaagcaaaagctag

SEQ ID NO: 2042 - protein, 178 aa, Sorghum bicolor
MQADAVAMASLTTALLPRAGVPLLRAPSVFRIAASSSGSGSKKKSKKPKSGSKGKDTKALEPPAPVVRRAPAGSASIFQQQQEAASKSGGADGKGPTEEELRQRQANENAFLLAWLGLGIIILVEGIALAASGFLPEEYDSFFVKYLYPSFTPTVVLFLAGTVGYGVLKYFESEKSKS

SEQ ID NO: 2043 - DNA, 1701 bp, Sorghum bicolor
atgaagcacccgccgcagcgcgacggggagccgtccccgtcccctccgccgcagcggcggccgcgcgggttcgcttccacggcggggggttcgccgcggaggcgaggcgagcgggagcgggagcgggagaaagagcggacgaagctgcgggagcggcaccggcgcgccatcactagccgcatgctcgccgggctccggcagcacggcaacttcccgctccccgcccgcgccgacatgaacgacgtcctcgccgccctcgcccgcgccgccggctggactgtgcaacccgacggcaccaccttccgctcctccaaccaaccactcttgccgccgcctcctccccagctgcatggagtgtttcaggttgcatctgtggaaaccccagctttgatcaatactctgagcagttatgtcattggaacaccattagattctcaggcatctgccctacaaacagatgacagtctgtcaccatcatcactggactcagttgtggcagaccgaagcataaagactgagaactatgggaattccagttcagtcagttctctcaactgtatggacaatgatcagttaatgagatcagcagtattattccccggtgattacaccaaaactccatatataccagtttatgcttctctgcctatgggcattattaatagtcactgccaattagttgacccagagagtgtacgtgctgaactaaggcatctgaagtctctgaacgtggatggtgttgttgttgactgttggtgggggattgtggaagcctggactcctcggaagtatgaatggtctggttacagggacctttttggtataattaaagagttcaagctcaaagttcaggttgtattgtcatttcatgggtctggagagattggatctggtgatgtgttaatctctctcccaaagtggatcatggaaattgcaaaagagaaccaggatatattttttacagatcgcgaaggtagaagaaacacagaatgcctttcttgggggattgacaaagaacgagtccttcgtgggagaactggcatcgaggtctattttgatttcatgaggagtttccatatggaattcagaaacttatctgaagagggtcttgtttcttctatcgaaattggattaggtgcttctggggagctaagatatccttcatgtccagacacaatgggctggaaatatcctggtattggtgagtttcagtgttatgacaggtacatgcaaaagcatttacggcaatcagcactgtcccggggtcatttgttttgggcacgtggacctgataatgctggctattataattcaagaccacatgaaactggctttttttgtgatggaggcgattatgacagctactatggacgttttttccttaactggtattctggagtcctaatggatcatgtggatcacgtgctgtcgcttgctagtcttgcatttgatggagcagaaatagttgtgaaggttccatctatctattggtggtacagaactgcaagccatgctgcagagcttacagcgggattctacaatcctacaaatagagatggatactctccagttttcagaatgctcaagaagcattctgtaattcttaagctcgtttgttatggtcctgagtttacaattcaagagaatgatgaagcatttgcggatccagaaggtttaacctggcaggtggagatgttctaa

SEQ ID NO: 2044 - protein, 566 aa, Sorghum bicolor
MKHPPQRDGEPSPSPPPQRRPRGFASTAGGSPRRRGEREREREKERTKLRERHRRAITSRMLAGLRQHGNFPLPARADMNDVLAALARAAGWTVQPDGTTFRSSNQPLLPPPPPQLHGVFQVASVETPALINTLSSYVIGTPLDSQASALQTDDSLSPSSLDSVVADRSIKTENYGNSSSVSSLNCMDNDQLMRSAVLFPGDYTKTPYIPVYASLPMGIINSHCQLVDPESVRAELRHLKSLNVDGVVVDCWWGIVEAWTPRKYEWSGYRDLFGIIKEFKLKVQVVLSFHGSGEIGSGDVLISLPKWIMEIAKENQDIFFTDREGRRNTECLSWGIDKERVLRGRTGIEVYFDFMRSFHMEFRNLSEEGLVSSIEIGLGASGELRYPSCPDTMGWKYPGIGEFQCYDRYMQKHLRQSALSRGHLFWARGPDNAGYYNSRPHETGFFCDGGDYDSYYGRFFLNWYSGVLMDHVDHVLSLASLAFDGAEIVVKVPSIYWWYRTASHAAELTAGFYNPTNRDGYSPVFRMLKKHSVILKLVCYGPEFTIQENDEAFADPEGLTWQVEMF

SEQ ID NO: 2045 - DNA, 678 bp, Sorghum bicolor
atggccatggaggagggatcaggagcagtagagaacggaccgatcgtgggcacggtggctgacgcctctgccgccgccgccgccgccatcggcggcgacggcaaagggaaggaggaggccgaggggagacggccggctccggccgcctacgctgccgtcgtgatcgggggcaccttcgaccggctgcaccagggccaccatctcttcttgaaggcagcagcggagctggcgagggagaggattgtgatcggcgtctgcgacggacctatgctcgccaagaaacagtatgcctacctgatacaaccaatcgagaagcggatgcaaaatgtcaaggattatattaagtccataaagcctgaccttgatgttcatgtggagccgatcgtggacccttacggcccttccatcgttgacgaaggtcttgaggccataattgtcagcaaggagacattgccaggaggacacgctgtcaacaggaagagagcagagagagggctcactcagttacagatcgaggtggtagagctggtaccagagaaatcgactggaaataagataagctccacagcattcagaaagatggaagcagagagggaactgcagcaacaagaaaccgcaataggcagtcacagcattcagaaaattgaaagcagcgagggaattgcagcaacagaataa

SEQ ID NO: 2046 - protein, 225 aa, Sorghum bicolor
MAMEEGSGAVENGPIVGTVADASAAAAAAIGGDGKGKEEAEGRRPAPAAYAAVVIGGTFDRLHQGHHLFLKAAAELARERIVIGVCDGPMLAKKQYAYLIQPIEKRMQNVKDYIKSIKPDLDVHVEPIVDPYGPSIVDEGLEAIIVSKETLPGGHAVNRKRAERGLTQLQIEVVELVPEKSTGNKISSTAFRKMEAERELQQQETAIGSHSIQKIESSEGIAATE

SEQ ID NO: 2047 - DNA, 93 bp, Sorghum bicolor
ctcatacctttctcggccttttggctaagatcaagtgtagtatctgttcttatcagtttaatatctgatatgtggaccatgtgttcactttga

SEQ ID NO: 2048 - protein, 30 aa, Sorghum bicolor
LIPFSAFWLRSSVVSVLISLISDMWTMCSL

SEQ ID NO: 2049 - DNA, 1026 bp, Sorghum bicolor
atgctttcttctgggtcagatggctctcgtgaagctagtcctacaagaaccagtgcatctagagaacaagaaaaaggagaaaagcaggctagtccggatcatgcaggtgatagaggtggtgcttcacaaaataaaagcaaaatctctgcagctactagaagaaaaaccattggcagtaaaaaagagggatcaaccatggataaaaagcaagctaatactcctagacgctcgactccaaagaaggatacggtaacactttcatctgattctgatgcttccctcggaaacagcccttcaagggctggtgaagataatcatgaagaggactcacttagcgctgcaaagagaaaggatgctcagcaaacaaagactaaaaaagcaacggttgctggaacaaaagctggtccagaacaagcaggtaacggagatgctgaggatgatatgcaagataaactcacagggaactctgtctcccagaggttaccattaatatttcctgataaagttcaacgatcaaaggcattgattgaatgtgatggtgattcgatagatttgagtggagatattggtgcggttgggaggatagtagtttcaaatggtcctactggaaatcaggatttgttgttggacctgaaaggaacaatatacaaaacaactatagttccatccaggacattttgtgttgtgagtgtgggacaatcagaagcaaagatagaggctattatgaatgacttcattcaactggaaccgcagtccaatttatttgaagcagagactatgatggaaggtacccttgatggattcacatttgattcagacgaggagggtgacaaactctatgaaccacaggctagtcaaaatgatcagaacaatgaagatgaaggtcaacctaaggcgaagaccaaaaggaaagcagagaaaacagcggggaaggcaccaaagaaggcaaaggttgctggaaagggccctaaaaagggcgtaaggaaaacccaacctgcaaagagaggtaggaaggcgaagaaatga

SEQ ID NO: 2050 - protein, 341 aa, Sorghum bicolor
MLSSGSDGSREASPTRTSASREQEKGEKQASPDHAGDRGGASQNKSKISAATRRKTIGSKKEGSTMDKKQANTPRRSTPKKDTVTLSSDSDASLGNSPSRAGEDNHEEDSLSAAKRKDAQQTKTKKATVAGTKAGPEQAGNGDAEDDMQDKLTGNSVSQRLPLIFPDKVQRSKALIECDGDSIDLSGDIGAVGRIVVSNGPTGNQDLLLDLKGTIYKTTIVPSRTFCVVSVGQSEAKIEAIMNDFIQLEPQSNLFEAETMMEGTLDGFTFDSDEEGDKLYEPQASQNDQNNEDEGQPKAKTKRKAEKTAGKAPKKAKVAGKGPKKGVRKTQPAKRGRKAKK

SEQ ID NO: 2051 - DNA, 1389 bp, Sorghum bicolor
atgaggtcaacgagacaggacttattccctgagcttgaagatgaccaggatgttggagaagatcctgaaggtcaacagatggtttctttaaacaggctgctagaaaagcaccgagattcttctttgaataaacttcttgaaaagcaccgggatgaagagatgcaagaatcatgctctgtggaaaatgaacgcaatgaagatgagcagcttgacgccttatcctttgaacagtccattctaaagatagctagcatgaaaggagggaatctttggagcaacccaaatgagctctccgaggagatggttcgttgcatgagaaacattttcctgcgcttgtctgaatccttgaagatattgccgaaggcatcttctgattgttcatcttcctcagcggagcgtctatcaggctccacatcagcatccttctcagattcatccataatgccctcaatgctacggagtccttcagttgattctaaccacaacaatgagacaatgaatgaagtcaggaactttgatccatataaagttaatggaaaggaaactcgaagagatattggaaactatcgttcagcagctgaagtatcttggatgtctgttggaaaggatcaacttgaatatgcatctgaagctctgaagaagttcagatttcttgtggaacagttgtcaaaggttaatcctagctgtatgaatcgtgatcagcggctagccttttggattaacttatacaatgctttgataatgcatgcgtatttggcatatggagtacctcgaaatgacatcaagcttttttctctaatgcaaaaggcttgttacacagttggtggccagtccttcagtgcagcggaaatagagtttgtgattctaaagatgaagactccagtgcatcggccccaactttctttgatgttggctctgaataagttcaagattactgaggatcacaagaagtactcaatcgatgaatttgaaccccttttgttgtttggacttagctgtggaatgttctcttctcctgctgtacgtattttctccgccgcaaatgtcagacaggagctccaggaatctttgagagactatattcaagcgactgttggtacaaatgacaaagggaaactgctgatcccaaagttagtgcagagctacgccaagggagctgttgaagactctctgcttgcagactggatctgccaccaccttgctcctgatcaagctgcagtcatccgagattcttcttcacagaggaagcagcggcttcttggatttcgaggtttcactgttctcgcgtttgactcaaagtttcggtacctcttcttgcctgacagcagtggctcccagaagctagaggcaaaacaatcttacaaacttcctgagccgtgttcaaaatag

SEQ ID NO: 2052 - protein, 462 aa, Sorghum bicolor
MRSTRQDLFPELEDDQDVGEDPEGQQMVSLNRLLEKHRDSSLNKLLEKHRDEEMQESCSVENERNEDEQLDALSFEQSILKIASMKGGNLWSNPNELSEEMVRCMRNIFLRLSESLKILPKASSDCSSSSAERLSGSTSASFSDSSIMPSMLRSPSVDSNHNNETMNEVRNFDPYKVNGKETRRDIGNYRSAAEVSWMSVGKDQLEYASEALKKFRFLVEQLSKVNPSCMNRDQRLAFWINLYNALIMHAYLAYGVPRNDIKLFSLMQKACYTVGGQSFSAAEIEFVILKMKTPVHRPQLSLMLALNKFKITEDHKKYSIDEFEPLLLFGLSCGMFSSPAVRIFSAANVRQELQESLRDYIQATVGTNDKGKLLIPKLVQSYAKGAVEDSLLADWICHHLAPDQAAVIRDSSSQRKQRLLGFRGFTVLAFDSKFRYLFLPDSSGSQKLEAKQSYKLPEPCSK

SEQ ID NO: 2053 - DNA, 1689 bp, Sorghum bicolor
atgaaggagcagtttctggataacatggacctggagagggagagagggatcactatcaaattgcaggcagctcggatgcgctatgtcatgaataatgagccttactgcctgaatttgattgatacaccagggcatgttgatttctcatatgaggtttcccgctctcttgctgcctgtgagggcgcacttcttgttgttgatgcttctcagggcgttgaagctcagacattagcgaatgtatatcttgcgttggaaaacaatcttgaaatcataccggttctaaataaaatagatcttcctggtgctgaacctgaccgtgtcgcacaggaaattgaagagataattgggttggactgcagtgacgcaattcggtgttcagcaaaggaaggcataggcatcactgaaatactagatgcccttgtgaccaaaatccccccaccgaaagatacggcaaaagatcctctcagggctcttatatttgacagctattatgatccatacagaggtgtaattgtgtacttccgtgttattgacggcagtataaagaaaggggacaagatctgttttatggccaatggaaaggaatatgttgctgatgaaattggagtactatccccaaatcagatgcaagttgacgaactatatgctggcgaggttggttatctctccgcttctataagatcagtagcagatgccagggttggtgatacaattactcattattcaaagaaagcagatcatgctttaccaggatattctcaagccactccaatggttttttgtggcttgttccctatagatgctgatcagtttgaggagctgcgggaagctctggaaaaacttcagctaaatgatgctgccctaaagtttgaaccagaatcttctagtgccatggggtttggcttcagatgtggtttccttggtcttctccatatggaaattgttcaggaaaggcttgagagggaatacaacttgaacttaataattactgcaccaagtgtggtataccgtgtgaactgtgtagatggtgaaaccgttgaatgttcaaatccatccttgcttccggagcccgggaagcggaggtctatagaagaaccatatgtgaagattgaaatgcttacaccgaaggattatattggttcaataatggatctggctcaagatagaagaggtgaattcaaggaaatgaacttcatcacagaaagcagggccaaacttatttatgagctaccactagccgagatggttggcgatttctttgatcaactgaaatcacgaagtaaaggatatgctagcatggaatattcacttatcggagaaagtcaactagtaaagctagatatacaaatcaacggggatcctgttgaggcgttgtcaacaattgtacacagagataaggcatatgctgttggcagggcacttactcaaaaactcaaggaactcatacctcggcaaatgtttaaagttcctattcaagcatgtattggcacaaaggtcattgcgagcgaagccctgtctgccatcaggaaggatgtcctatcaaaatgctatggtggtgatataacaaggaaaaagaagttgctgaagaaacaggctgaaggaaagaaaaggatgaaggcaataggaagggttgatgttcctcaagaagcattcatggccgtgttgaaactggagaaggaggtgctatga

SEQ ID NO: 2054 - protein, 562 aa, Sorghum bicolor
MKEQFLDNMDLERERGITIKLQAARMRYVMNNEPYCLNLIDTPGHVDFSYEVSRSLAACEGALLVVDASQGVEAQTLANVYLALENNLEIIPVLNKIDLPGAEPDRVAQEIEEIIGLDCSDAIRCSAKEGIGITEILDALVTKIPPPKDTAKDPLRALIFDSYYDPYRGVIVYFRVIDGSIKKGDKICFMANGKEYVADEIGVLSPNQMQVDELYAGEVGYLSASIRSVADARVGDTITHYSKKADHALPGYSQATPMVFCGLFPIDADQFEELREALEKLQLNDAALKFEPESSSAMGFGFRCGFLGLLHMEIVQERLEREYNLNLIITAPSVVYRVNCVDGETVECSNPSLLPEPGKRRSIEEPYVKIEMLTPKDYIGSIMDLAQDRRGEFKEMNFITESRAKLIYELPLAEMVGDFFDQLKSRSKGYASMEYSLIGESQLVKLDIQINGDPVEALSTIVHRDKAYAVGRALTQKLKELIPRQMFKVPIQACIGTKVIASEALSAIRKDVLSKCYGGDITRKKKLLKKQAEGKKRMKAIGRVDVPQEAFMAVLKLEKEVL

SEQ ID NO: 2055 - DNA, 1227 bp, Sorghum bicolor
atggcgacgccaacggcctcatccaacttacccctcgccaccgccaccgccaccgcctccgcctccgtctccacctcgttccccaaccgattcctccgcacgccgtgcacgctccggcgccgctcttggccccgcctgcgactgcgtgcgggctccgtcaaggagtggcgcgagttcgaggacgacgcgggcaccgtcaaggagtggcgggagttcgaggacgccgtcaggaggaaggacctcccccgcgctctccgcttcctgcagtccgtggagcccgcggcggcggcagcgccgggggggaccgcggcggtgcaggtcgcggtccccgtgccgccggggcgggactgggaggtgctcgacgcctgcatcgactccgacgacatgcgcctcgtcggccgggcgtaccagttcctcgtcgaccggggtgtcctcgccagcttcggaatgtgcaagaacatcgttctggaagggccaagagaagtgacaccaacagttttgaaggagatgaccggtttggaagctgaaaaacttgcgccaaagaaatggggtctgtctggaagttctccgtatgttctcgttggatttcttggaggtgtatcttttctactgacacaaggggttgatctacggcctaaattgggtgctgtattgggattagcaacagccgatgcattgtttcttggtggtacctgtctcgctcaaatctcatgtttctggcctccatataaacgtcggatccttgtacatgaagcagggcatcttcttactgcctatctaatgggctgcccgatacgaggagtcattttggatccatttgtggcattgcgaatgggcatccagggccaggcagggactcagttctgggatgaaaagatggaaaaagaactagccgagggtcatctatcaagtactgcatttgacaggtactgtatgattctgtttgccggaactgctgctgaagcacttgtttatggggaggcagaaggtggagaaaatgacgagaacttattcaggagtttgtgcattctactgaacccaccgctttctgttgcacagatggcaaaccgagctcgttggtcagtcatgcaatcttataacctcctgaagtggcacaagaaagctcatagagctgcagtcaaagcacttgaagacgggcatagtctcagcattgtaatcagaaggatagaagaagccatcgcctctgaaagaaaatacgacaattaa

SEQ ID NO: 2056 - protein, 408 aa, Sorghum bicolor
MATPTASSNLPLATATATASASVSTSFPNRFLRTPCTLRRRSWPRLRLRAGSVKEWREFEDDAGTVKEWREFEDAVRRKDLPRALRFLQSVEPAAAAAPGGTAAVQVAVPVPPGRDWEVLDACIDSDDMRLVGRAYQFLVDRGVLASFGMCKNIVLEGPREVTPTVLKEMTGLEAEKLAPKKWGLSGSSPYVLVGFLGGVSFLLTQGVDLRPKLGAVLGLATADALFLGGTCLAQISCFWPPYKRRILVHEAGHLLTAYLMGCPIRGVILDPFVALRMGIQGQAGTQFWDEKMEKELAEGHLSSTAFDRYCMILFAGTAAEALVYGEAEGGENDENLFRSLCILLNPPLSVAQMANRARWSVMQSYNLLKWHKKAHRAAVKALEDGHSLSIVIRRIEEAIASERKYDN

SEQ ID NO: 2057 - DNA, 777 bp, Sorghum bicolor
atggggatggcgcccgccgggtgggtggccgggctggtggcggagagcttcttcgtggcgtgccccgcgcacgagtcccgcaagaagaacgagcgcaacatcttctgcctcgcctgctgcgccagcatctgcccgcactgcgcccccgcgcaccgccaccacccgctcctccaggtgcggcgctacgtgtaccatgacgtcgtccgccttggcgacctcgagaagctcatcgactgctcctgtgttcagagctacacgatcaacagtgccaaggtgatcttcctgaagccgaggcctcagtccaggcctttcaagggctccggcaacatctgcctcacatgtgacaggatcctccaggagcccttccacttctgctccctctcttgcaaggtggatcatgtgatgatgcagggaggggacctgtccaacatcctgcagtactatggcggcagcggtgtggcgggggacccggaccgcctcgccttcccgaggttcgagaacctccgcgtcgatggctcggacctcgacgatgacaccgacggtgggcaggtgaccccaaactcgatcctcgaggacccgacgcagcactatggcaatggcggtggcgggggatcaagtgacaatggaggcgacactagggtggatggcggtgcgcggcgcggcggcgaggcggcaaagaggaagaaagggggagggttcttcccccagatcgtgctgtcgcttggcggcggcggtaacaggaggaagggtgccccccacaggtcccctctggcctaa

SEQ ID NO: 2058 - protein, 258 aa, Sorghum bicolor
MGMAPAGWVAGLVAESFFVACPAHESRKKNERNIFCLACCASICPHCAPAHRHHPLLQVRRYVYHDVVRLGDLEKLIDCSCVQSYTINSAKVIFLKPRPQSRPFKGSGNICLTCDRILQEPFHFCSLSCKVDHVMMQGGDLSNILQYYGGSGVAGDPDRLAFPRFENLRVDGSDLDDDTDGGQVTPNSILEDPTQHYGNGGGGGSSDNGGDTRVDGGARRGGEAAKRKKGGGFFPQIVLSLGGGGNRRKGAPHRSPLA

SEQ ID NO: 2059 - DNA, 1722 bp, Sorghum bicolor
atggccgcggccacgctgctcccgggccccgccgccgcctcgccgcgtctcggctccgcggcttccgccccgtccgcgtcccacgggaggcgtcgcctcaccttcagcttcaggtgccagtcgaccagcgtcgacaagcagcagcagcctccgccgcctaagcagaagcagcggaacctgctcgacaacgccagcaacctgctgaccaacttcctcagcggcggcaacctcggggccatgcccgtcgcggagggcgccgttactgacctcttcggcaagcccctcttcttctcgctctatgattggttcctcgagcatggctctgtctacaagcttgcttttgggcccaaatcgtttgttgtcgtctctgaccctattgttgctagacacatcctccgggagaacgctttctgttatgataagggagttcttgctgaaattttaaaacccataatggggaagggtcttatacctgctgaccttgatacctggaagcaaaggagaaaagttataacacctgggttccatgccttattcatagaagctatggtgagaacatttacgaaatgttcagagagaacaatatcaaagcttgaagagcttactgaaagcgaagctcgtgtacaaaaatcgactatagtggaccttgaagctgagttctccaatttggcactcgatatcattggcttgggtgtgttcaattttgattttgactcggttactaaggaatctcctgtaatcaaggcagtttatggaacactttttgaagctgagcaccgttctaccttctacatcccctactggaatcttcctttcacaaaatggatagttccaaggcagcgcaagttccatagtgacctcaaggtgatcaacaattgccttgataacctgataaaaaatgcaaaggagacaagacaggaagctgatgtggaaaagctccagcaaagggactactcttctctgaaggatgcaagcttgctgaggttccttgttgacatgcggggagctgatgttgatgatcgccagcttcgagatgatctaatgacaatgcttattgctggacatgaaacaactgctgctgttctgacatggtctgtttttttgctagcccagagccctaccaagatgagaaaagcccaggcagaggttgattctgttctcagcaatggggcaattactgttgaatccctcaagaaactggagtacataaaattgattattcttgaagctcttcgcttgtatcctcagccaccattgttaattaggcgttctctccggccagacaagttgccaggtggatacaacggagcaaaagagggatatgaaataccagctgggactgatatatttgtttcgatatacaacctccacagatccccatatttttgggaccggccaaatgaatttgaacctgagaggttttcagttccaaagaaggatgagagcatagaaggctggtctggttttgatcctgaccggagtcctggtgcaatgtaccccaatgagatcatagcagactttgctttccttccctttggcggtgggcctcgcaaatgtgtgggggaccaattcgcgctcctggagtcgacggtagctctggccctgctgctgcggaagtttgatgtggagctgagagggtcacccgacgaagtagagatggtgacaggcgccacgatccacacaaagaatgggctgtggtgcagactgaggaaaaggacttga

SEQ ID NO: 2060 - protein, 573 aa, Sorghum bicolor
MAAATLLPGPAAASPRLGSAASAPSASHGRRRLTFSFRCQSTSVDKQQQPPPPKQKQRNLLDNASNLLTNFLSGGNLGAMPVAEGAVTDLFGKPLFFSLYDWFLEHGSVYKLAFGPKSFVVVSDPIVARHILRENAFCYDKGVLAEILKPIMGKGLIPADLDTWKQRRKVITPGFHALFIEAMVRTFTKCSERTISKLEELTESEARVQKSTIVDLEAEFSNLALDIIGLGVFNFDFDSVTKESPVIKAVYGTLFEAEHRSTFYIPYWNLPFTKWIVPRQRKFHSDLKVINNCLDNLIKNAKETRQEADVEKLQQRDYSSLKDASLLRFLVDMRGADVDDRQLRDDLMTMLIAGHETTAAVLTWSVFLLAQSPTKMRKAQAEVDSVLSNGAITVESLKKLEYIKLIILEALRLYPQPPLLIRRSLRPDKLPGGYNGAKEGYEIPAGTDIFVSIYNLHRSPYFWDRPNEFEPERFSVPKKDESIEGWSGFDPDRSPGAMYPNEIIADFAFLPFGGGPRKCVGDQFALLESTVALALLLRKFDVELRGSPDEVEMVTGATIHTKNGLWCRLRKRT

SEQ ID NO: 2061 - DNA, 1080 bp, Sorghum bicolor
atggcgggtggcaagatccagaagaagcgccacggcgcggcgggaggcgccggcggagggggcgcccggctgcagggcggtatcccgttcgagaagtccaaggggcagcacatcctgaagaacccggcgctggtggactccatcgtcgccaaggccgggctcaagcccaccgacaccgtcctcgagatcgggccgggtacaggaaacctcaccaagcgcctcctcgaggccggtgtcaaggccgtcgtcgccgtcgagctcgacccgcgtatggtgctcgaactcaaccggcggttccaggggcacccgctctcctcgcgccttaaggttatccaaggagatgtcctcaaatgtgatctcccatacttcgatatttgtgtggcgaacatcccgtaccagatctcatctccccttactttcaagcttctgtcacaccgtccaatctttaggtgtgctgtgattatgtttcaacgtgaatttgccatgagacttgtggcacaaccaggagataccctctactgtcgtctctctgtgaatgtgcagctcctgtcgcgagtgtcgcatctcctaaaggttgggaagaacaactttaggcctccgcccaaagttgattcttcggttgtgcggatcgagcccaggaaaccgctccctcctgtcagcttcaaggagtgggatgggcttgtgaggatttgtttcaaccggaagaacaggaccctgggctccctcttcaaaacgaaacgtgttcttgaattgctagagaagaactacaagactatgcagtctctccaacttacacgagatgcagacatgggcgagcaaaagatgtctgcggacgacgtcgcgttgctggctaatatggttgaagatctgaacatggagactggggatgagaaggaagatgatgaaatggaaatggatgatgcagacatggctggagatggtgctgcaagctttaaagaaaagattatgggtattttgcagcagggcgattttgcagaaaagagaggttccaagctgagccaagttgatttcttatacctgctgtccctcttcaacaaagctggcatacatttctcgtga

SEQ ID NO: 2062 - protein, 359 aa, Sorghum bicolor
MAGGKIQKKRHGAAGGAGGGGARLQGGIPFEKSKGQHILKNPALVDSIVAKAGLKPTDTVLEIGPGTGNLTKRLLEAGVKAVVAVELDPRMVLELNRRFQGHPLSSRLKVIQGDVLKCDLPYFDICVANIPYQISSPLTFKLLSHRPIFRCAVIMFQREFAMRLVAQPGDTLYCRLSVNVQLLSRVSHLLKVGKNNFRPPPKVDSSVVRIEPRKPLPPVSFKEWDGLVRICFNRKNRTLGSLFKTKRVLELLEKNYKTMQSLQLTRDADMGEQKMSADDVALLANMVEDLNMETGDEKEDDEMEMDDADMAGDGAASFKEKIMGILQQGDFAEKRGSKLSQVDFLYLLSLFNKAGIHFS

SEQ ID NO: 2063 - DNA, 327 bp, Sorghum bicolor
atggagtcgccgtcgccgtcgtcgctgagcgcgctgcggcacaggctgagggccaccgtgtgctgctgcttcggccagcagggcgccggcggcggcggcctgagcgagcggatgcggtggcgccgccgcgcgggcgtcggggagttccgctacgacccgctcagctacgcgctcaacttcgacgagggcgacctcgacgtcaacagcgacgacgaagaggacgaggacgaggatctgggagcccgcgcccgccgcggcgacggcctgctctaccacagcttctcgtcgcggctgtccacgcccgcggcggtcgtcgaggtcgcgtag

SEQ ID NO: 2064 - protein, 108 aa, Sorghum bicolor
MESPSPSSLSALRHRLRATVCCCFGQQGAGGGGLSERMRWRRRAGVGEFRYDPLSYALNFDEGDLDVNSDDEEDEDEDLGARARRGDGLLYHSFSSRLSTPAAVVEVA

SEQ ID NO: 2065 - DNA, 711 bp, Sorghum bicolor
atgatcatggcaatgtggaagccagcatggttagaggcccttaacacacagaagttcttcgtagcatgctctctccatgagcacgccaagaagaacgagaagaacatctgctgccttgactgttgcaccagcatctgcccacactgtgtgggagcacaccgtgtacaccggctcctgcaggtgcggcgatacgtctaccatgatgttgtccggctggaggacctggagaagcttgttgattgctccagtgttcagtcttataccattaacagctctaaggttgttttcctgaagaagagaccacagaataggcaattcaagggatcagggaatatctgcacctcctgcgacaggagccttcaagaaccgtatttccactgctctctggattgcaaggtagaatatatactacggcagaagaaaaatttgtcagcatacttgcgcccatgcaagacgttgcagcttggccctgacttcttcattcctcatgatgctgatgatgacacaactcactcaacccttgttgatgttgatgagcccatgggatcatcggactctgagaatttgagtgcgccatgcacaaattttgttcggaaaaaacggagtggaccatatatttgtgcacggtctgcaaacagagtgtctgatgaagacatggccacaaatatgagcagaaggaaaggggttcctcatagatcgcctttgtgctaa

SEQ ID NO: 2066 - protein, 236 aa, Sorghum bicolor
MIMAMWKPAWLEALNTQKFFVACSLHEHAKKNEKNICCLDCCTSICPHCVGAHRVHRLLQVRRYVYHDVVRLEDLEKLVDCSSVQSYTINSSKVVFLKKRPQNRQFKGSGNICTSCDRSLQEPYFHCSLDCKVEYILRQKKNLSAYLRPCKTLQLGPDFFIPHDADDDTTHSTLVDVDEPMGSSDSENLSAPCTNFVRKKRSGPYICARSANRVSDEDMATNMSRRKGVPHRSPLC

SEQ ID NO: 2067 - DNA, 2301 bp, Sorghum bicolor
atggctgcggcggcgatcctgccggagctggcgacgcaggtgctcatcccggtcgcggcggccgtgggcatcgcgttcgcggtggtgcagtgggtgctggtgtccaaggtgcggctcacccccgagcgccgtgcggacggcggagccgccaagagcgggcccagcgactacctcatcgaggaggaggaggggctcaacgaccacaacgtcgtcgtcaagtgcgccgagatccagaacgccatctctgaaggagctacatctttccttttcactgagtacaagtatgttggattattcatgggcatctttgcaatccttatattcctcttccttgggtccgtcgagggattcagcacgaagagtcaaccttgccactatagcaagggcaaaacttgcaagcctgcccttgctaatgccatcttcagtactatagcttttgtgcttggtgccgtcacctcactggtttctggatttcttggaatgaagattgcaacttatgcgaatgcccggacaactttagaggccagaaagggtgttgggaaggcatttattactgccttccgatctggtgcagttatgggctttctgcttgctgccagtggtcttttggttctttacattgctatcaatttgtttggaatttattacggtgatgactgggaaggtctttttgaggctattactggttatggccttggtggttcttctatggctcttttcggccgcgttggtggtggtatttataccaaggctgctgatgttggtgctgaccttgtgggtaaggtagaaagaaacattcctgaggacgatccaagaaacccagctgtcattgctgacaatgttggtgataatgttggagatattgctggaatgggatcagatctcttcggctcatatgctgaatcgtcatgtgctgctcttgttgtggcctcaatctcgtcttttggaatcaaccatgaatttactccgatggtgtacccccttcttgtcagctctgttggtattatagcatgtctcgtaacaacgctgtttgcaactgatttcttcgagataaaggctgtgagtgaaatagagcctgctctcaagaaacaacttataatatctactgttgtgatgaccattggcattgcgctcatcagttggcttggtcttccatacaccttcaccatttttaactttggagaacagaagacagtgcaaagctggcaattattcttgtgtgtggcggttggtctctgggctggcctagtcattggatttgttaccgagtactacacaagcaatgcctacagccctgtacaagatgttgctgattcctgcagaactggagctgccactaatgtcatttttgggcttgctttgggttacaaatcagtcattatcccaatttttgctattgcgtttagtatcttcctcagcttcagccttgctgccatgtatggtgttgctgtggctgctcttggaatgctgagtaccattgccacaggccttgccattgatgcctatggccctatcagtgataatgctggaggaatagctgaaatggctgggatgagccataggattcgtgagagaaccgatgctctagattctgcaggaaacaccactgctgcaattggaaagggctttgccattggctccgcagccttggtgtcccttgcactcttcggtgcctttgtaagccgggctgctatctccactgttgatgttctgactcctaaagtattcattgggcttattgtcggtgctatgctcccatactggttctcggcaatgaccatgaagagtgtaggcagtgctgcactcaaaatggtggaggaagtccgccggcagttcaacaccatccctgggctcatggagggcaccacaaagcctgactatgcaacttgtgtcaagatctcaacggatgcatccatcaaggagatgatccccccaggtgctcttgttatgctcacaccactgatcgttgggattttgtttggggttgagaccctctctggagtccttgctggtgcccttgtctctggtgttcagattgccatttctgcatccaacactggtggtgcctgggacaatgccaagaagtacattgaggctggagcttcagagcatgccaggacccttggcccaaaaggttctgaccctcacaaggcagctgtcattggtgacaccattggagatcctctcaaggacacgtctggcccctccctcaacatcctcatcaagcttatggcggttgaatcccttgtctttgcccccttcttcgccgcccatggtggcattctcttcaaatggctctaa

SEQ ID NO: 2068 - protein, 766 aa, Sorghum bicolor
MAAAAILPELATQVLIPVAAAVGIAFAVVQWVLVSKVRLTPERRADGGAAKSGPSDYLIEEEEGLNDHNVVVKCAEIQNAISEGATSFLFTEYKYVGLFMGIFAILIFLFLGSVEGFSTKSQPCHYSKGKTCKPALANAIFSTIAFVLGAVTSLVSGFLGMKIATYANARTTLEARKGVGKAFITAFRSGAVMGFLLAASGLLVLYIAINLFGIYYGDDWEGLFEAITGYGLGGSSMALFGRVGGGIYTKAADVGADLVGKVERNIPEDDPRNPAVIADNVGDNVGDIAGMGSDLFGSYAESSCAALVVASISSFGINHEFTPMVYPLLVSSVGIIACLVTTLFATDFFEIKAVSEIEPALKKQLIISTVVMTIGIALISWLGLPYTFTIFNFGEQKTVQSWQLFLCVAVGLWAGLVIGFVTEYYTSNAYSPVQDVADSCRTGAATNVIFGLALGYKSVIIPIFAIAFSIFLSFSLAAMYGVAVAALGMLSTIATGLAIDAYGPISDNAGGIAEMAGMSHRIRERTDALDSAGNTTAAIGKGFAIGSAALVSLALFGAFVSRAAISTVDVLTPKVFIGLIVGAMLPYWFSAMTMKSVGSAALKMVEEVRRQFNTIPGLMEGTTKPDYATCVKISTDASIKEMIPPGALVMLTPLIVGILFGVETLSGVLAGALVSGVQIAISASNTGGAWDNAKKYIEAGASEHARTLGPKGSDPHKAAVIGDTIGDPLKDTSGPSLNILIKLMAVESLVFAPFFAAHGGILFKWL

SEQ ID NO: 2069 - DNA, 1125 bp, Sorghum bicolor
atggggtgggggtggtcttcctgctgcaagcggtcggacggggctgagcctggtaggaggaagaagaagaaggacacgacgtggcggatcttctcgctgaaggagcttcagtcagcaacaaacaatttcaattatgataacaagctcggcgagggtggttttggcagtgtctattggggccagctctgggatgggtcacagattgccgtgaagaggctcaagagttggagcaacaaagctgaaagagaatttgctgtcgaagtggagattttggcacgagtgaggcacaagagccttttaagcttgcgcggatattgtgctgaaggccaggaacgcttgatagtctatgattatatgccaaacctgagcatacactctcaacttcatggacagcacgcagcagagtgcaatctcagttgggaaagaagaatgaagattgctgttgattctgcagaagggatcgcttatctgcatcactatgcgacaccgcatatcattcatagagacgtcaaggcgagcaatgttctcctggattcaaatttccaagctcgggttgccgactttgggtttgccaagctaattccagatggtgcaacgcatgtcaccacaaaggtgaaaggcacacttggttatctcgcaccagagtatgcaatgcttgggaaggcctctgaaagttgcgatgtcttcagttttggaattatgctcctagagcttgccagcgggaagaagccagttgagaagcttaaccccaccacgaagaaaaccataactgagtgggctcttcctctagtccgtgacaaaaagttcaaggaaattgctgatccaaagctcaaggatagcttcgtcgaggatgagctgaagcgaatggtgcttgttgggatcgcctgttctcaagacaagcctgaacagagacccataatgtctgaagtcgttgagctgctcaaaggagaatctactgagaagctttccaacctggagaacgatgatctgttcaagcctgatagctcattccagagctcatccggacctgatagctcagactgcgtcaccgaggagaggagtcccaaagctgatgcgatagaggaggcagttgattcaagtgagacagttccctcagcaaggtag

SEQ ID NO: 2070 - protein, 374 aa, Sorghum bicolor
MGWGWSSCCKRSDGAEPGRRKKKKDTTWRIFSLKELQSATNNFNYDNKLGEGGFGSVYWGQLWDGSQIAVKRLKSWSNKAEREFAVEVEILARVRHKSLLSLRGYCAEGQERLIVYDYMPNLSIHSQLHGQHAAECNLSWERRMKIAVDSAEGIAYLHHYATPHIIHRDVKASNVLLDSNFQARVADFGFAKLIPDGATHVTTKVKGTLGYLAPEYAMLGKASESCDVFSFGIMLLELASGKKPVEKLNPTTKKTITEWALPLVRDKKFKEIADPKLKDSFVEDELKRMVLVGIACSQDKPEQRPIMSEVVELLKGESTEKLSNLENDDLFKPDSSFQSSSGPDSSDCVTEERSPKADAIEEAVDSSETVPSAR

SEQ ID NO: 2071 - DNA, 435 bp, Sorghum bicolor
atgcaaccgcggaggccgcgcgcagccactccattgccgccttttagagcacccccggctgcaccaccgtcgcctcgccaaagtccgcaagggacctccgtgtgcttgcgattgcaccggcgtctactgcgaccttgcgaaaaagctttccgtgtgagcgtgtctgcctgtctgacatcgtcgatctccatgacgacgacgaccccgcgcgtgtggctgctcgccatggcgctggcgctcgcctgcgtgctgctcgtcaggtccgccgacgccgccgagtacgggtgcaacccggccacggacaagacgtgcaagcccgagggcatgggggtggtgctgccgggcggcggcattgacctcgacggcgacggcgacgaggacgagctgccgcagttcgaaccccacctcacgatcctcggccatgcccgagagtag

SEQ ID NO: 2072 - protein, 144 aa, Sorghum bicolor
MQPRRPRAATPLPPFRAPPAAPPSPRQSPQGTSVCLRLHRRLLRPCEKAFRVSVSACLTSSISMTTTTPRVWLLAMALALACVLLVRSADAAEYGCNPATDKTCKPEGMGVVLPGGGIDLDGDGDEDELPQFEPHLTILGHARE

SEQ ID NO: 2073 - DNA, 1218 bp, Sorghum bicolor
atggcggcggcggcggcggcggcgactgcgaaggcggcggaagagatggtggaggtgctcgacgaggagacgctggcgctgatgggggtcagcagcgccgccaccgcggcgccggtggcggtgggcgccgagtgggagacgttcaaggagaacgtgcggccgctcaagcgcgggcgcgacgtgtccaaactcaaccacgcgctcaaggcacacgccgatcccgcgcagcgcgccgctctcctcgagacccgcaagaagatgattgaggcaatcgaccagtaccaaggcgaggatccgctccaaccgtggctggactgcatcaaatgggtccaggagtcattcccgactggcggcgagtgctcggggttggtggtgttgtacgagcagtgcgtgcggaccttttggcacgacgggcgctacaaggacgacctccgcttcctcaaagtgtggctggaatacgctgggaattgtgcagatgctgaggtgatttacaggttcctggaggccaaccagattgggcagggccatgccatctactacatggcttacgcatcgttgatggagtcaaagaacaagttgaggaaagctaaggagatctttgaccttggtatagctagaaaagcgaagcctctggagaagttggaagctgtatacaggacatttcttcgaagatcaaccaaaagaagggaacaggagccggataatacagcagatgatgatctgccaaatcgcagtttcgggactaacttgaaacgagatgaaaacagaaatcaccaagcagggaactccggcctggggagaccaagggcactgcagagaatcgatcccaacaggccactttcaatttacaaagatgagaggccattactaaatcagggccttgacggagtgaggaacagagaaaataacacaagctggcgcaccctcccaacacaagcagatcgaaacaaggagaatagcatgatgcctgctaaatggacatctcacaagattccacaaaagttaggagcaagaggagcagttcagtccacccgaaccagttccattgaggtcttcgtggaggaagacactgcacaggaacctgctcagccggtgccgaagaccccaaatccttctgttctgaagcttagacaagcaacaagcaaaagccttaagaaggaaactgaattgcttaaggagaaccccttgcgcaacttccccctgagcagccttagatag

SEQ ID NO: 2074 - protein, 405 aa, Sorghum bicolor
MAAAAAAATAKAAEEMVEVLDEETLALMGVSSAATAAPVAVGAEWETFKENVRPLKRGRDVSKLNHALKAHADPAQRAALLETRKKMIEAIDQYQGEDPLQPWLDCIKWVQESFPTGGECSGLVVLYEQCVRTFWHDGRYKDDLRFLKVWLEYAGNCADAEVIYRFLEANQIGQGHAIYYMAYASLMESKNKLRKAKEIFDLGIARKAKPLEKLEAVYRTFLRRSTKRREQEPDNTADDDLPNRSFGTNLKRDENRNHQAGNSGLGRPRALQRIDPNRPLSIYKDERPLLNQGLDGVRNRENNTSWRTLPTQADRNKENSMMPAKWTSHKIPQKLGARGAVQSTRTSSIEVFVEEDTAQEPAQPVPKTPNPSVLKLRQATSKSLKKETELLKENPLRNFPLSSLR

SEQ ID NO: 2075 - DNA, 1575 bp, Sorghum bicolor
atggcgttcttccggggcctcaccgcggtctcgagactgcgatcccgcatggcgcaggaggccaccacgctgggtggtgtgagatggctgcagatgcagagcgcgtccgatctcgatcttaagtcccagatgcaggaattgattccggaacaacagccaatactagcaaatagtgtcaatcccttttcgtttagctcacgtatttctgtatccgatatattttcatcaattcatctcaacatgcggtggaacatgaaagcaattgcttgtctgaaagtagcatctactgatgttagtctgtctggttacaggatcgctttaaagaagcttaagtcagagcatggaaaggtccagcttggaaacataactgtggatatggtccttggtggaatgagagggatgactggaatgctttgggaaacatccctgcttgacccagaggagggtattcgttttaggggcctctcaattccagagtgccagaaagtgctgccaaccgcagttaagggtggtgaacctttgcctgagggtctcctttggcttcttttgacggggaaggtcccaaccaaagagcaagttgatgctctatcaaaggaattgcttgcgcgctcaactgtcccagctcatgtctataaggcaatagatgctctcccagtaactgcacatcctatgacacagtttaccacgggggtaatggctcttcaggttgagagcgaatttcaaaaagcatacgacaatggattgccaaaatcaaagttttgggagcctacttatgaagactgcttaaatttgattgctcggcttccaccagtggcttcttatgtttaccgcagaattttcaagggtggaaaatcaatagaagctgataattctctggattatgcggcaaatttctcacacatgcttggttttgacgaccccaaaatgctggagctgatgcggctctatgtaacaattcacactgatcatgaaggtgggaatgtcagtgctcatactggtcatctggttgggagtgctctgtcagatccttatctttctttcgcagcagctctgaatgggttagctgggccgctgcatggccttgcaaatcaggaagtgcttctatggatcaaatctgtaattgaggaaactgggagtgatgttacaacagatcaactcaaagactatgtctggaagacactaaagagtggaaaggtcgttcctgggtttggtcatggagttctgcgtaagacggacccacggtattcatgtcaaagggagtttgccctgaagcatttgcccgaggatccacttttccaattggtgtccaagttgtatgaagttgtacctccgatcctcactgagctgggcaaggtcaagaacccctggccgaatgttgatgctcacagtggagttttgctgaaccactttggactatctgaagcacggtattacactgtcttgttcggtgtttcgagaagcatggggataggatctcagctcatctgggaccgtgcccttggcctgccacttgagaggccgaagagtgtcaccatggagtggctggagaactactgcaagaacaaggctgcttga

SEQ ID NO: 2076 - protein, 524 aa, Sorghum bicolor
MAFFRGLTAVSRLRSRMAQEATTLGGVRWLQMQSASDLDLKSQMQELIPEQQPILANSVNPFSFSSRISVSDIFSSIHLNMRWNMKAIACLKVASTDVSLSGYRIALKKLKSEHGKVQLGNITVDMVLGGMRGMTGMLWETSLLDPEEGIRFRGLSIPECQKVLPTAVKGGEPLPEGLLWLLLTGKVPTKEQVDALSKELLARSTVPAHVYKAIDALPVTAHPMTQFTTGVMALQVESEFQKAYDNGLPKSKFWEPTYEDCLNLIARLPPVASYVYRRIFKGGKSIEADNSLDYAANFSHMLGFDDPKMLELMRLYVTIHTDHEGGNVSAHTGHLVGSALSDPYLSFAAALNGLAGPLHGLANQEVLLWIKSVIEETGSDVTTDQLKDYVWKTLKSGKVVPGFGHGVLRKTDPRYSCQREFALKHLPEDPLFQLVSKLYEVVPPILTELGKVKNPWPNVDAHSGVLLNHFGLSEARYYTVLFGVSRSMGIGSQLIWDRALGLPLERPKSVTMEWLENYCKNKAA

SEQ ID NO: 2077 - DNA, 888 bp, Sorghum bicolor
atggacggcggccgcaagagggggaaggccgacggcgccaaaggggcctccgccggcgcgaagcggtcgcgagaatcggagtcatttcaaagtggcgtaggaagcaaatcgaagccatgcaccaattttttcagtacttctggttgtccctttggtgagggctgccattttctccattacttccccggtggctaccaggcagtttcaaaaatgaccaatctgggtggcacaacaattgcatctcctggaagaatgacgatggacgggccacctacacccaccgtgaagactcgcttgtgcaacaagtacaacactgcagagggatgcaaatggggtgacaaatgccactttgcacatggtgaaaaggagcttggcaagcctaagttgatgggcagctatatgccacctcccatggggccaagacccactggtcattttgcacctccaccaatggccagccctggcttggccactccagctagcttcggcgcttctgccacagccaagatcagtgttgatgcatcccttgcaggtggcatcatcgggaggggtggagtaaacacaaaacagatatcccgagtcaccggggcaaagctggccatccgggaccatgaatcagacaccagcttgaaaaacattgagcttgagggcacctttgatcagatcaggaatgctagtgctatggtcagtgagcttattgtcagcatcagtggcaatgcccctccacaggccaagaacccagctggcggtactcatcgtggtggacgcacaggaagcaacttcaagaccaagatgtgtgagaacttcgcaaaagggtcgtgttcgtttggcgacaagtgtcactttgcccatggtgacaatgagctgcgcaagcctgctgctgcttga

SEQ ID NO: 2078 - protein, 295 aa, Sorghum bicolor
MDGGRKRGKADGAKGASAGAKRSRESESFQSGVGSKSKPCTNFFSTSGCPFGEGCHFLHYFPGGYQAVSKMTNLGGTTIASPGRMTMDGPPTPTVKTRLCNKYNTAEGCKWGDKCHFAHGEKELGKPKLMGSYMPPPMGPRPTGHFAPPPMASPGLATPASFGASATAKISVDASLAGGIIGRGGVNTKQISRVTGAKLAIRDHESDTSLKNIELEGTFDQIRNASAMVSELIVSISGNAPPQAKNPAGGTHRGGRTGSNFKTKMCENFAKGSCSFGDKCHFAHGDNELRKPAAA

SEQ ID NO: 2079 - DNA, 3138 bp, Sorghum bicolor
atgatgttcacagagggcctcgacgagtcggcgatcagctggatcaagcagggcacggactccccagcccccgcccgcgccccagcacacgcaccgcctcggtcgccgctggcggagcgcccgccgctggggcaggtgggggcgccgccgaggagccccgcggtgcacgccaggccgtgcggggccggcgcaggcgtcggtttcttctcccccaagggcctcccgcccgtacgggtgaacgggacgcgccactcgggcctgctcggccgccactccgtgctcctctcggccgccgactccgacgagtgggaggacgagagcgtcgcgtcgtgggggatgcccgaggactgctacggcggcggaaacttctcagagaccgccgatgaggcgtgctccagcgactccagcctcatgcggagggccatggaccgatgcggcggtgggtgggacgaagaggtcacgtcgcagctgagcaggaagggcggcggcggcggtggcgggatcgtgcgggggcagtccaaggagttcctgcgggtggaggtgcgagcggcgggcgcgttcgctgccgggaagtgctccggttccggggcagaacatccagtggactccatgtcgcagggacactactttgagggtcaggtattggggactcctagtgcccctccaattgcagggggcgaagaggaggttatgtttgatgcagttggtgagaacatcagactttgctatagtaattcatttgatttaacttgtcctggaagtgttgatttcattggcattcatatggtactggaaacagaaacggctgaaatggatggaggacttgaggggactggggtatcatcagtagcagatatactggcccaagatgctcatgagcttcctacgagctcaattgttcatgaagatggcattcagaataacttattagctcagataccgagcttcaccattaaaatacagaatttcttgcttcatccaaaacacaatagtcaagttgacggtaaacaagtctatgataaggatgcaagttgtactataaagggaaggaaacttgttaaacagattgagattgaagaaatgttcacatgcactctagaattgcaaagttcatgcaaaggtcatcagagagattcaatttctccacaatatttgaagccaggaactggtgaatctcaactcttttatctagagagccagggggatgttattcttgttgaagtacaagacaacaatagggttgtcataggccgtgcaaaaattcaagtttcttcattgactgatactcaactttgtatgaatttatccatgtcttccaacaattatgggtccgaaaagatgctgcaaggtggtcctgcagtagatactatcatatatgacatggttctggaagcggcaatgagggctcaaaatttcaacagcagaatgcttcatatcagtggtccatggatttggctgttagatgagttttctgattactatggaatatctgatgcatatagaaaattgaggtacttatcttacatcatgaacgtggcaataccaaccaaggattgtttggaacttatatacgaacttcttgttccagtcacaaaagcacgggaagatagaactttaacaagacaagagagaagtattttgatagactgcgaagatcggattaagagtctccttgcagctctgtttgaaaattacaagtcactggatgaacattctccaactggcttgtcagatttatttggccccataacagattctgctgcaccagctttggcacctgctgttcagatattcagtgtattgcacgacattctctccaaagaagcacaagacatacttaggaactacttgcagactgctgctgcaaaaaggtgcaggaggcatatgatcgagacagatgaattcttatcaagcaataacgacagccttcttacagactctatgactatatctgctgcatatcttaaaatgaagatactgtgcattaacataagtcacgaaattcaagcagacattaagattcacaatcagaatatacttccaagttccatagatctgccaaacatagcagcatccctatatagtaccgaactctgcaagcggctgaaaggttttctttcttcaagtcccccatcaagaccagtacaacatgttgctgaactgataatcgcaacttatgagtttgagagagatcttgaatcttggcaagtgagacctgttcatggcggcgtaatttcgagacagctatttcatgactacatcatgatatcatgtcctgcagtgtcaacaatctcaccatttgttgagcaaatgtatgagcaaataaaagagagcataaatgagtatggagtggttatcaatagatggccccaatatctgatgagtttagagagtgctgttgctgatgttgagagagaaattatgaaggcactggagaagcaatatatggagattctgatgcctctaagagatggcataccggaaaaaattgagaagcaagtccagagattaacaagaagacaatctatagctccctatgttgtgccaaatcagttaggagcattcatgaacacagtaaaaaggatgctagatgtgttacactgccgagttgaagacattctcaagtcatggggagcataccttactatatcaaatgggaacactgtttttggagagcaaatgaactccatcacagtcatgctgaagaagaagtacaagaaatacctgcaagcgatagtggacaagcttgtcagcaatgcacaagctaaccggaatacgaggctcaagcgaattcttgaagaaacaagagaggctgatggtgaaagtgacatacgagataggatgcaggctgtccgcctccagctctcggattccattcacaatctgcatgaggtcttctccagcagaatatttgttgctatttgccgaggtttctgggatcggttaggccagatcgtgttgagatttctcgagagcagaaaggagaacaggatttggtaccgtggatctgattatgctctagggatccttgacgatgtctttgcatcagagatgcaaaagctgctgggcaacgccctgcaggacaaggacctggatccaccgcagtcagtgatcgacgcccgctccatcctctgctag

SEQ ID NO: 2080 - protein, 1045 aa, Sorghum bicolor
MMFTEGLDESAISWIKQGTDSPAPARAPAHAPPRSPLAERPPLGQVGAPPRSPAVHARPCGAGAGVGFFSPKGLPPVRVNGTRHSGLLGRHSVLLSAADSDEWEDESVASWGMPEDCYGGGNFSETADEACSSDSSLMRRAMDRCGGGWDEEVTSQLSRKGGGGGGGIVRGQSKEFLRVEVRAAGAFAAGKCSGSGAEHPVDSMSQGHYFEGQVLGTPSAPPIAGGEEEVMFDAVGENIRLCYSNSFDLTCPGSVDFIGIHMVLETETAEMDGGLEGTGVSSVADILAQDAHELPTSSIVHEDGIQNNLLAQIPSFTIKIQNFLLHPKHNSQVDGKQVYDKDASCTIKGRKLVKQIEIEEMFTCTLELQSSCKGHQRDSISPQYLKPGTGESQLFYLESQGDVILVEVQDNNRVVIGRAKIQVSSLTDTQLCMNLSMSSNNYGSEKMLQGGPAVDTIIYDMVLEAAMRAQNFNSRMLHISGPWIWLLDEFSDYYGISDAYRKLRYLSYIMNVAIPTKDCLELIYELLVPVTKAREDRTLTRQERSILIDCEDRIKSLLAALFENYKSLDEHSPTGLSDLFGPITDSAAPALAPAVQIFSVLHDILSKEAQDILRNYLQTAAAKRCRRHMIETDEFLSSNNDSLLTDSMTISAAYLKMKILCINISHEIQADIKIHNQNILPSSIDLPNIAASLYSTELCKRLKGFLSSSPPSRPVQHVAELIIATYEFERDLESWQVRPVHGGVISRQLFHDYIMISCPAVSTISPFVEQMYEQIKESINEYGVVINRWPQYLMSLESAVADVEREIMKALEKQYMEILMPLRDGIPEKIEKQVQRLTRRQSIAPYVVPNQLGAFMNTVKRMLDVLHCRVEDILKSWGAYLTISNGNTVFGEQMNSITVMLKKKYKKYLQAIVDKLVSNAQANRNTRLKRILEETREADGESDIRDRMQAVRLQLSDSIHNLHEVFSSRIFVAICRGFWDRLGQIVLRFLESRKENRIWYRGSDYALGILDDVFASEMQKLLGNALQDKDLDPPQSVIDARSILC

SEQ ID NO: 2081 - DNA, 657 bp, Sorghum bicolor
atggctttagctcgcctgtgcctcaacagggccctcgccgtcgccgccggccgcgcgcaggcgctggcgaggccggcgtacgccgtagccccggagacagatttgaagcttcgcgcccttttgtcaacgtcggctgccgactctgccgcctcaggcgaggcgagccgccgggaggtcgccgtgtcggaggagcgctccgcccccgcacgccgcggcggacgctgggcgtggcgtgacctccgcgacttcaccccgttccgcctcgtcgacggtctcgggagcgcgctgtcgcaggtggcggagacgctgagcaggccgctggagcggctggcgccgtcgcggctgctgtcggggaaggtgagggaggacgaggcgcggtaccggctgcggttcgaggtgccggggctcggcaaggacgacgtgcgcgtggccgtggaggacggggtgctggtcatcgagggcgagaagcgggagcacggggaggaggtgggcggcgagtggtggtcggcggccaccgggtaccacgccagcctgctgctacccgacgacgcgcgcgccgacgggatcaccgccgaggtcaaggacggcgtgctgtacgtcaccgtgccgcgcaccggggagcgcaggcggaacgtcaccgaggtcaaggtccagtga

SEQ ID NO: 2082 - protein, 218 aa, Sorghum bicolor
MALARLCLNRALAVAAGRAQALARPAYAVAPETDLKLRALLSTSAADSAASGEASRREVAVSEERSAPARRGGRWAWRDLRDFTPFRLVDGLGSALSQVAETLSRPLERLAPSRLLSGKVREDEARYRLRFEVPGLGKDDVRVAVEDGVLVIEGEKREHGEEVGGEWWSAATGYHASLLLPDDARADGITAEVKDGVLYVTVPRTGERRRNVTEVKVQ

SEQ ID NO: 2083 - DNA, 522 bp, Sorghum bicolor
atgctgctgagctgcgggtcgctctcctcctgggtgcgccgcttcgtcgcctgcgttggaggttgttttggttgtgcccagcctactccgataatagctgttgatgagcctgcaaaaggtttaagaattcaagggcgttcagtaaaaaggcacaatttatctgacgacttttggagttcaagcccgcacgaaatggagaacagtgccttgcaatcccgacatagtatgtcttcaatcagcacagcagcacaacctaatgatcagcatgcttctggaagtagcagctccccaaatgattttgtaaatcaaggtcttctactatggcaccagactagacagcattggattggaaaacgaaggcgtaattctcagggtcaacaaagtcaagaaccaaaaataagtggtaatgctacatatgagagccttctgggaagctcgaaaccatttccacaaccgatccctcttggtgaaatggtggatttcctcgtggtcagctgggagcaggaaggcctatacgattag

SEQ ID NO: 2084 - protein, 173 aa, Sorghum bicolor
MLLSCGSLSSWVRRFVACVGGCFGCAQPTPIIAVDEPAKGLRIQGRSVKRHNLSDDFWSSSPHEMENSALQSRHSMSSISTAAQPNDQHASGSSSSPNDFVNQGLLLWHQTRQHWIGKRRRNSQGQQSQEPKISGNATYESLLGSSKPFPQPIPLGEMVDFLVVSWEQEGLYD

SEQ ID NO: 2085 - DNA, 615 bp, Sorghum bicolor
atggtacagccaaagaagtttcgtggagtccggcagcgccactggggttcctgggtctccgagatcaggcatcccctccttaagaggagggtctggctgggcaccttcgagaccgctgaggaggcagcgagagcatatgacgaggctgccgtgctgatgagcggccgcaacgccaagaccaacttcccggtccaaaggagcagcacaggggagccaaccccagctgcgggaagggacgctcacagcaacgccggcagcggctcctctaccgccaacctgtcccagattctcagtgcgaagctccgcaaatgctgcaaggcgccatcgccctccctgacctgtctccgccttgaccctgagaagtcccacattggtgtttggcagaagcgtgcaggagcccgtgctgactccaactgggtcatgaccgtggagctcaacaaaggtgcagcatccactgatgctgcatcacagtccacatcagcaacaactgctccaccagccaccccgatggatgacgaggagaggatcgccctgcaaatgatcgaagagttgctgagcagcagcagcccagcttcaccctcgcacggagatgaccaaggtcgcttcatcatctga

SEQ ID NO: 2086 - protein, 204 aa, Sorghum bicolor
MVQPKKFRGVRQRHWGSWVSEIRHPLLKRRVWLGTFETAEEAARAYDEAAVLMSGRNAKTNFPVQRSSTGEPTPAAGRDAHSNAGSGSSTANLSQILSAKLRKCCKAPSPSLTCLRLDPEKSHIGVWQKRAGARADSNWVMTVELNKGAASTDAASQSTSATTAPPATPMDDEERIALQMIEELLSSSSPASPSHGDDQGRFII

SEQ ID NO: 2087 - DNA, 1653 bp, Sorghum bicolor
atggaggccgcaaccgccgcgacggcggcgatggtgtggttccggaaggggctgcgcgtgcacgacaacccggcgctcgacgcggcccgccggtacggggccggcgccgcctccgcgcggcggctgtacccggtgttcgtgctcgacccgcggtacctccgcccggaccccgccgcgtcctccccgggctccgcgcgcgccggggtcgcccgcatccgcttcctcctcgagagcctcagcgacctcgacgctcgtctccgacgcctcgggtcccgcctcctcctcctccgtgcccgcgacgacgtcgccgacgcggtctgcgcggccctaaaggattggaacatcggcaagctgtgcttcgagtccgataccgagccgtacgcgctggcccgcgataagaaagtcacggattttgcattggcgtccgggatcgaggtgttcacgcctgtcagccacactctcttcgacccagcagaaatcataaagaagaacggtggtcgtccgcctttgacatatcaatcctttgtctccattgctggggagccgccagatcctatcatggaggaatactctgagctcccaccgcttggagacacaggggagtacgagctgttgcccgtgcctacagttgaggagcttgggtatgtggatatcagcgaggaggagattccaccatttcgtggcggggagacagaagctctgaggagaatgaaagaatcacttcaaaataaggaatgggttgccaaatttgagaaaccaaagggtgacccctctgcctttctgaaaccttccacaactgtcttgtcaccatatctgaagtttgggtgcctgtcttccagatatttttaccactgcattcaggatgtgtacaagagcgtcagaaaccatacaaaaccacctgtttcattgataggacagctgctgtggcgagacttcttctacacagtgtcttatggaactcctaattttgaccgaatgaaaggaaacaaaatatgcaagcagattccatggagcgagaacgaggagctatttgttgcatggagagatggccaaacaggatatccatggatcgatgctatcatgattcagctaaggaagtggggctggatgcatcaccttgcacgccattcggttgcttgttttttgacacgcggtgatatgtttatccactgggaaaaaggacgtgatgtctttgaaaggctactgatagattctgactgggccattaacaatggcaattggatgtggctctcttgctcatccttcttctatcagtaccacagaatttactcccctatcacattcggaaagaagtatgatcctaatgggaactacattaggcatttcatcccagtgctgaaagacatgccaagggaatacatttacgagccttggactgctccccttagcatccagaagaaagccaattgtattattggcaaagactacccgaaaccagtagttgatcatgagactgcaagcaaagagtgtaaaaaaaggatgggagaagcttatgcgtcgagtcgccttgatgccaaccctactaaagggaagacattgaactcgtctcgacgaaaaatgccccatggtgaccaagacacgtctaactcaaccatttccaagctactgaagaggaatagccgagctgaatga

SEQ ID NO: 2088 - protein, 550 aa, Sorghum bicolor
MEAATAATAAMVWFRKGLRVHDNPALDAARRYGAGAASARRLYPVFVLDPRYLRPDPAASSPGSARAGVARIRFLLESLSDLDARLRRLGSRLLLLRARDDVADAVCAALKDWNIGKLCFESDTEPYALARDKKVTDFALASGIEVFTPVSHTLFDPAEIIKKNGGRPPLTYQSFVSIAGEPPDPIMEEYSELPPLGDTGEYELLPVPTVEELGYVDISEEEIPPFRGGETEALRRMKESLQNKEWVAKFEKPKGDPSAFLKPSTTVLSPYLKFGCLSSRYFYHCIQDVYKSVRNHTKPPVSLIGQLLWRDFFYTVSYGTPNFDRMKGNKICKQIPWSENEELFVAWRDGQTGYPWIDAIMIQLRKWGWMHHLARHSVACFLTRGDMFIHWEKGRDVFERLLIDSDWAINNGNWMWLSCSSFFYQYHRIYSPITFGKKYDPNGNYIRHFIPVLKDMPREYIYEPWTAPLSIQKKANCIIGKDYPKPVVDHETASKECKKRMGEAYASSRLDANPTKGKTLNSSRRKMPHGDQDTSNSTISKLLKRNSRAE

SEQ ID NO: 2089 - DNA, 2472 bp, Sorghum bicolor
atgggtgccaactacctcgcgcagaccaatgcactcttcaggaagaatctcgtgatccagagacgcaaccacaggtcgaattgctgcctcatctgcttcccactcctcatctgcgtgctgctcggaggggtgcagttgatcgtggcgatagcttacttcacttcgtcggcgcacagggcgccccggaccgactgcggctactgcgccactagcacgaacacctccagcacggacacggtcggagggctcgtctgcccaacccaatgccccctgccgatcgcgccgaaatggccgccggtgctgcagctgccgccggcaccggacgacttggatgatttcggttcctcggctgcgtcgaccaatctcacggcggccgattcgatcacaagggcgaaagcggaaccccccgcggcgacgttccttgtcactggtaccaaccggtcgtttgcagaaagggtgatgagtaacatgctacccaagcatgatgatgagttgaagtctgcagctgacatctccacaattgccgatttcgcactgggtacagatgcaatgcactttatctctaatggtgctgaggaacttggttccgattttgaccaccggaaccacatttttttccttcagagcaactgcactccgaacgcaacactttcttttccggtccaagaaggtcgcagcaatttcaccaaagcatatgacctcacaagctcaaacctcaacaagtttaatttgattgtctcatacaactcaacatacaagggtgctactcaattgtcattgtcgttatcttcactttcattttcaccaatcttgcttcgagttccacggttactgaatctggtctcaaatgcataccttcaattgaggggcaatggtactaagatgcagtttgagtttattaaagacatgcctagagttgctcaacaagaattgcctattgatatatctttcttagtgggaaaattggttttcgtatggatgataatgctccttttccctgtcatcctgagcaatttagtctatgagaaggaacataagctaagaactataatgaagatgcatggcctaggagatatggcatattggattatatcatactgttattttcttcttctatcgctactgtatatgctcttcttggtgttttttggctctctttttggcataaagttatttatattgagtgactacagggtacaatttgtgatttacttcacctacataaacttgcaaatttcgtttgcttttcttatggcaacatacttttcaaaagtcggaactgctagtggaagctggacaacacttatggagttcttcccaccattttctttctactgcataatctacgagttctctccacctccatcacctttgtatcgtacagacttttctggaatacactgggaagacttgagtgatcacaagaatggaatgacagacattctcatcataatggcagtcgagtgggccacattccttttgttaacattctttttggacgaattttgtaccctgcgaaacagaattagaaaaatagcatcagcttgtcactcaagcacagattggagctctcacacttgtcagatgcagactattcagcttcaagaattcgtatcctcagctgaagcagacaggactgatgctttgagagagagagaaatagttgaacaactcttacaagaatcggatagcagttattcagtaatatgcgacaatcttaagaaagtgtatcatggcaaagatggaaatgcagagaaaactgctgtcacagggttatcactttctatgcaacgtgggcagtgttttggaattcttggtccaaatggtgctggaaaaacctctctcattagcatggctgtggaacattctctgaaaagtgtaaggctatttgatgatggtattgctgataagcgtgtggcaaaatacagtggtggcatgaagcgtcgtctcagtgttgctatatctctaattggtgatcctaaggttgtttacatggacgaaccaagttccggactggacccagcgtcaaggagagcactgtggaatgctgtgatgtctgccaaagagaacagggctataattctcacaacgcattcgatggaagaggctgaagctctatgcgacaggataggaatcatggtaaacgggagtctgcagtgcattgggaactccaaagagctgaaagccaagtatggaggcacatatgtgctcaccataacaactgcagcaggagaagaggaggcggtggagcagctcgtccggtccctctgccccgcggcgaacagagtgtaccgcatctcggggacacagaagtttgagatggcgaagcaggggctgaggattagtgaggtgtttcaggccatggagcatgccaagagctggctgaacatcgctgcctggggcctatctgatgcaacgctggaagataccttcatcaaagttgccagcgagagtgatgtatcctccgtgtag

SEQ ID NO: 2090 - protein, 823 aa, Sorghum bicolor
MGANYLAQTNALFRKNLVIQRRNHRSNCCLICFPLLICVLLGGVQLIVAIAYFTSSAHRAPRTDCGYCATSTNTSSTDTVGGLVCPTQCPLPIAPKWPPVLQLPPAPDDLDDFGSSAASTNLTAADSITRAKAEPPAATFLVTGTNRSFAERVMSNMLPKHDDELKSAADISTIADFALGTDAMHFISNGAEELGSDFDHRNHIFFLQSNCTPNATLSFPVQEGRSNFTKAYDLTSSNLNKFNLIVSYNSTYKGATQLSLSLSSLSFSPILLRVPRLLNLVSNAYLQLRGNGTKMQFEFIKDMPRVAQQELPIDISFLVGKLVFVWMIMLLFPVILSNLVYEKEHKLRTIMKMHGLGDMAYWIISYCYFLLLSLLYMLFLVFFGSLFGIKLFILSDYRVQFVIYFTYINLQISFAFLMATYFSKVGTASGSWTTLMEFFPPFSFYCIIYEFSPPPSPLYRTDFSGIHWEDLSDHKNGMTDILIIMAVEWATFLLLTFFLDEFCTLRNRIRKIASACHSSTDWSSHTCQMQTIQLQEFVSSAEADRTDALREREIVEQLLQESDSSYSVICDNLKKVYHGKDGNAEKTAVTGLSLSMQRGQCFGILGPNGAGKTSLISMAVEHSLKSVRLFDDGIADKRVAKYSGGMKRRLSVAISLIGDPKVVYMDEPSSGLDPASRRALWNAVMSAKENRAIILTTHSMEEAEALCDRIGIMVNGSLQCIGNSKELKAKYGGTYVLTITTAAGEEEAVEQLVRSLCPAANRVYRISGTQKFEMAKQGLRISEVFQAMEHAKSWLNIAAWGLSDATLEDTFIKVASESDVSSV

SEQ ID NO: 2091 - DNA, 384 bp, Sorghum bicolor
atgacggcgccccaagcagccatggccggtcagccagtgaatgccgccgcggtggatgagcgtctcctggtcgatcaggaggccaaccaccacccccaaccggagaacaatggtgataacagctgcttcccctggccgaccgttttgggtttcctcatcctcagcttcaacgcggcaatggccatcatccgatcccaaggcgatgtgatggccatcgccttcgtcggttttgcctatgccatcctcgtcgcgctttttgtctgcctgaggatgtacgagcgtgcccgtgctgggtcgtccaagagggagtggctcaagatcgctgaggcttcgtcgcgttctttgtctacaaagagaagtgatcatcggcttctcggtctctga

SEQ ID NO: 2092 - protein, 127 aa, Sorghum bicolor
MTAPQAAMAGQPVNAAAVDERLLVDQEANHHPQPENNGDNSCFPWPTVLGFLILSFNAAMAIIRSQGDVMAIAFVGFAYAILVALFVCLRMYERARAGSSKREWLKIAEASSRSLSTKRSDHRLLGL

SEQ ID NO: 2093 - DNA, 1137 bp, Sorghum bicolor
atgtgtcctgttgattcgacttctcatgttattcaactaatgcaaacagggcacaacaatagatccatgagtgcaacagccttgaacgagaggagtagcagatctcacagtgttgtgacaattcatgtccagggccaggatttgaaaaccggtaacactttgcgtggtgctctgcatcttgtggaccttgcaggaagtgaaagggtggaccgatctgcagttacaggagacaggctcaaagaagcacagcacatcaacaagtctttggctgcactcggggatgttatattttctttgtcacaaaagaatgctcatgtaccatacagaaatagcaagcttacacaagtcttacaaacttctttgggtgggcatgcaaagactctaatgtttgtgcaagtcaacccagatgtttcgtcatacactgagactttaagtacactgaaatttgctgaacgtgtgtctggggtagaactaggtgttgcaaggaccaacaaggagggcaaagatgtcaaagaattaatggatcagctttcactgctcaaagataccattgcaaagaaggatgatgaaattgagcgattgcaaatagccaacagtagcaactccctactgaaatccacgaaacatggtgactctgtgttgaagcattcggcctcttctccaggaatgacatctctaggaaaggtggcaagctttggtagcggggcagcttctgatcttgacaacttctctgacatcagtgataggcattccgaagctgggtccatgttttctactgatgaggcccgacagctgggccagaactttgctgatcctggtggtgattcagatggaaggctaagtgatgtatcagatggcggtatacccacgggtgcagaaactgacagttcagttaacaacgttgtggaccaagaacaagagaaaacatccactgctggaaaagagcggttagccaaagcagtaagtcgagtccagaagctaacagtaccaaaagttggccaagcatcaagcttgcggcctaaaccaagagatcctcctgctcctaaatcttcagtcacaactggtgtgcgaaaaagtaccaccactcaagcaactccaccagcaagagctagcagcacttcaaaacgagtaccataa

SEQ ID NO: 2094 - protein, 378 aa, Sorghum bicolor
MCPVDSTSHVIQLMQTGHNNRSMSATALNERSSRSHSVVTIHVQGQDLKTGNTLRGALHLVDLAGSERVDRSAVTGDRLKEAQHINKSLAALGDVIFSLSQKNAHVPYRNSKLTQVLQTSLGGHAKTLMFVQVNPDVSSYTETLSTLKFAERVSGVELGVARTNKEGKDVKELMDQLSLLKDTIAKKDDEIERLQIANSSNSLLKSTKHGDSVLKHSASSPGMTSLGKVASFGSGAASDLDNFSDISDRHSEAGSMFSTDEARQLGQNFADPGGDSDGRLSDVSDGGIPTGAETDSSVNNVVDQEQEKTSTAGKERLAKAVSRVQKLTVPKVGQASSLRPKPRDPPAPKSSVTTGVRKSTTTQATPPARASSTSKRVP

SEQ ID NO: 2095 - DNA, 864 bp, Sorghum bicolor
atggctggaggcggcgaccacaactccgcccagacgaacggcggaggtcacgaccagagggccatggaggagggcaggaaggaggcggagtacgctgaccaccagggctgcgccgccatggtcgtctccgtcccattcatccagaagatcatcgcggagatcttcgggacctacttcctgatgttcgcggggtgcggcgcggtgacgatcaacgcgagcaagaacgggcagatcacgttcccgggcgtggccatcgtgtggggcctggccgtgatggtgatggtgtacgccgtcggccacatctccggcgcgcacttcaacccggccgtcaccttcgccttcgccaccagcgggcggttcccgtggcggcagctccccgcgtacgtgctggcgcagatgctgggcgccgtgctcgcctccggcacgctgcgcctcatgttcggcggccgccacgagcacttccccggcacgctccccacgggctccgacgtccagtcgctcgtcatcgagatcatcaccacgttttacctcatgttcgtcatctccggcgtcgcaacagacaacagagcgatcggggagctggcagggctggccgtgggcgcaaccatcctgcttaacgtgctcattgccgggcccgtctctggcgcgtcgatgaacccggcccggagcgtgggcccggcgctggtgagcggggagtaccggtccatctgggtgtacgtggtgggcccgctggtgggggccgtggccggggcgtgggcctacaacctgatccgcttcaccaacaagcccctccgcgagatcaccaagagcacctccttcctcaagagcatgagcaccaacaggatgaactccgccgccgcctga

SEQ ID NO: 2096 - protein, 287 aa, Sorghum bicolor
MAGGGDHNSAQTNGGGHDQRAMEEGRKEAEYADHQGCAAMVVSVPFIQKIIAEIFGTYFLMFAGCGAVTINASKNGQITFPGVAIVWGLAVMVMVYAVGHISGAHFNPAVTFAFATSGRFPWRQLPAYVLAQMLGAVLASGTLRLMFGGRHEHFPGTLPTGSDVQSLVIEIITTFYLMFVISGVATDNRAIGELAGLAVGATILLNVLIAGPVSGASMNPARSVGPALVSGEYRSIWVYVVGPLVGAVAGAWAYNLIRFTNKPLREITKSTSFLKSMSTNRMNSAAA

SEQ ID NO: 2097 - DNA, 1170 bp, Sorghum bicolor
atgcttcaccaccaccacagcagcttcgtcctcaccacggaaatggtgatgaagggagtaggagcgggaggaagtgggggtgacggcgcatgggctagggcaggtgacggaaacgggaaggagaacgggaacgggaaggcggcggtgcgggagctgccgtggcgtgagcgagagaacaaccggcgccgggagcgccgtcgccggttgatcgcggcgaggatcttcaccgggctgcgcaaatacggcaactacgccctccccaggaaatgcgacaacaacatggtgctcaaggcgctctgcgaggaggccggctggaccgtcgaggccgacggcaccacctaccgcaagggacccaagcctccggcaggtgatgatcagcatatggccgacgttgtcgggtcgtctgctgcggtgaacccaccaggcgcaggcggagcttcctacagcctgaaccgggcgtggtcaccctccggcggcatcacgctcggcggcgggggcagcggcggcgcagccgaccccattccggcgtggctcaagaacctgtccaaacagctcggcgacaactcgtaccccaacttcttcgcgagctcctccaactccaaggcgccggcgatgccgcaggacggctcccggccctcgtccccgccgcgcctccacaagaaggtgcgctactactcctccccgccacccgccaccccgccgccgagcccggcgagggcccccaacaacgtgctgccgcctccgtgggccacgggtgctggcgccagccgctactccttccagacctccaccgcgccgctgatgagcaccgtcgtcggccggcccctcggccccgacccgccggtgacgaccctgctggcggggttccacttatcaaccggcgcggccaacaagggaccggcctacagcagcttcgtggcgtccggcgcgacgtcgctcggcgccaggagctctgcttctgcctggatgctcccgccgctgccgggacgcagcagcagcggggcgtcggcggtggtccgtggccgcggtggcaagcttttgtcaccgctcgggttctcgttccacaggagcggcggggaggaggaggtgatgaacgacaagaacaccgacgaggaggagggcctggagctcaccctggggaacacggagacccgcaaggaccgcgcttga

SEQ ID NO: 2098 - protein, 389 aa, Sorghum bicolor
MLHHHHSSFVLTTEMVMKGVGAGGSGGDGAWARAGDGNGKENGNGKAAVRELPWRERENNRRRERRRRLIAARIFTGLRKYGNYALPRKCDNNMVLKALCEEAGWTVEADGTTYRKGPKPPAGDDQHMADVVGSSAAVNPPGAGGASYSLNRAWSPSGGITLGGGGSGGAADPIPAWLKNLSKQLGDNSYPNFFASSSNSKAPAMPQDGSRPSSPPRLHKKVRYYSSPPPATPPPSPARAPNNVLPPPWATGAGASRYSFQTSTAPLMSTVVGRPLGPDPPVTTLLAGFHLSTGAANKGPAYSSFVASGATSLGARSSASAWMLPPLPGRSSSGASAVVRGRGGKLLSPLGFSFHRSGGEEEVMNDKNTDEEEGLELTLGNTETRKDRA

SEQ ID NO: 2099 - DNA, 1287 bp, Sorghum bicolor; identical to SEQ ID NO: 191

SEQ ID NO: 2100 - protein, 428 aa, Sorghum bicolor; identical to SEQ ID NO: 192

SEQ ID NO: 2101 - DNA, 657 bp, Sorghum bicolor
atggagctctccgccgccttcgaggagcgcgtccggcagatggaggacgcccgcaaccaccgcctcgccctcctcaacgccgagaaggagatccaggccgccaagctccgcatcctctccgccaagctcgccgccacgcgccggctcgagtgccgccgccttctcctcgagcgccgcgcagccgacctcgcctcccgcgccctcgccgcccgcgccggcatcgacgccgcacgcgcgcgccgccgcctcgtcgcccgcgacctcagctcgatgaggggcgagatcgaggaggccgagaggagggagcaggactgggaccgcttctacgaggccaagaggaaggagatggaggagttccaggcggagtcgcggcggttcgaggcgcagactcgcgaggaagtgcagaggctgagggattcggtatctcaactgaaatctacactgcaagagctgcagagcagcgcgatgtactcaaacaacacggagattgctgcggcagaagctaggaagtctgatctgattgctaagaaggcaaagctgggcgagagcctggtttcagcccgccagttcagagcgctacttcagcagcagctccagaaagcttttcagtcacaggtggacaatggggatcaggaaacagctcaagctaccatttga

SEQ ID NO: 2102 - protein, 218 aa, Sorghum bicolor
MELSAAFEERVRQMEDARNHRLALLNAEKEIQAAKLRILSAKLAATRRLECRRLLLERRAADLASRALAARAGIDAARARRRLVARDLSSMRGEIEEAERREQDWDRFYEAKRKEMEEFQAESRRFEAQTREEVQRLRDSVSQLKSTLQELQSSAMYSNNTEIAAAEARKSDLIAKKAKLGESLVSARQFRALLQQQLQKAFQSQVDNGDQETAQATI

SEQ ID NO: 2103 - DNA, 1146 bp, Sorghum bicolor
atgggaggaaggggcgcgatgctcgccgtgttggcggtggtgcttcttgcggcggccggcggcggcgccgcggcggaatcgagtgaggcgtcggccaaggggatgtaccacgcgctcttcaactttggggactcgcttgccgatgccggcaacctcatccagaacggcaccccggagatcctggccaccgcgcgcctgccctacggccagacctacttcggcaagcccaccggccgctgctccgacggacgcctcgtcatcgaccacctcgcgcaagagtttggcctgccgctgctgccgccgtccaaggccaagaacgccagcttcgcgcacggcgccaacttcgccatcaccggcgccaccgcgctcgacacgccctacttcgaggccaaggggctcggtgccgtcatctggaactccggagcgctcatgacccaaatccagtggtttcgtgatctcaagcctttcttctgcaacacaacggaggcatgcaagaaattctttgccaaggcactgtttgtggtcggtgagtttggcggcaacgactacaacgcgcccctctttgccggcatgggcatcccagaggcctacaagttcatgccggatgtcatccagggcatctctgacggtatcgaggcactgattgctgagggggctgtggacatgattgtgcctggtgtcatgcccacaggctgcttcccagtgtacttgaacatgcttgatgtgcccgaagagggaaagggctcccgcagtgggtgtgtccgccagtacaacacgttctcctgggtgcacaatgcacatctcaaggccatgcttaagaagctccgggctaagcaccccaatgtgaggatcatatatggcgactactacactccagttatccagttcatgcttcagcctgaaaagtttggttttgccaaacaactgcctagggcatgttgtggggctccatctactcctgagagagcagcttacaacttcaatgtcacggccaaatgtggcgagcccggtgcaactgcctgtcctgatccgacaacccattggagctgggatggcattcacctgacggaggctgcttaccgccatattgccaaaggctggttatatgggcctttcgcggaccaaccaatcatccaatcttcatga

SEQ ID NO: 2104 - protein, 381 aa, Sorghum bicolor
MGGRGAMLAVLAVVLLAAAGGGAAAESSEASAKGMYHALFNFGDSLADAGNLIQNGTPEILATARLPYGQTYFGKPTGRCSDGRLVIDHLAQEFGLPLLPPSKAKNASFAHGANFAITGATALDTPYFEAKGLGAVIWNSGALMTQIQWFRDLKPFFCNTTEACKKFFAKALFVVGEFGGNDYNAPLFAGMGIPEAYKFMPDVIQGISDGIEALIAEGAVDMIVPGVMPTGCFPVYLNMLDVPEEGKGSRSGCVRQYNTFSWVHNAHLKAMLKKLRAKHPNVRIIYGDYYTPVIQFMLQPEKFGFAKQLPRACCGAPSTPERAAYNFNVTAKCGEPGATACPDPTTHWSWDGIHLTEAAYRHIAKGWLYGPFADQPIIQSS

SEQ ID NO: 2105 - DNA, 813 bp, Sorghum bicolor
atgcggtgggacgcggcggaggcggaggcggcgctcgagcggatctgggacctccacgaccgcctcagtgacgccatcctcgccgcctcccgcgcgcacctcctcctgcccgctcccccgccccctcccgtgccgtccgcgccctccgccaaagggccggcctaccgcgtcggcggcggcaggaacggctgcgtcttcgtcaagggcggcggcggcggaggcgaggcgctggccgccgccgcggaggccattgccgaggccaggagcctgcacgccatccgctccgcgctcgaggacgtcgaggaccacctcgagtttttacacactgttcaatcacaacagcgggcggagcgagatgctgcaattgctagactggagcaaagccgtctagtacttgctatgaggttagcagaacatcaaggaaagaagtatagggtcatcgatgaggccttggcatttgttggtgaagtgagtgacaagagtcaatttatctcacctgaagatgttcgtgctacccatagccagtcagaggataacaggggcaatggttcaaggattatgtcaaatgtgttatcttgcagtttgtcattagccaagaattcatttcgattggacaagattggcggtgctctcggtaacgccgcagtgtttgcagtaagtatgcttgctttcttgcagctgcatcaaattacatttggaagtaaagcaccagccatggaatacaggaagagaatcgagtacaatttccaatcaggaagctcacaacctaccgggaaaggaaaacttctggaggtttacctagctagaggctga

SEQ ID NO: 2106 - protein, 270 aa, Sorghum bicolor
MRWDAAEAEAALERIWDLHDRLSDAILAASRAHLLLPAPPPPPVPSAPSAKGPAYRVGGGRNGCVFVKGGGGGGEALAAAAEAIAEARSLHAIRSALEDVEDHLEFLHTVQSQQRAERDAAIARLEQSRLVLAMRLAEHQGKKYRVIDEALAFVGEVSDKSQFISPEDVRATHSQSEDNRGNGSRIMSNVLSCSLSLAKNSFRLDKIGGALGNAAVFAVSMLAFLQLHQITFGSKAPAMEYRKRIEYNFQSGSSQPTGKGKLLEVYLARG

SEQ ID NO: 2107 - DNA, 882 bp, Sorghum bicolor
atgctctctgcgctcctcggcggctacctgaccgcctacccgccgccgcctctcccacccgcaacagcagcagcaccaagcccgagcgcgcgtctcccggctcccttccctgctcgcctcaggcacgcgtccctccacgtcgcccgacggcgcgcggcgggggcgggggaggcgctgagcgcgtcaaccgcctcggagggcgacgacgagtacgaagcggcggcggcgctgcaggaggaagggttcccgagctggacgggcggcggcgaggaggaggaggaggactacgaccacgaccccgaaatcggagacattatgggggactatttcgacgaccccaagaaggcccaaacccgcatggaggataggataagaaagaagcgccacaagatcgtgcaaaccaagaccggctcgcccaaccccatgaaggtcgtcttcaacaaatttgacttctccaattcatatatatggttcgagttctacaatgctctgttgccaaaagatgttaccttaatttctgattctctgcgatcgtggcatatagttggccgtcttggtggctgcaattctatgaatatgcagttatcgcagttgcctttagattgtaaaaggccaacttatgatgctcttgaaggagctaacgtcactccgacgtccttttacaacattggtgatcttgagattcaagataatctagcacgagtatgggtagacattggcattcatgagccattgcttttggacatcctgcttaatgccttaacaacgataagttcagatcatgttggtattaagcaagtacagtttggagggttagagtttttgaactggagtgaggacttgaaaacagaagaagttggatatagtgtgtgcaaaatctaa

SEQ ID NO: 2108 - protein, 293 aa, Sorghum bicolor
MLSALLGGYLTAYPPPPLPPATAAAPSPSARLPAPFPARLRHASLHVARRRAAGAGEALSASTASEGDDEYEAAAALQEEGFPSWTGGGEEEEEDYDHDPEIGDIMGDYFDDPKKAQTRMEDRIRKKRHKIVQTKTGSPNPMKVVFNKFDFSNSYIWFEFYNALLPKDVTLISDSLRSWHIVGRLGGCNSMNMQLSQLPLDCKRPTYDALEGANVTPTSFYNIGDLEIQDNLARVWVDIGIHEPLLLDILLNALTTISSDHVGIKQVQFGGLEFLNWSEDLKTEEVGYSVCKI

SEQ ID NO: 2109 - DNA, 585 bp, Sorghum bicolor
atggcggccgccaagtggagcgagacggccatgctcgtcatcgacatgcagaaggacttcgttgacccggcgatgcgcagcccgatgctggtggccggcggcgaggccgtcgtccctgccgttgccgaggccgtcgccgtcgcaagggagcgcggcattttcctcgtctgggttgtcagagagcatgatccttctggaagagatgttgaacttttccgcaggcagcattactctgggggaaagggtccaacagtgaaaggtctgaaaggagcggagctggctgatgggcttgttattaaagaaggggaatacaagttagtgaagactagatttagtgctttctttgcgacgcaccttgattctgtcctgaaaactgcaggaataaagaacttggttattgttggagttcaaacaccaaattgcattcggcagactgtctttgatgctgtagcattggactatgagaaagttacagttcttattgatgcaacagctgctgcaagaccagaaatccatttgtcaaatatcagggatatgaagaacatcggagtggatacgccaaccgtggaagaatggcgccgctag

SEQ ID NO: 2110 - protein, 194 aa, Sorghum bicolor
MAAAKWSETAMLVIDMQKDFVDPAMRSPMLVAGGEAVVPAVAEAVAVARERGIFLVWVVREHDPSGRDVELFRRQHYSGGKGPTVKGLKGAELADGLVIKEGEYKLVKTRFSAFFATHLDSVLKTAGIKNLVIVGVQTPNCIRQTVFDAVALDYEKVTVLIDATAAARPEIHLSNIRDMKNIGVDTPTVEEWRR

SEQ ID NO: 2111 - DNA, 873 bp, Sorghum bicolor
atggtgaggttgagggctctcctccttgttgctgtggccgctgcggtggccggccttgccgctgccaatttccgggatgactgcgacatcccctgggagccccagaacgccaagtttaccagcgacggcaacggcctctcgatgtcgctggtcagcaactcctcaggctgcatgctccggacaaagaagcagtacatctacgggaccgtgtcaaccctcatccagctcgtcccaggcaactcggccggcactgtcaccacatactacgcatcctctgttggcgacaaccatgacgagatcgactttgagttcctgggcaacgtgagcggccaaccatacaccttccacaccaacatctacaccaatggcgtcggcaacaaggagattcagttcaagccctggttcgaccccaccaccggctaccacaactacaccatctcatggagcccctgcatgatcgtgtggtacgttgacagcatccccatccgtgtgttccgcaactaccaggagagctacggcgtggcgtacccgacgagccggcccatgtacgcctactccagcatctgggcggcggaggattgggccacgcagggcggccgcgtcaagacggactggtccaaggcgcccttcgtcgccaactaccagaacatccacctcgacgtctgtgagtgcggcggcggcggcggcggctgcagtatcaactgcccggcagcggctgcgaagccgaacaacggggcgtgccagctgagccccgaccagcgggagctgatgcagagccggcagagaaactacaccatctacgactactgcgtcgactccaagaggtggaccaacggcatcaagccaaccgagtgcagcctgccacaatactga

SEQ ID NO: 2112 - protein, 290 aa, Sorghum bicolor
MVRLRALLLVAVAAAVAGLAAANFRDDCDIPWEPQNAKFTSDGNGLSMSLVSNSSGCMLRTKKQYIYGTVSTLIQLVPGNSAGTVTTYYASSVGDNHDEIDFEFLGNVSGQPYTFHTNIYTNGVGNKEIQFKPWFDPTTGYHNYTISWSPCMIVWYVDSIPIRVFRNYQESYGVAYPTSRPMYAYSSIWAAEDWATQGGRVKTDWSKAPFVANYQNIHLDVCECGGGGGGCSINCPAAAAKPNNGACQLSPDQRELMQSRQRNYTIYDYCVDSKRWTNGIKPTECSLPQY

SEQ ID NO: 2113 - DNA, 270 bp, Sorghum bicolor
atggcggaggtctttcaacctcttggggatattgatctggtctttgggaagaacatcaagtacacaaattacaaacgagagctagatcttcacactgcaacagtcaccgtcacatatactgttggggagatagtctactcaagggaacatttctcctcaaatccacatcaagtcattgcaactaaaatctctgcaaacaaaccgggaaattgcagcaccccatccaaatataaatctgcaaatgaattactggcctgcgcttccttgtaa

SEQ ID NO: 2114 - protein, 89 aa, Sorghum bicolor
MAEVFQPLGDIDLVFGKNIKYTNYKRELDLHTATVTVTYTVGEIVYSREHFSSNPHQVIATKISANKPGNCSTPSKYKSANELLACASL

SEQ ID NO: 2115 - DNA, 1872 bp, Sorghum bicolor
atggggtggagtgtaatggaggtccggccggagtgggatctaggcaagatgagggagctgcgcttcgttgtgttggttctggtgatatccttgccgtgcttctctgcatccgatcgccaaggagatgctttatatgatatgaaacaaaaactgaacgttactggcggtcagctttcagattggaaccaaaatcaagttaacccttgcacatggaattctgttatttgtgacaacaacaacaatgttgttcaagtaactttggctgcacgaggattcacgggtgttctgtcaccaagaattggagaactccaatatttgagtgtcctgtcattggctggtaacaggattaccggtactgtaccagaggagtttggtaatctatctagcttgacaagcttagatttagaggacaatcttttagttggagaagtaccagcttctcttggcaacctttctaagctaacgctgttgatactgagtaaaaataatttcaatgggtcaattcctgatagcatagcgaacatttcaagcttgacagacatccgcctggcatataataatttgtccggtcagatacctggttcgctgtttcaagtagcacgttacaacttttctggtaatcacttaaactgtggacccaacttcccgcattcttgtgcatccagcatgtcctatcagagtggatcccatagctcaaaaattggcttaatacttggaacagttggtggaattttagggcttcttatcgtgggagctctgtttctaatctgtaatgcaaggaggaaaagccacctgcgggaagtttttgtggatgtagcaggcgaggacgatcgacgaattgcgtttggccagatcaaaagatttgcatggcgagaactgcagattgcgactgataatttcaatgaaagaaatgttcttggacagggaggttttggtaaagtatacaagggagttcttcctgatgcaactaagatcgctgtaaaacgattgactgactatgacagtcctggtggggaggctgccttcttgcgggaggttgagcttattagtgttgcagttcatcgcaatctcttaagattaattggcttctgcacgacacaaacagagcgcttgctggtctatccatttatgcagaatttgagtgttgcctgccgcttaagagattttaagcctggagaacccatcctagactggccttcaaggaaacgggtggctataggtacagctcgtggactggagtatctgcatgaacactgcaaccccaagatcatacaccgtgatgttaaagctgcaaatgtattacttgacgaggatttcgagcctgttgttggtgattttggcctagcaaagctcgtagatgtgcagaagacatctgtgacaacacaagtccgtggaaccatgggtcacatagcacctgagtacctgtccacagggaagtcgtccgagaggactgatgtttttggctatgggatcatgcttcttgaacttgtgacgggtcagcgggctattgacttctcacggttggaagaggaagaagatgtgctattgcttgatcatgtaaagaagctacagagagaaggggagctagactccattgtggacaagaaccttaatcagaattatgatagtgaggatcttgagatgataatacagatagcactgctctgcacgcaggcatcacctgaggaccgaccatcaatgtctgaagtggttaggatgctggaaggtgagggtttggcggagcggtgggaggagtggcagcatgtggaggtgacaaggaggcaggagtatgagcggatgcagcggaggttcgactggggagaggattctgtctacaatcaggaagcgatggagttgtctgcaggtagatga

SEQ ID NO: 2116 - protein, 623 aa, Sorghum bicolor
MGWSVMEVRPEWDLGKMRELRFVVLVLVISLPCFSASDRQGDALYDMKQKLNVTGGQLSDWNQNQVNPCTWNSVICDNNNNVVQVTLAARGFTGVLSPRIGELQYLSVLSLAGNRITGTVPEEFGNLSSLTSLDLEDNLLVGEVPASLGNLSKLTLLILSKNNFNGSIPDSIANISSLTDIRLAYNNLSGQIPGSLFQVARYNFSGNHLNCGPNFPHSCASSMSYQSGSHSSKIGLILGTVGGILGLLIVGALFLICNARRKSHLREVFVDVAGEDDRRIAFGQIKRFAWRELQIATDNFNERNVLGQGGFGKVYKGVLPDATKIAVKRLTDYDSPGGEAAFLREVELISVAVHRNLLRLIGFCTTQTERLLVYPFMQNLSVACRLRDFKPGEPILDWPSRKRVAIGTARGLEYLHEHCNPKIIHRDVKAANVLLDEDFEPVVGDFGLAKLVDVQKTSVTTQVRGTMGHIAPEYLSTGKSSERTDVFGYGIMLLELVTGQRAIDFSRLEEEEDVLLLDHVKKLQREGELDSIVDKNLNQNYDSEDLEMIIQIALLCTQASPEDRPSMSEVVRMLEGEGLAERWEEWQHVEVTRRQEYERMQRRFDWGEDSVYNQEAMELSAGR

SEQ ID NO: 2117 - DNA, 813 bp, Sorghum bicolor
atgtccatatttggtgcaatatttgaattcaatcctccttcaagtgaagaagcttctgttgcaaatgctccaagatttgtcatcgctttcagaggcaccataacagagaaggatactatctccagggatatttccctggacctgcaccttgttcaaaatggtctccataggacctcgagatttaatatcgcaatgcaagctgttcaaaacgtagcctcagttttccctggatccacgatttggctagctgggcattcactaggtgcaggcatggccatccttacgggaagaaacatggttaagaagggtgtgtttttagaaagctttctcttcaacccaccatttgttgctgctccaattgaaaggatcagggatgaaagggtaaagcacggttttcgtattgcaagaagtgtaattactgctggattaactattgccatgaaagctaaaactgagggtaacagtcagagatctgttggtgaagaatctttcagcattttgtcatcatggacaccatatctattcgttaatccaggagaccacatctgttcagagtacattgggtacttccagcaccggaagaacatggaagatcttggtgctggatttattgagaagcttgcgacccagaattcaattggagacctgttcttcaaggcattaggatgggaatcagaaccactgcaccttcttccatctgctgatttaatcgtcaacgtgagcccttcatctgatttcaaatacgctcatggcatcagccagtggtggcaacctgagctgaatttgcagagcagtaaatatcggtactcatag

SEQ ID NO: 2118 - protein, 270 aa, Sorghum bicolor
MSIFGAIFEFNPPSSEEASVANAPRFVIAFRGTITEKDTISRDISLDLHLVQNGLHRTSRFNIAMQAVQNVASVFPGSTIWLAGHSLGAGMAILTGRNMVKKGVFLESFLFNPPFVAAPIERIRDERVKHGFRIARSVITAGLTIAMKAKTEGNSQRSVGEESFSILSSWTPYLFVNPGDHICSEYIGYFQHRKNMEDLGAGFIEKLATQNSIGDLFFKALGWESEPLHLLPSADLIVNVSPSSDFKYAHGISQWWQPELNLQSSKYRYS

SEQ ID NO: 2119 - DNA, 246 bp, Sorghum bicolor
atggcactgtgtcgccgcatggccgcaccattcttcctcgtccttctcatcatcgtcgcggcagagacagcgacggccagggtggtcgtggaggagaagcactgcctgtcgcaaagccactcgttcagtggcatgtgcttcagccacaccaactgcgacaacgtatgcaagacggagaagttcacaggcggcaagtgcaagatggacggcacctcgcgcaagtgcttctgcttaaaattctgctag

SEQ ID NO: 2120 - protein, 81 aa, Sorghum bicolor
MALCRRMAAPFFLVLLIIVAAETATARVVVEEKHCLSQSHSFSGMCFSHTNCDNVCKTEKFTGGKCKMDGTSRKCFCLKFC

SEQ ID NO: 2121 - DNA, 759 bp, Sorghum bicolor
atggtctccaaggataccatccgtacggctatcggcgtcatcggcaatgggaccgcccttgtgctcttcctctccccggtgcccaccttcgtcggcatctggaagaagcgtgcagtggagcagtactcgccgatcccgtacgtggcgacgctgcttaactgcatgatgtgggtggtgtacggcttgccggtggtgcacccgcacagcatgctggtggtcaccatcaacggcaccggcatgctcatccagctctcctacgtcgtcctcttcatcctctgctccacgggggcggtgcgccgcaaggtcgtcctcctgttcgccgccgaggtcgcctttgtcgtcgccctggccgcgttagtgctcagcctggcgcatacgcacgagcgtaggtccatggtcgtcggcatcgtctccgtcttctttggcaccggcatgtacgccgcgccgctctctgtcatgaaaatggtgatcgagacaaagagcgtggaatacatgccgctgttcctgtccctggcctccctcgcgaatagcatttgctggactgcctacgcgctcatccgctttgatgtctatatcaccatccccaacgggctgggcgtgttgttcgcgctgggtcagctggtcctgtacgccatgttctacaagaacacccagcagatcatcgaggcacgcaagcgcaaggctgaccaccagcagggaaccgtgatggaggtggtcaccgacgccacgccccccaacaacaacggcaacacctactga

SEQ ID NO: 2122 - protein, 252 aa, Sorghum bicolor
MVSKDTIRTAIGVIGNGTALVLFLSPVPTFVGIWKKRAVEQYSPIPYVATLLNCMMWVVYGLPVVHPHSMLVVTINGTGMLIQLSYVVLFILCSTGAVRRKVVLLFAAEVAFVVALAALVLSLAHTHERRSMVVGIVSVFFGTGMYAAPLSVMKMVIETKSVEYMPLFLSLASLANSICWTAYALIRFDVYITIPNGLGVLFALGQLVLYAMFYKNTQQIIEARKRKADHQQGTVMEVVTDATPPNNNGNTY

SEQ ID NO: 2123 - DNA, 687 bp, Sorghum bicolor
atggctcccaagatcctagtgatccttctcctcctggccgcagcctcgccggcagctttggctgcattcgacgtgatcgagatgctggccgacaagcccaggtacgccacgttctcgaagctcctgcagcaaacaaaggtcgcgggagaggcgaaccagctccgggcagcgacgctgctggtggtccccgacaaattggtcaagtccctggcgtcgctgcccaatgataagcttcagccggcggtcgcgaaccacgttcttctcagttacttcgaccccatcaagctggacgagatgaagacacgcacagccatcctccccacgctgctttccaacaccgacaagaaactcggcgtccttaactacaccagggccgacgacgggcagatgtactttggcgcgcccggcgcctcctgcgtggccaagctcgtcaaggtcgtcgcagcgcgcccttactccgtgtctattatggaggtcagcgagcccattttgccggctgggttcgtgacctctacagccgcggcgccggggcgccgcggaaagggtggtaggggcaagatcaagccatcagcggcggggcttgaggattccaagatggtcgcccgcatgcccggcgaaggagtgtcgggtaaagtgtcgtctaaggataccgtgaccaagtcatctgctccaagccccgcaccttaa

SEQ ID NO: 2124 - protein, 228 aa, Sorghum bicolor
MAPKILVILLLLAAASPAALAAFDVIEMLADKPRYATFSKLLQQTKVAGEANQLRAATLLVVPDKLVKSLASLPNDKLQPAVANHVLLSYFDPIKLDEMKTRTAILPTLLSNTDKKLGVLNYTRADDGQMYFGAPGASCVAKLVKVVAARPYSVSIMEVSEPILPAGFVTSTAAAPGRRGKGGRGKIKPSAAGLEDSKMVARMPGEGVSGKVSSKDTVTKSSAPSPAP

SEQ ID NO: 2125 - DNA, 1680 bp, Sorghum bicolor
atggccgcaccaccggaggggaacgcccgcttcggcgaggggacggccgacgtgctggagccgcagccgctggaggtcatagcgccggaggtcaaggccaagaaacgcaacccggcgcccggagtccgggttgttggtcgccggatctacgatccagagaatggcaagacctgccaccagtgccgccagaagacaacggacttcgcagcggcgtgcaagcaagtcaagaagaagggtccgtgcccaatcaagtactgccgcaagtgcctccttaacaggtacggcgagagtgccgaggaggcggccagcaaggaggactggatctgccctaagtgcaggggcatctgtaactgcagcttctgtagaaagaagaaaggcgagatgccaactgggataatggcccacatcgccaaggcttctgggtgcacctctgtccatgatctccttgagaaggggtcagatgtggtggctgctgcgcaagcgatactcaaggttaatgctagtgacaagcagggcacaaagagatcccaagggacagatgctgctgatgaggtggccactgaaaaggatgtaaatataggcattgatctcaatacagttccagcagatgaaggggatgaaaatataggtgttgatctcaactcacttccttctgttcatatcaagaaaagacagaagcttaagcacagggcaaagaaggatcctgctgatgaaacgtcacatggtggagtcaatagtgaaccattgcagatggatgagaaccctgattcgctcaatagtaacactgtgctacccaggggtaccccagtcacaaacattgcaggtgcacaacttgacgatgaggatgttggggctgcaattcagtttctagaattctgccgtgcatttacagagatttttcaaataaagaaagggcaaccagaaagaattcttcaagatttagttggaggccgtgaacttcggttggtgtcctcagttgttgctgggtttcacataaatttgttatctgtcattcgagaaggaagggggaaaaagcctctggcttatacaagagatagggatgcatgggtaattgatgttggcaaatatataagtgaatccgcatttatatcaaaaggatttcctctcaactatatcaatcaggggatatcaggatataaaaacttgagcccttcttgtaagctgcgtgttctgaattttctttgtgatgagaccctctctactgacaagctgaggaactggattgacatgcaaaatgacatagctgctgaaccaatgaatgctgctagagaaaaagctcgtgctgcaaaagaaatggaaaaggagctaaaggaaaggctaaaggacaacgtggataaaacaatgctttcaccaaatgaagcagcagcctttagcagtgaagaaaataagtatcttctttcccaaataaaggaggcacaggaagccaagcgtgcagccataaatggtatggcaactatggagaagcaaggaggtctttggaccaagcctctgatggtagagaaaggagtagcatattggaagctagatggttactgtgaaaactcagcaatattgcttcaagagtatggtgatgatgaattaatggcaaataaagacaagtggtttatgtttactgaagacgaagagaaagtaattgaagaacatgtagccacagggtaa

SEQ ID NO: 2126 - protein, 559 aa, Sorghum bicolor
MAAPPEGNARFGEGTADVLEPQPLEVIAPEVKAKKRNPAPGVRVVGRRIYDPENGKTCHQCRQKTTDFAAACKQVKKKGPCPIKYCRKCLLNRYGESAEEAASKEDWICPKCRGICNCSFCRKKKGEMPTGIMAHIAKASGCTSVHDLLEKGSDVVAAAQAILKVNASDKQGTKRSQGTDAADEVATEKDVNIGIDLNTVPADEGDENIGVDLNSLPSVHIKKRQKLKHRAKKDPADETSHGGVNSEPLQMDENPDSLNSNTVLPRGTPVTNIAGAQLDDEDVGAAIQFLEFCRAFTEIFQIKKGQPERILQDLVGGRELRLVSSVVAGFHINLLSVIREGRGKKPLAYTRDRDAWVIDVGKYISESAFISKGFPLNYINQGISGYKNLSPSCKLRVLNFLCDETLSTDKLRNWIDMQNDIAAEPMNAAREKARAAKEMEKELKERLKDNVDKTMLSPNEAAAFSSEENKYLLSQIKEAQEAKRAAINGMATMEKQGGLWTKPLMVEKGVAYWKLDGYCENSAILLQEYGDDELMANKDKWFMFTEDEEKVIEEHVATG

SEQ ID NO: 2127 - DNA, 657 bp, Sorghum bicolor
atggtgctgtgggtcttcggctacgggtccctgatctggaaccccggcttcgacttcgacgacagaatcctcggctttatcaagggctacaagcgcacgtttaatctcgcttgcattgaccacagaggcacaccggagcatccggcgaggacctgcactcttgaaacggatgacgaggccatatgctggggaattgcatattgtgtcaagggtggcccagaaaaagagcgaaaagcaatgcagtacttggagagaagagagtgtgagtatgacctgaagatatccattgatttctacaaggaaggagatcccctgaaaccagctgtgacgggtgtcttagtttttgtgtctactccagatccaattggcaacaagtactatcttggccctgctcctttgcaggatatggcaaagcaaattgctacagccaatggccctactggctataatagggattacctgttctcaatggagaaggcattagccagcataagccacgaagatgagtcaatcatagagcttgcaaacgaggtgaggaaggtgctcaacaaaacaaaggagaccaagatcactggtgccaatgcttccctcaaatctcatgcccctcttgtgcacctgtctgcgcttccagaaggcaccgttgtggactcgagatag

SEQ ID NO: 2128 - protein, 218 aa, Sorghum bicolor
MVLWVFGYGSLIWNPGFDFDDRILGFIKGYKRTFNLACIDHRGTPEHPARTCTLETDDEAICWGIAYCVKGGPEKERKAMQYLERRECEYDLKISIDFYKEGDPLKPAVTGVLVFVSTPDPIGNKYYLGPAPLQDMAKQIATANGPTGYNRDYLFSMEKALASISHEDESIIELANEVRKVLNKTKETKITGANASLKSHAPLVHLSALPEGTVVDSR

SEQ ID NO: 2129 - DNA, 681 bp, Sorghum bicolor
atggttagcttgaggcgacgtcgactattgggtctttgttctgcttttgtttcagggaaagactcattgccagttgatcttcctaagcccattgaaaatgaaaaaactgtggaagttgtgcactccaatgtgaagccattcagtgtgcatcctctgcccttggcaaagacttctgatgtgctcacaaaatcctcaaatggttctgatgattcaaaggaagagaaaacccagtactatccaggcaaggaaatcaagcgcagaaaacgacatagaagaaagcagtacgtggatcaagagccctgcattatgaggggggtttatttcaaaaatatgaaatggcaggctgccataaaagttgacaagaaacagattcacttgggtactgttgggacacaggacgaagcagcccggctttatgatagggctgcttttatgtgtggaagggagccaaactttgagctttctgaggaagagaagcaggaactacggaagtacacctgggagggcttcttagcagtgactcgcaacacgataaccagcaaaaaacaaaggaaagttgggttgccaaggcgtagcaaggcagacctgttcatgggacagagtgatggcgatactgagatggccaatggaggcggttcatcgaattctgataatggagacgcagagacgtcggcatcttag

SEQ ID NO: 2130 - protein, 226 aa, Sorghum bicolor
MVSLRRRRLLGLCSAFVSGKDSLPVDLPKPIENEKTVEVVHSNVKPFSVHPLPLAKTSDVLTKSSNGSDDSKEEKTQYYPGKEIKRRKRHRRKQYVDQEPCIMRGVYFKNMKWQAAIKVDKKQIHLGTVGTQDEAARLYDRAAFMCGREPNFELSEEEKQELRKYTWEGFLAVTRNTITSKKQRKVGLPRRSKADLFMGQSDGDTEMANGGGSSNSDNGDAETSAS

SEQ ID NO: 2131 - DNA, 1272 bp, Sorghum bicolor
atggataagctcagtggttctgcacgtcttatgattgtttcagatcttgaccatacaatggttgatcatcatgacgaggagaacttgtccttgcttaggtttggtgccctgtgggaatctgtttactgccaggattctctacttgtcttctcgactggaagatcaccaactctttacaaggaattgaggaaagagaagcctatgctgacgccagacatcactatcatgtctgttggcaccgagataacatatggggaggcaatggttcctgatgatggctgggaagaatatctgaacaataagtgggacagaaatattgtcgtagaagaaactgtgggcttttctgagctgaagcttcagccagagacagaacagcgcccgcacaaggtcagctttttggttgataagaagagtgcccaggaagtgataaaatctgttgccgagaggttggagaaacgtgggctagatgccaaaataatatatagtggtggccaggaccttgatatattacctcaaggagctggaaagggccaagcacttgcatatttgcttaaaaagctaagctcatgtggaaaaccgcccaacaatactcttgtttgtggtgactctggtaatgatgcagaattattcagcatccctggtgtacatggtgtcatggttagcaatgcccaagaggaactacttcagtggtacacagaaaatgcgaaggataacccgaagataattcatgcaaatgagagatgcgcagctggtattatacaagctattggacacttcaagctaggacctaacatttctcctagagacatggagttcccttatgcaaaggaagcctctttcaaacctacagatgctgtagtaaagttctacgttctctatgagaagtggcgcagggctgaggttccaaagtctgattcagttataaaatacttcaaagacatcactcatgcaaatggagttatcatccatcctgctgggcttgaactctcactccatgcatccattgatgcattgggatcatgttatggtgacaaacaagggaaaaagtaccgagcatgggtggacagactttttatcacacagactggttcagatagttgggtggtgagatttgacttgtgggaatcagaaggtgatgtccgtgtgtgctctctgtcaagtcttgctttggttctaaaggctgaatcccccgagggctttgtgctaacccacatccaaaagacatggctgaatggatactcttcaggggttgagcaggcgtctaagctgtag

SEQ ID NO: 2132 - protein, 423 aa, Sorghum bicolor
MDKLSGSARLMIVSDLDHTMVDHHDEENLSLLRFGALWESVYCQDSLLVFSTGRSPTLYKELRKEKPMLTPDITIMSVGTEITYGEAMVPDDGWEEYLNNKWDRNIVVEETVGFSELKLQPETEQRPHKVSFLVDKKSAQEVIKSVAERLEKRGLDAKIIYSGGQDLDILPQGAGKGQALAYLLKKLSSCGKPPNNTLVCGDSGNDAELFSIPGVHGVMVSNAQEELLQWYTENAKDNPKIIHANERCAAGIIQAIGHFKLGPNISPRDMEFPYAKEASFKPTDAVVKFYVLYEKWRRAEVPKSDSVIKYFKDITHANGVIIHPAGLELSLHASIDALGSCYGDKQGKKYRAWVDRLFITQTGSDSWVVRFDLWESEGDVRVCSLSSLALVLKAESPEGFVLTHIQKTWLNGYSSGVEQASKL

SEQ ID NO: 2133 - DNA, 951 bp, Sorghum bicolor
atggccgctgccactgccactgccaccgccgccgccgtcgcgctcgcctccccggcggccatccgcgcatcgccggtgcgccgcggcctcgtcagcttcgcccctgcgctccgctccggccccgaccgcatctcccgcgccgtcgccctccctggtgtaagaactcatgttacggctgttgatcaagttattgtacaaggggagacaaagttggaaggtcctgtggttgttgttactggtgcttccagggggattggaaaagccactgcattggctcttggaaaagcaggctgcaaggtcttggtgaattatgcccgatcttcaaaggaggccgaagaagtctcaaaggagattgaagcatccggaggccaggccattacctttggaggagatgtttccaaagaggctgatgttgaatctatgataaaaatggctgttgatacatggggaaccattgatgtgctagtaaacaacgcaggaatcacacgggacacattgttgatgagaatgaagaaatcgcaatggcaagatgtgattgatttgaatcttacaggcgttttcctttgcacgcaggctgcaacaaaagtaatgatgaagaagaaaaagggaagaattatcaacatagcatcggttgttggtttaaccggcaatgctggacaggctaattacgctgctgccaaggctggggttattgggttcacgaaaacagttgctagggagtatgccagcagaaatattaatgcaaacgttatcgctcctggctttattgcatcagatatgactgctgaacttggagaagagctagagaagaaaattctgtcagctattcccttagggcgatatggtcggccagaggatgtagcaggtctggtggaattcttagccctcagcccagctgcaagctacatcactggacaggtcctcaccatcgatggagggatggtaatgtaa

SEQ ID NO: 2134 - protein, 316 aa, Sorghum bicolor
MAAATATATAAAVALASPAAIRASPVRRGLVSFAPALRSGPDRISRAVALPGVRTHVTAVDQVIVQGETKLEGPVVVVTGASRGIGKATALALGKAGCKVLVNYARSSKEAEEVSKEIEASGGQAITFGGDVSKEADVESMIKMAVDTWGTIDVLVNNAGITRDTLLMRMKKSQWQDVIDLNLTGVFLCTQAATKVMMKKKKGRIINIASVVGLTGNAGQANYAAAKAGVIGFTKTVAREYASRNINANVIAPGFIASDMTAELGEELEKKILSAIPLGRYGRPEDVAGLVEFLALSPAASYITGQVLTIDGGMVM

SEQ ID NO: 2135 - DNA, 1152 bp, Sorghum bicolor
atgcttgctgtgtcacaagaacatcttgctcattcacagacgtgcttccgagcaaggatgcaactcaagcctcctacaagacccaaactctattcagggctcatgccccaggaggaattcgattcatactgtgatctaataccaggcttgcctgaagacttggcaaagatatgtcttgcccttgttcctcgtactcattttcctgtcatgggtgcagtttccaagaggtggatgtcatttcttgagagcaaggaactcatagctgtgaggaaggaggttgggaaacttgaggagtgggtgtatgtcttgactccagatgctggcgcaaaggggtcgcactgggagatcctagagtgttcagggcaaaagcagagccctcttccgcgtatgcctggactaaccaaagctgggttcggtgtggttgttattggtgggaagctctttattattgctggctattccgctgaccatgggaaagattgtgtttcagatgaggtttatcaatatgattcttgccttaacaggtggactgttcttgctaagatgaatgtagctcggtgtgactttgcctgtgcagaggtcaatggggtgatatatgttgctggcggatttggtccaaatggcgagagtttatctagcgtcgaagtttatgatctagaacagaataaatggacactgattgagggcctacggagaccacggtggggctgcttcgggtgcagctttgaagggaagctctatgtcatgggtggccgttcaagcttcacaattggcaactcccgttttgttgacgtgtacaatcctaataaccatgcctgggaccaggtcaagaacggctgtgtgatggtcacggctcatgcagtcctcggcgagaagctcttctgcatcgagtggaagaaccagaggtctctagcaatcttcaacccggctgacaactcctggcagaaggtccccgtgccgcttactggtagctcaagcactcgtttttcctttggggtacatgaggacaagctgctgctcttccctctggaggaagagcctgggtatcagacgctgatgtatgatcctgcagctccgatggggtctgagtggtgcacatcgaagctgaagccatcaggttcttgcctgtgcagcgtgaccatcaaagcctga

SEQ ID NO: 2136 - protein, 383 aa, Sorghum bicolor
MLAVSQEHLAHSQTCFRARMQLKPPTRPKLYSGLMPQEEFDSYCDLIPGLPEDLAKICLALVPRTHFPVMGAVSKRWMSFLESKELIAVRKEVGKLEEWVYVLTPDAGAKGSHWEILECSGQKQSPLPRMPGLTKAGFGVVVIGGKLFIIAGYSADHGKDCVSDEVYQYDSCLNRWTVLAKMNVARCDFACAEVNGVIYVAGGFGPNGESLSSVEVYDLEQNKWTLIEGLRRPRWGCFGCSFEGKLYVMGGRSSFTIGNSRFVDVYNPNNHAWDQVKNGCVMVTAHAVLGEKLFCIEWKNQRSLAIFNPADNSWQKVPVPLTGSSSTRFSFGVHEDKLLLFPLEEEPGYQTLMYDPAAPMGSEWCTSKLKPSGSCLCSVTIKA

SEQ ID NO: 2137 - DNA, 543 bp, Sorghum bicolor
atgcagcagggcgatcagcagatgatggagtgcagcggcggcaaggagcagcagatgcagatcgtgtgcgtgcggagctcgtccacgggcggcgaggaggtggtgggggagtgggccgcggcggaggagcagtcgtcgtcgcggtcgtcggcgctgtcgctgttcaaggagaaggaggaggagatcgagcgcaagaaggtggaggtgcgggacaaggtgttctccatgctgggccgggtggaggaggagaccaagcgcctggccttcatccgccaggagctggagctcatggccgaccccacgcgccgggaggtggacgccatccgcaagcggatcgacaaggtcaacaagcacctcaagccgctcgccaagacatgcctcaaaaaggagaaggaatacaagatgtgcctcgaggcctacaacgagaagagcagcgagaaagccacgctggtcaacaggctaatggagctcgtaagcgagagcgagaggctgcggatgaagaagctcgaagaactcaacaagacgatagagtccctctactag

SEQ ID NO: 2138 - protein, 180 aa, Sorghum bicolor
MQQGDQQMMECSGGKEQQMQIVCVRSSSTGGEEVVGEWAAAEEQSSSRSSALSLFKEKEEEIERKKVEVRDKVFSMLGRVEEETKRLAFIRQELELMADPTRREVDAIRKRIDKVNKHLKPLAKTCLKKEKEYKMCLEAYNEKSSEKATLVNRLMELVSESERLRMKKLEELNKTIESLY

SEQ ID NO: 2139 - DNA, 435 bp, Sorghum bicolor
atgagccggggcagcaaaggagggagaggcgcgggtggcctggacctgaagctgcacctgtctccgccggcgccgccggcgcgtggcacagaaggggcggcggcgccgtcgctgtcctccgacgaggagtggtcgtcgtcgtcgtcgccgccgagctcgtgcctgtcgtcggagggcgagcgggagccgcatcagcggagccagagccacgggctgcagtggtcggacagccccgaggcgacgtccatggtgctggcggcgtgcccgcgctgcctcatgtacgtgatgctctccgaggccgacccgcgctgcccgcgctgccgcagccccgtcctcctcgacttcctgcaccacgccgcccgcaacagcaacgtcagccgggaggacgacggcgatcacagccgcggctgcggcgggaggaacaggagggcctga

SEQ ID NO: 2140 - protein, 144 aa, Sorghum bicolor
MSRGSKGGRGAGGLDLKLHLSPPAPPARGTEGAAAPSLSSDEEWSSSSSPPSSCLSSEGEREPHQRSQSHGLQWSDSPEATSMVLAACPRCLMYVMLSEADPRCPRCRSPVLLDFLHHAARNSNVSREDDGDHSRGCGGRNRRA

SEQ ID NO: 2141 - DNA, 99 bp, Sorghum bicolor
actgggacattatgcatcacagaactagctgcaaagttgactgaaagcttaactggaccatacctaaaatacaattctacagcttgtacaaaatttgcc

SEQ ID NO: 2142 - protein, 33 aa, Sorghum bicolor
TGTLCITELAAKLTESLTGPYLKYNSTACTKFA

SEQ ID NO: 2143 - DNA, 1095 bp, Sorghum bicolor
atggacaagtacgagctgctcaaggacatcggctccggcaacttcggggtggcgcgcctcatgcgcaacaaggacaccaaggagctcgtcgccatgaagtacatccccagggggctcaagattgacgagaatgtggcgagggagatcataaaccaccgctcgctgcggcaccccaacatcatccgattcaaggaggtcgtgctcacgcccacgcacctcgccatcgtcatggagtacgccgccggcggcgagctcttcgaccggatctgcagcgccgggaggttcagcgaggacgaggcaaggtatttcttccagcagctcatctgcggtgtcagttattgccacttcatgcaaatttgtcaccgggacttgaagctggagaacacgctgttggatggcagcccggcgccgcgcctaaagatctgcgactttggctactctaagtcatcgctgctgcactcaaagcctaaatccacggttggaactcccgcttacattgctccggaggtgctctctcgccgggaatacgacggcaagatggcagacgtttggtcttgtggagtgactctttacgtgatgctggttggtgcgtacccttttgaggaccccgatgatcccaagaatttcagaaaaacgattgggagaatagtgtcaattcagtaccagataccagagtatgtccacatatcccaagactgcagacagctcctcgctaggatctttgtcgcaaatcctgcaaagagaataacaattagggagattaggaatcacccctggttcctgaagaatttgcccagagagcttacagaagctgcacaagcgaagtactacaagaaggacaacagtgctcccaccttctctgatcaaaccgtcgaagagatcatgaagattgtagaggaggcccgcatgccgcccgaatcatctactccggtggctggttttggttgggctgaggaagaagagcaggaagatggcaagaaacctgaggatgacgagcaggatggggaggatgaggaatacgatggcgaggacgagtatgacaaacaggtgaagcaagtacatgccagcggggattttcaacacctgataaaatga

SEQ ID NO: 2144 - protein, 364 aa, Sorghum bicolor
MDKYELLKDIGSGNFGVARLMRNKDTKELVAMKYIPRGLKIDENVAREIINHRSLRHPNIIRFKEVVLTPTHLAIVMEYAAGGELFDRICSAGRFSEDEARYFFQQLICGVSYCHFMQICHRDLKLENTLLDGSPAPRLKICDFGYSKSSLLHSKPKSTVGTPAYIAPEVLSRREYDGKMADVWSCGVTLYVMLVGAYPFEDPDDPKNFRKTIGRIVSIQYQIPEYVHISQDCRQLLARIFVANPAKRITIREIRNHPWFLKNLPRELTEAAQAKYYKKDNSAPTFSDQTVEEIMKIVEEARMPPESSTPVAGFGWAEEEEQEDGKKPEDDEQDGEDEEYDGEDEYDKQVKQVHASGDFQHLIK

SEQ ID NO: 2145 - DNA, 3267 bp, Sorghum bicolor
atggcgagcgatgggcagctcagggagtgggtctcggacaagctcatgagcctcttgggctactccaagaacgttgtcgtccagtacgtcatcaggcttgcgaaggagtgctcttctaccggtgacctcgtgagcaagctcgtcgagttcgggttcacctcgtctgcggagacacgtacctttgcgtcggatgtctacgccaaggttccccgtagggccagcggcatcagtaattaccaaaagcaggagagggaggcggcaaagcttgtccagaaacagagcacttacaagctgttggccgacgaggatgacaatactgacaaccagacaccaacaagtcaaaagacctcaacaaatccatcatctaagagtcgaaagcatttcaggaggaaagcagatcaagacagtggtgatgatgaaatagtggcaaaagattctggaaggaatgtccgtcggcgaacagaagaggaggatgaagaaggtggcgacagcagctctgatgacgagaaagaaaggattagagatcagcaggaaaaggcccagctagaaaggaacatgagagaaagagatgcagctaacacaaggaaggaataccatttagttagcaatatatcaaagttctggaaacatttctgcttctttgagctttgtctaatgaagttgtgcttttcccctcactctgccatctgcggtagcgatatatctcttgagttgaggtcattgacagaagagcttactagaagatctcaagcaatggacaagaatgacacatctgatctgagaaaattctcaaggcaagcatacctgcaaaagcgtcgggacaaaaaaattgaggaaattcgtgatgaaattctggaccaccagtacatttttcaggatgtgaaactaacagaggcagaagaaaaggagttgagttacaagatgaagttatatggtcttgtcaaagaacatgttgagactcctgatgatgttggtgagtacaaaatgcctgaagcttatgacatgggtgaaaatgtcaatcaagagaagagattctccgtggccatgcagcggtacaaagatcctgaggccaaagataaaatgaacccttttgctgaacaggaagcatgggaagaacaccaaataggaaaatcgaaactgcgatttggatccaaagataagaagacgtcttcagatgagtatcagtatgtatttgaagatacgattgattttgttaaatcatcagtcatagaaggaacccagcctgaagacgattcagataaagaggacgttgaagcaaaagatattttgaaaagggagctccaggatgagcgaaagacacttccaattttcaaatttagggatgaactgcttaaagctgtagaagagtatcaggttattgtcatagtgggtgagactgggtccggtaaaacaacacaaatacctcagtatcttcatgaggctgggtatactgcgaaaggaaaggttgcatgtactcaacctcgtcgagtggctgccatgagtgttgcagcaagagtatctcaagaaatgggtgttaaacttggacatgaggttggttactctataagatttgaggattgcacttcagataaaacaattattaagtacatgactgatggaatgcttctgagggagttccttggtgaaccagatttggctagctatagtgttgtcatggttgatgaagctcacgagcgtaccctctccactgatatcttatttggtctggtgaaggatatttctcgttttcgaccagacctgaagttgctcatttctagtgccacccttgatgcagaaaaatttagtgactacttcgattcagctcctattttcaagatacctgggaggcgatacccggttgaaattcattatacaaaagccccagaggctgattacatagatgcagcaattgtcactgttttacagatacatgtgacacaaccccctggagatatcctggtgtttctcacaggtcaggaggaaattgaaacagttgatgaaatccttaaacacagaacaaggggcttaggcaccaaaatatcagaattaattatatgtcctatttatgcaaatctacctaccgagctgcaagctaagatatttgagccaactcccgagggtgcccgtaaggtggttctggccactaatatagcagagacttcattgaccattgatggtataaaatatgttattgatccaggcttttgtaagatcaaatcatacaatccccgcactggaatggaatctctacttattaatcctatctcaaaagcttcagcaaaccagagggcaggaagatctggtcgcactggacctggaaaatgcttccgtctttacacgagttataactacatgcacgacctagaagataatactgttccggagatccaacgaaccaatcttgcgaatgttgtgcttacactcaagagtcttggtattcatgacttggttaactttgacttcatggatccacctccatcagaagccctattaagagctctggaacaactttttgctctcagtgcactcaacagtcgtggagagttaaccaagactggaagaagaatggcagaatttccactggatcctatgttgtcaaagatgattgttgcttcagagaagtacaagtgttctgacgaggtcatctccattgcatccatgttgtcaattggcaattctatattttatcgtccgaaggacaaacaagttcacgcagataatgcaaggttgaacttccacactggcaatgttggggaccatatagcactactaaatgtatttacctgctcatacttattatcctcagggttaatttcttggcctgagttcttattatctgatcagccagtaaacgtcctcttttattatttatttttcatattttctcagaaggtgcgcagcatgaagagggcaagagatattcgggatcaactagaggggcttatggaaagagttgagattgagatttgctcaaatgccagtgatttagatgctattaaaaaagctataacatcaggtttcttccatcattctgcacggttgcagagggatggtacatataagactgtcaagaaccctcagaccatacgtccgcggtgggtagtataccacgaattagttctcacaacaaaagagtttatgcgccaggtgacggaactgaagcctgaatggctggtagagatagcaccacattattaccaactaaaggacgtggaagactctggaacaaagaagctaccaaagggccaaggacgagctgcattgtag

SEQ ID NO: 2146 - protein, 1088 aa, Sorghum bicolor
MASDGQLREWVSDKLMSLLGYSKNVVVQYVIRLAKECSSTGDLVSKLVEFGFTSSAETRTFASDVYAKVPRRASGISNYQKQEREAAKLVQKQSTYKLLADEDDNTDNQTPTSQKTSTNPSSKSRKHFRRKADQDSGDDEIVAKDSGRNVRRRTEEEDEEGGDSSSDDEKERIRDQQEKAQLERNMRERDAANTRKEYHLVSNISKFWKHFCFFELCLMKLCFSPHSAICGSDISLELRSLTEELTRRSQAMDKNDTSDLRKFSRQAYLQKRRDKKIEEIRDEILDHQYIFQDVKLTEAEEKELSYKMKLYGLVKEHVETPDDVGEYKMPEAYDMGENVNQEKRFSVAMQRYKDPEAKDKMNPFAEQEAWEEHQIGKSKLRFGSKDKKTSSDEYQYVFEDTIDFVKSSVIEGTQPEDDSDKEDVEAKDILKRELQDERKTLPIFKFRDELLKAVEEYQVIVIVGETGSGKTTQIPQYLHEAGYTAKGKVACTQPRRVAAMSVAARVSQEMGVKLGHEVGYSIRFEDCTSDKTIIKYMTDGMLLREFLGEPDLASYSVVMVDEAHERTLSTDILFGLVKDISRFRPDLKLLISSATLDAEKFSDYFDSAPIFKIPGRRYPVEIHYTKAPEADYIDAAIVTVLQIHVTQPPGDILVFLTGQEEIETVDEILKHRTRGLGTKISELIICPIYANLPTELQAKIFEPTPEGARKVVLATNIAETSLTIDGIKYVIDPGFCKIKSYNPRTGMESLLINPISKASANQRAGRSGRTGPGKCFRLYTSYNYMHDLEDNTVPEIQRTNLANVVLTLKSLGIHDLVNFDFMDPPPSEALLRALEQLFALSALNSRGELTKTGRRMAEFPLDPMLSKMIVASEKYKCSDEVISIASMLSIGNSIFYRPKDKQVHADNARLNFHTGNVGDHIALLNVFTCSYLLSSGLISWPEFLLSDQPVNVLFYYLFFIFSQKVRSMKRARDIRDQLEGLMERVEIEICSNASDLDAIKKAITSGFFHHSARLQRDGTYKTVKNPQTIRPRWVVYHELVLTTKEFMRQVTELKPEWLVEIAPHYYQLKDVEDSGTKKLPKGQGRAAL

SEQ ID NO: 2147 - DNA, 1077 bp, Sorghum bicolor
atgaactcagactacaccaccaccagctggccgccgcaccgcaagaaccaagccttgtctcggcccaaggcgatgccgtccaagtgggacgacgcgcagaaatggctggtgggcatgtcgaacggcggcggccgcgcggacggaggaacccacggcggcggcggcgccagggtgaagcccaggaactcgaacgccgacgatcggcgcctcctcggctcgtcctcgcagaacggccgtgtgtcctgcagcagcgtggacggcgccttggagtacaacagcatggtggtggccgcgcccgcgccctcgacgccgccgcggcagaccggcggcgagggcgacgacgacgacgtggaggagaccaagaagatcgactgcatggtgcagcagcagcatgggcatgggcatgggcatggctcgccgcacaaggcggtggtgatgaggtccgtgtgcctgcgggacatggggacagagatgacccccatcgccagcaaggagccgtccaggacggccacgccgctgcgtgcctccacgcctgttgcccggagcccaatatcatcgaggtcgtccaccccagcgagaagacgccaggaagggcccgtgggcgtgaccaccgccgccattgtagggacgacgaccgagcaggtagcggcagcaggcgaggtcggctgtgtcggcgaggagcgcaccgtggttggtcatggtcatgcccccagcgtgaactcgctggagtcccgcgcggcagcctgggatgaggctgaacgggccaagttcatggcgaggtataaacgtgaagaggtaaagatacaggcatgggagaaccatgagaagagaaaagctgagacgaagatgaagaaaatgcagatgaaggccgatcagatgaaatcacgggctcaagagaagctgtccagccggctggcgacgacgcatcggatggccgaggagaagcgggcgagcgccgaggcgaagctcaatgagcgtgcggcgaggacatcggagaaggccaactacatcaggaggacagggcacctgccgtcgtccttcaagatctcttgcttgtgcggctcaagctttgagtga

SEQ ID NO: 2148 - protein, 358 aa, Sorghum bicolor
MNSDYTTTSWPPHRKNQALSRPKAMPSKWDDAQKWLVGMSNGGGRADGGTHGGGGARVKPRNSNADDRRLLGSSSQNGRVSCSSVDGALEYNSMVVAAPAPSTPPRQTGGEGDDDDVEETKKIDCMVQQQHGHGHGHGSPHKAVVMRSVCLRDMGTEMTPIASKEPSRTATPLRASTPVARSPISSRSSTPARRRQEGPVGVTTAAIVGTTTEQVAAAGEVGCVGEERTVVGHGHAPSVNSLESRAAAWDEAERAKFMARYKREEVKIQAWENHEKRKAETKMKKMQMKADQMKSRAQEKLSSRLATTHRMAEEKRASAEAKLNERAARTSEKANYIRRTGHLPSSFKISCLCGSSFE

SEQ ID NO: 2149 - DNA, 1173 bp, Sorghum bicolor
atggaggaggaagcccatggcatcgttattgtcggcagtggtatctgcggccttgccactgctcttgcccttcacaggaaagggattgctagtctggtgctggagaaatctgagaccttacgatcagatggagctgcaattggtatccatgccaacggatggagagttctggagcaacttggagtggctgcagagcttaggaaaactgccaatctcgtcaccgcgtatcataacgtgtggcagcaaaagaacaagaagactagccggttattaccaatcaggaacgaactccgatgcttgaaaaggaaggatctcatcgagacaatggccaagaatttaccttcaggagcaatccgctacggctgccacgtggttgcaatccaccaagatactggtacccatggagctattcttactacggtcgatggttgcattatcaaggctaaggtcctgattggatgtgatggtgcaaattcggtggtagccaaatacctaggactgtctgcgcccataacaaaccatcacacggtttttcgtggtttcactagatatccgcatggacatccatttagtactgagtttctgcgaataagaggagaggagttctttgtcggcagaattccagtaaccgacaatctagttcatttcttgatagtcacgcctattcctccaacaggaaggatcacctatgatgtgatcgccgcgaaggattccgtgatagagaagctacaagctcaagattgcccttctgatatcattgagatgttgcggaactctgatccggagaccctgaatgtcgtgaacaatatctggtaccgccctccctggcaggtcgcgtttggcaccttccataagggtatcgtgacagtcgcaggtgatgcaatgcacgtcgtgggcccgttcatcggccagggcggcgcatcggggctcgaggatgccattgtgcttgcacgatcgctgtcacgagccgccgccggtgactatagtgtcgcgattaaggagtatgtccgagagaggaggctaagggtgtcattagtgtctctggagtcctttgtctttggtatgctagggagtgccaagtcgcgggtgacaatgcttgtctgcattgttgtcttagcactcctaggcaatcggtcgcttaggcatgccgactttgattgcggtcgcctctag

SEQ ID NO: 2150 - protein, 390 aa, Sorghum bicolor
MEEEAHGIVIVGSGICGLATALALHRKGIASLVLEKSETLRSDGAAIGIHANGWRVLEQLGVAAELRKTANLVTAYHNVWQQKNKKTSRLLPIRNELRCLKRKDLIETMAKNLPSGAIRYGCHVVAIHQDTGTHGAILTTVDGCIIKAKVLIGCDGANSVVAKYLGLSAPITNHHTVFRGFTRYPHGHPFSTEFLRIRGEEFFVGRIPVTDNLVHFLIVTPIPPTGRITYDVIAAKDSVIEKLQAQDCPSDIIEMLRNSDPETLNVVNNIWYRPPWQVAFGTFHKGIVTVAGDAMHVVGPFIGQGGASGLEDAIVLARSLSRAAAGDYSVAIKEYVRERRLRVSLVSLESFVFGMLGSAKSRVTMLVCIVVLALLGNRSLRHADFDCGRL

SEQ ID NO: 2151 - DNA, 1230 bp, Sorghum bicolor
atggcggaggcggcggaggcccatagcatcgtcatcgccggcggcggcatctgcggccttgccaccgctcttgctcttcaccggaaagggattgctagtctcgtgttggagaagtctaggagcctgcgagcagatggcgcgggcatcggcgtccacgccaacggatggcgtgtcctggagcagcttggcgtcgctgcagacctcagggacactgcccatcttatcaccgtgtatcatgacgtgtggaagcagggagacaaaattagccgagaaaaggttccagtaaggacggagctccgatgcttaaacagaaaggatctgatcgaggcactggccaaggacatacctgcagggacgatccgcttcggctgccgcatcgctgccgtcgacgcggatcctgccggcggccatggcgccgtcctgacaatggcggatggtactaccattaaggccaaggtcctgatcgggtgcgagggcacctactccgtggtggcaaagtacctcgggctgtctccggtgagaaccatcccacgcccagtgctccggggtttcacatggtatccgcatggccattctttcgacaacgagttcctgcgcctgagagttggagatttcttcatcggccggttaacaatcacggacaatctggtccatttcttcataacaatgcccaaacctcccacagatgtcagcaccaaggacctgaagcaagtgagggatcacgcgctgaaggagatgagagacgtccaatgccccgccgagatcatcgacatcgtccgcgactcggacccggagtcgctcaacttcgtcacggagttctggtaccgtccgccgtgggaggtcgtcctcggcagcttccagaagggcaccgtgacggtcgccggcgacgccatgcacgccatgggcccgttcatcggccagggcggctcggcggggctggaggacgccgtcgtgcttgcgcggtcgctggctcgggccgtgggcgacgctgacggtgttgggaaaggcgccgccccggcgcggcgcgagaagatggtcggcgaggcgatcggggagtacatcagggagaggaggccgcgggtggcgctgctgtccctcgagtcctttatcatggggacgctgctggtgcgctcgccgtctccggtcaccaagctggcctgcgtcgccgtgctcgttctcttaggcagcaagtcgcttcggcatgcttactatgactgcggtcgcctctag

SEQ ID NO: 2152 - protein, 409 aa, Sorghum bicolor
MAEAAEAHSIVIAGGGICGLATALALHRKGIASLVLEKSRSLRADGAGIGVHANGWRVLEQLGVAADLRDTAHLITVYHDVWKQGDKISREKVPVRTELRCLNRKDLIEALAKDIPAGTIRFGCRIAAVDADPAGGHGAVLTMADGTTIKAKVLIGCEGTYSVVAKYLGLSPVRTIPRPVLRGFTWYPHGHSFDNEFLRLRVGDFFIGRLTITDNLVHFFITMPKPPTDVSTKDLKQVRDHALKEMRDVQCPAEIIDIVRDSDPESLNFVTEFWYRPPWEVVLGSFQKGTVTVAGDAMHAMGPFIGQGGSAGLEDAVVLARSLARAVGDADGVGKGAAPARREKMVGEAIGEYIRERRPRVALLSLESFIMGTLLVRSPSPVTKLACVAVLVLLGSKSLRHAYYDCGRL

SEQ ID NO: 2153 - DNA, 321 bp, Sorghum bicolor
atgccgtcgccgtcgcagacatcgccgccggtcgggaggcggactgctcatggcggctggcacaagcacgatgacccaagcacgccgaggggcttctgcaccaagtacttctccgtggagtcgtgcctcctactcgccctcgtcgccgtgctgctgctggtgctcccgctcgtcctgccgccgctcccgccgccgccgttggcggtgctgctcgtgccggtcgcaatgttggcggtgctgctggtgctggcgctcatgccggtggcggcggcggcggcgggtgcccggaacgaggtcgtggacccggcgtcgtacttgtag

SEQ ID NO: 2154 - protein, 106 aa, Sorghum bicolor
MPSPSQTSPPVGRRTAHGGWHKHDDPSTPRGFCTKYFSVESCLLLALVAVLLLVLPLVLPPLPPPPLAVLLVPVAMLAVLLVLALMPVAAAAAGARNEVVDPASYL

SEQ ID NO: 2155 - DNA, 1095 bp, Sorghum bicolor
atgtcttgctgcggtggcgccgaggaggacagctacggcccgccggccaaccaggcggttccgccacccaatgccaatgcccccggcaaccgaggtgggccgaggggaccgggcgcgcccagggtcggcggccccgccaagcccgtgagcatcgacgtgcccgccatccccttcgacgagctcaagaagatcaccaacaacttcagcgaccgcgccctcatcggcgagggctcctacggccgcgtctacaacgccaccctcagcgacggccgcgccgccgtcatcaagaagctcgacaccaacgcctcgcaagactccgacaccgacttcgccgcgcagatagcgatggtctccaagctcaagaacgagtatttcctggagctcttggggtactgcttggaggacggcacccgcatgctagcctaccagtttgccacaatgggttctttgcataacatactacacgggaagaaaggagttcagggtgcggagccaggccccgtgctcaactgggctcagcgagtgaagatagcttacggagcagcaagagggctagagtacctccacgagaaggtccagccgtcgatcgttcaccgagacatccggtccagcaacgtcctcatattcgacgatttcagctccaagatcgctgatttcaacctcaccaaccaggggaccgacaccgccgcacggttgcactccactcgtgtgctagggacttttggataccatgccccagaatacgctatgacaggccagatcaaccaaaagagcgatgtctacagcttcggcgtgatccttctagagttgctgaccggaaggaagccggtcgatcacaccatgccgaaaggccaacaaagtcttgttacttgggccactccaaggttgagtgaagataaagtgaagcagtgtgttgatccgaagctcaacagtgactaccctccaaaggctgttgcaaagctggcagcagttgcagcgttgtgcgttcagtacgaatccgatttccgaccaaacatgaccatcgtggtgaaggcgatcacgcctcttctaaatgcacccaaaccagccgctccagcagcagcaccacaatcctga

SEQ ID NO: 2156 - protein, 364 aa, Sorghum bicolor
MSCCGGAEEDSYGPPANQAVPPPNANAPGNRGGPRGPGAPRVGGPAKPVSIDVPAIPFDELKKITNNFSDRALIGEGSYGRVYNATLSDGRAAVIKKLDTNASQDSDTDFAAQIAMVSKLKNEYFLELLGYCLEDGTRMLAYQFATMGSLHNILHGKKGVQGAEPGPVLNWAQRVKIAYGAARGLEYLHEKVQPSIVHRDIRSSNVLIFDDFSSKIADFNLTNQGTDTAARLHSTRVLGTFGYHAPEYAMTGQINQKSDVYSFGVILLELLTGRKPVDHTMPKGQQSLVTWATPRLSEDKVKQCVDPKLNSDYPPKAVAKLAAVAALCVQYESDFRPNMTIVVKAITPLLNAPKPAAPAAAPQS

SEQ ID NO: 2157 - DNA, 1380 bp, Sorghum bicolor
atgggctccattctaagtgcggcaaatactacggctaagtctatggatcatcatgagacatctgggacatatcctaataagagggtgaaggtatctacttatgagtatgggtcaaacccaaggattatcccgactcttcctgatgagatctcactccagattctggcaaggttaccacggattcattaccttaacttgaagatggtttctcaagcttggaaggcagcaatcattggttctgaactttcccagctgaggaaagagcttggcgtaagtgaagaatggttgtatgtactgacaaaggttgaggcaaacaaactccattggtatgccctcgatccagtgtttcagaaatggcagaggttgccaccgatgccttctttcgtcaatgaggaggaatccaataggacggcatcttctgggttccggatgtggaatgttgtgggatcaagcattaagattgctgatttcgtgaggggcttgttttggcgcaggaacagtttggaccagatgcccttttgtggttgttcagtgggtgttgctgatggttacttgtatgtcattggggggttttccaaagctgttgccctgaattgcgtttggagatacgacccttttctcaatttgtggcaggaagtgagcccaatgatcactgggcgggctttctgcaaggcaacatttttgaatggcaagttatatgtggttggtggagtcagtaggggtcggaatggcctgcttcctctgcgttcagctgaggcgtttgatcccaaaactggactgtggagtgagctaccagaaatgcctttcgcaaaagcgcaggtactccccacagccttcttggtcgatgtgctgaagcctatcgccacagggatggcaccctacaacgggaagctgtatgttcctcagagcttgtactcatggccgttcttttttgacattggaggtgagatctatgacccagacctgaatgcttggtcaacgatgcctgatggtctcggcgacggatggccagcaagacaggcaggcacgaaattgggtattgtgatcgatgacaaactttacaccctggagccttccggctctttggacagtggtcagataaaaagatacaactccgaagaggacacatgggtaactatcttgccacaagtcccggttaatgacttcactgatgcagaggccccttatttactcgccggtctccatggaaggctccatgttataacaaaggcggcaaacaacactcttcaagttatgcaggctgtagtacagaataactcggataacgcggtatctggagaaaatgtggtatggaccactgtggcttctaggaactttgggacggctgagcttgtcagctgccaggttctagatgtttaa

SEQ ID NO: 2158 - protein, 459 aa, Sorghum bicolor
MGSILSAANTTAKSMDHHETSGTYPNKRVKVSTYEYGSNPRIIPTLPDEISLQILARLPRIHYLNLKMVSQAWKAAIIGSELSQLRKELGVSEEWLYVLTKVEANKLHWYALDPVFQKWQRLPPMPSFVNEEESNRTASSGFRMWNVVGSSIKIADFVRGLFWRRNSLDQMPFCGCSVGVADGYLYVIGGFSKAVALNCVWRYDPFLNLWQEVSPMITGRAFCKATFLNGKLYVVGGVSRGRNGLLPLRSAEAFDPKTGLWSELPEMPFAKAQVLPTAFLVDVLKPIATGMAPYNGKLYVPQSLYSWPFFFDIGGEIYDPDLNAWSTMPDGLGDGWPARQAGTKLGIVIDDKLYTLEPSGSLDSGQIKRYNSEEDTWVTILPQVPVNDFTDAEAPYLLAGLHGRLHVITKAANNTLQVMQAVVQNNSDNAVSGENVVWTTVASRNFGTAELVSCQVLDV

SEQ ID NO: 2159 - DNA, 756 bp, Sorghum bicolor
atgacggcaccggcggacaagggcaagaaggccaagaccgaggccgacggcggcgaggagaacgagcagatcgacggcgccctcgtcctctccatcgagaagctccaggagatccaggacgagctcgagaaggtaaatgaggaagcaagtgacaaggttatggaggtggagcagaaatatagtgagattcgcagacctgtctatctcaagaggggtgacattatcaagaccatcccagacttttggctcacagcgtttttgagccatcctctactaagtgagcttctgactgaagaggatcagaagatattcaagtacttggactcagttgatgtggatgattctgatgttaaggcaggatactccattcatcttaacttctctgagaacccatactttgaagacacaaagcttacaaagatctattccttcgctgatgatggaacaaccacaataaaagcttctcagattaagtggaaggaaggaatgggacctgcaaatggaaatggtcttaacaagaaggggagcaagcggccattagtagaggaaagttttttcacctggtttggtgatacagagctcaagagtcttgctgatggtgtgcaagatgaggtggcggagatcatcaaggaagacttgtggcctaatcctttgaagtacttcaacaatgaggttgaagatgaattcgaaggagatgaagatgatgatgatttggatgaagatgatgacgacgatgacggtggcgaggagaactga

SEQ ID NO: 2160 - protein, 251 aa, Sorghum bicolor
MTAPADKGKKAKTEADGGEENEQIDGALVLSIEKLQEIQDELEKVNEEASDKVMEVEQKYSEIRRPVYLKRGDIIKTIPDFWLTAFLSHPLLSELLTEEDQKIFKYLDSVDVDDSDVKAGYSIHLNFSENPYFEDTKLTKIYSFADDGTTTIKASQIKWKEGMGPANGNGLNKKGSKRPLVEESFFTWFGDTELKSLADGVQDEVAEIIKEDLWPNPLKYFNNEVEDEFEGDEDDDDLDEDDDDDDGGEEN

SEQ ID NO: 2161 - DNA, 384 bp, Sorghum bicolor
atggccaagcaaaagatcgtgatcaaggtgccgatgtcgagcgacaagtcgcggtccaaggccatggcgctggtggcggcggcgggcggggtacactcggtggccatcgccggcgacggcaaggaccaggtcgtcgtcgtcggcgagggcgtcgactccatcaagctcaccaccgacctgcgcaagaagatgggcgacgcgcagctcgtcgaggtcggagaggacaagaagaaggaggagaagacgaagcccgaccccgtcgccgacgctgtggcagcctactacaacagccagtactactaccactacccgccgccgccgccggcggtcgccgtcgcctacgacccctactcgcggccgggcagcacctgctccataatgtag

SEQ ID NO: 2162 - protein, 127 aa, Sorghum bicolor
MAKQKIVIKVPMSSDKSRSKAMALVAAAGGVHSVAIAGDGKDQVVVVGEGVDSIKLTTDLRKKMGDAQLVEVGEDKKKEEKTKPDPVADAVAAYYNSQYYYHYPPPPPAVAVAYDPYSRPGSTCSIM

SEQ ID NO: 2163 - DNA, 315 bp, Sorghum bicolor
atggcgtccaactccaaggcgctcctcgtgttagcgctcctgctcgccgccactttcctcgtcgcctccgctaacgagcaagcccgtgagcaggccaaagaggagaagaaggcggaggtccaggactggcacggcggcggcggctacccgggtcgcggcggcggctggcacggcggcggcggcggctaccctggcggacactgccggtggggttgctgcgaccgcgggcactatggcggctgccggtgctgctcgcaccccgaccagataccggagcccatgtaccgccctgagctcgtcgaggtccacaactga

SEQ ID NO: 2164 - protein, 104 aa, Sorghum bicolor
MASNSKALLVLALLLAATFLVASANEQAREQAKEEKKAEVQDWHGGGGYPGRGGGWHGGGGGYPGGHCRWGCCDRGHYGGCRCCSHPDQIPEPMYRPELVEVHN

SEQ ID NO: 2165 - DNA, 711 bp, Sorghum bicolor
atgcgctatacaaacttctcgcaggactacaagatgcctcaactgaggactgccagcaggccggtgcttgccagaaactctactggtggcatttttatcaggaggagggtggcatcaccgggaggcgccgtcaagccgctggctcgacgggtccgaacacatttcagcaacaaggagaatgtgccacccgtgggtgcagcgagggctaaaccaaagaggagaagccctctacctgactggtacccaaggagcccactccgtgacatcacatcaatcgtaaaggctcttgagaaaagaaatcgcctagaggaggatgcggctcgccaacatatccaatggaatgaagattctccacagcctgtggatccaacaactacagtacatgcagagcatagtgatcctgattctcaaagcacacaaactcaagaaacactgggtgttgttgcctctcctggctcaacttcagctgttgcgaacaatgtgacttctgtggctgaggacaagcaagaggcatcttcctctccatcggactgcttgcagatggctccatccaagccaaacgatccatctcctgctgatctggagaagaaaatgtcaagttcaatagagcagattgaaaagatggtgaggcgtcatatgaaggaaactccaaaggctgctcagccttccaagttagttgtccaaaggcgcatactgatgtccatgcgatga

SEQ ID NO: 2166 - protein, 236 aa, Sorghum bicolor
MRYTNFSQDYKMPQLRTASRPVLARNSTGGIFIRRRVASPGGAVKPLARRVRTHFSNKENVPPVGAARAKPKRRSPLPDWYPRSPLRDITSIVKALEKRNRLEEDAARQHIQWNEDSPQPVDPTTTVHAEHSDPDSQSTQTQETLGVVASPGSTSAVANNVTSVAEDKQEASSSPSDCLQMAPSKPNDPSPADLEKKMSSSIEQIEKMVRRHMKETPKAAQPSKLVVQRRILMSMR

SEQ ID NO: 2167 - DNA, 660 bp, Sorghum bicolor
atggcgccgacgtcgaagctgtcgatgggcatcaagcgcgcgtcgaggtcgcacgcgtaccaccgccgtgggctgtgggccatcaaggccaagcatggcggcgccttccccaaggcagagaagcccgccgccgccgcggaacccaagttctacccggccgacgacgtcaagccccgcgtccccagcacccgcaagcctaagcccaccaagctcaggtcgagcatcacgcccggtacggtgctgatcctcctcgcggggcgcttcatggggaagagagtggtgttcctcaagcagctcaagtccggcctgctcctcgtctctgggcctttcaagatcaatggagtgccgatccgccgtgtgaaccagacctatgtcattgctacatccaccaaggttgacatctctggtgttgatgtcgcaaagtttgatgacaagtactttgccagggagaagaagcagaaggcgaagaagaccgagggcgagctttttgagacagagaaggagacatccaagtctctgcctgacttcaagaaggatgaccagaaggctgtggatgctgctctgatcaaggctattgaggctgtcccagagctgaaaacctatcttggcgcccggttctctctcagggatggtgacaagccccatgagatggtcttctaa

SEQ ID NO: 2168 - protein, 219 aa, Sorghum bicolor
MAPTSKLSMGIKRASRSHAYHRRGLWAIKAKHGGAFPKAEKPAAAAEPKFYPADDVKPRVPSTRKPKPTKLRSSITPGTVLILLAGRFMGKRVVFLKQLKSGLLLVSGPFKINGVPIRRVNQTYVIATSTKVDISGVDVAKFDDKYFAREKKQKAKKTEGELFETEKETSKSLPDFKKDDQKAVDAALIKAIEAVPELKTYLGARFSLRDGDKPHEMVF

SEQ ID NO: 2169 - DNA, 2343 bp, Sorghum bicolor
atggcgggaggaggaggagggggaggcgacgggcgcggagaatcctcgccggcgatcaagccaatcagtaaggcggtggtgcaccgcatctgctctggccaggtcatcttcgacctttcctccgccgtcaaggagctcgtcgagaacagcctcgacgccggcgccacctccgtcgaggtcagcctcaaggcctacggcgaggagtggttcaaggtcgtcgacaacggatgcggcatatctccctctaacttccaggctctcgctcttaagcaccacacgtcgaagatatcggatttctccgacctcggatctgtggtgaccttcgggttccggggtgaagctctgagctcgctctgcgcgctggggaaactgacggttgagacgaggagcaaggatgagcctgttgcgacccatttggagtttgagcactcgggcgtggtggttagtgagaggaagacggcacggcaggttggaaccacggtgacagtggaaaaattgttctccaccttgccggtccggagcaaggagtttagcaggaacattcggaaggagtatgggaaagtgatctctctgttgaacgcttatgccttgatcgccaaaggggtcagattactctgcactaatactgttggaaaaaattcaaaaatggttgtgcttagaactcaaggaagcagttctatgaaagacaatattattactgtatttggtccaaatactttcaaatgtctggagcccttcagtgttaccacctcggatggctgccaaatagagggctttctttcaaaacctggacctggtactggccgcagttcaggagatagacaatttttctatgtgaatggcagacctattgatatgccaaaggtcactaaacttgtcaacgagctatacaaaagttcaaatgcaaagcaatatcctgtggttatcctggatttccgtattccaactacatcctacgatgtgaatgttgcacctgataagagaaaagttttcttctcgtccgagagcttgattctgcagtctttacgtgaagctgttgaaaatctgtactcccctctacaatgcagtttctcagtcaatcacatcaaagatcctgaaaaggaaggggatgctgttactgatgggcataatgaagacacaaatgctatcacaatggcaaatgtttcagcttccaacaatattgatgaagatgaagaaacagacagtgaggaccatgtttccccagagaaccagaaattgccttcttcagtggcaaagccaaaaagattgcctaaagaaggaaatagttttgcatcgggaacaaatcgtttcagaactgggcttgctgcaaaatctactcattcaagtaccattcagtcttctcttatgaactttgtatcactaaacaagcggaagcatgaagacgactgcactcttatttctgaaactccagtgctgagaagagggacatgctcagaacaagtgaggagaagtttagaatcaaactttgttacaccagaaaagcagaaccgtgaagatgattgcattatttctgaagctccagtgctgagaagtgggacgtgctctgaactagacaggagaacaagttcagatgttgacttcgcatcaccaaataagcagaagcacgatgacagcacctttatttccgaaaccccagtgttgagaagagggacaaactcagaacaggtgaggggagcaagtttagaagcaaattcagcaccttcattaagctcaagcacgaacaatattcctgagttcaatttacctctggaaacaaactctttaaaacagcatctcccacaatcttttggatctgtgaggacagatgtttcaccacagcattctaaacaacctagtattgtgacccttggggcggaggtatcaggtccatgggatgttcacactacagaatctgatgtggatgaacatcgtggtcgatgcttttcagcgtctggtgctcctaacaaatattcagaatcacgacatcagaatgcatcggctgatagtcctttgcctgatgctcaggattatgatgatggtgctgtagtatgttatgcacctgtacagtatcccattattcagtttacagttgccgagcttaggagaagaagaaagaatggttatatggttgttgggcaatttaatcttggttttatcattggaaagctcgaccaggatctgtttattgtagatcagcatgctgctgatgagaagtacaactttgagtgcctttcacagtctacaactttaaacatacagcctcttctccagccactgagacttgatctctcaccagaggaagaagtaattgtttctatgaacatgagcaccatcaggtattga

SEQ ID NO: 2170 - protein, 780 aa, Sorghum bicolor
MAGGGGGGGDGRGESSPAIKPISKAVVHRICSGQVIFDLSSAVKELVENSLDAGATSVEVSLKAYGEEWFKVVDNGCGISPSNFQALALKHHTSKISDFSDLGSVVTFGFRGEALSSLCALGKLTVETRSKDEPVATHLEFEHSGVVVSERKTARQVGTTVTVEKLFSTLPVRSKEFSRNIRKEYGKVISLLNAYALIAKGVRLLCTNTVGKNSKMVVLRTQGSSSMKDNIITVFGPNTFKCLEPFSVTTSDGCQIEGFLSKPGPGTGRSSGDRQFFYVNGRPIDMPKVTKLVNELYKSSNAKQYPVVILDFRIPTTSYDVNVAPDKRKVFFSSESLILQSLREAVENLYSPLQCSFSVNHIKDPEKEGDAVTDGHNEDTNAITMANVSASNNIDEDEETDSEDHVSPENQKLPSSVAKPKRLPKEGNSFASGTNRFRTGLAAKSTHSSTIQSSLMNFVSLNKRKHEDDCTLISETPVLRRGTCSEQVRRSLESNFVTPEKQNREDDCIISEAPVLRSGTCSELDRRTSSDVDFASPNKQKHDDSTFISETPVLRRGTNSEQVRGASLEANSAPSLSSSTNNIPEFNLPLETNSLKQHLPQSFGSVRTDVSPQHSKQPSIVTLGAEVSGPWDVHTTESDVDEHRGRCFSASGAPNKYSESRHQNASADSPLPDAQDYDDGAVVCYAPVQYPIIQFTVAELRRRRKNGYMVVGQFNLGFIIGKLDQDLFIVDQHAADEKYNFECLSQSTTLNIQPLLQPLRLDLSPEEEVIVSMNMSTIRY

SEQ ID NO: 2171 - DNA, 1017 bp, Sorghum bicolor
atgttcataactgaatgtgtctggaatacatcaggtacctttggtcaggtgttggagtgttgggataaggaaaggaaagaaatggtggctatcaagatcatcaggggcattaagaagtacagagatgctgcaatgattgaaattggcatgcttgagcagcttggtaaatatgatgaaagtagatccagttgtgttcaaattcggaactggtttgactatcgtaaccatatctgtattgtctttgagaggcttggaccaagcttatatgattttctgaagaaaaacaattaccgctcattcccaattgccctagttcgggagattgccaaacaactgttggaatgtatagcatttatgcatgaattgcgcctcatacacactgatttaaagcctgagaacattctccttgtttctccggagtacattaaagtgcccgattacaaagtttcatctcgatccccaaaggagggatcctattacaagcggttgcccaagtccagtgctatcaaggtgattgattttggtagcactacctatgatcaacaggatcagagttatgtcgtatcgacaaggcactatcgtgctccagaagttattttgggacttggatggagttacccttgtgatatctggagtgttggttgtattcttgttgagctttgcacgggcgaggcgttattccagactcatgaaaacttggaacatctggctatgatggagagggttctcggacctttgccataccatatgcttaagagggcagatcggcactctgacaaatacatcagaaaaggacgcttgaattggcctgagggttgcacttcacgggagagtatgaaagctgtgatgaaattgtccaggcttcagaatctggtgatgcaaaatgtggatcaggctgcaggagatttcattgaccttttgcaagggctgctcaagtatgattcagcagaccgtttaacagcagaagaggcgttgaggcatcccttcttcaccgaagggtttgggcaaagaagatga

SEQ ID NO: 2172 - protein, 338 aa, Sorghum bicolor
MFITECVWNTSGTFGQVLECWDKERKEMVAIKIIRGIKKYRDAAMIEIGMLEQLGKYDESRSSCVQIRNWFDYRNHICIVFERLGPSLYDFLKKNNYRSFPIALVREIAKQLLECIAFMHELRLIHTDLKPENILLVSPEYIKVPDYKVSSRSPKEGSYYKRLPKSSAIKVIDFGSTTYDQQDQSYVVSTRHYRAPEVILGLGWSYPCDIWSVGCILVELCTGEALFQTHENLEHLAMMERVLGPLPYHMLKRADRHSDKYIRKGRLNWPEGCTSRESMKAVMKLSRLQNLVMQNVDQAAGDFIDLLQGLLKYDSADRLTAEEALRHPFFTEGFGQRR

SEQ ID NO: 2173 - DNA, 1017 bp, Sorghum bicolor
atgaggcgcttcctgccggccggaggcggcggcggcggcggcggggagccgtcgtcttcctcctcctcgggcgggcaacaccagcacggcggcgggctcgcgggcgagagggcggcggcgggcctgcggtaccgaggaggcgacatctcgctggggcacgggcacgacgacggacatcgtcgtcatcagtaccacctcggcgccggcgacgcggcggataggcagaacgacgggtccatggacatgctggcgcggcacagcagctcgccggtcggcttcttctccaacctcgtcatggacaacgggtacccacgctcaaataaagccggagtcagtggtggcggcgaaggtcagcgtgatccttcaacggccaacaacaatagtggaagtagcagcagcggccggaagatgaagccgtcgtcgtccgggttcaacttcgccggcgggacgcagcagcagggccagcagcagggcgccgccgggggccacctctcgcggatctccgaggacggctgcgccagcttcccggccggcggcctggtgggcgaccgcgctgcaggtggccgcggctctggcgagagcagcagcggtggtgctgccgcggcggcgcgctcgtactccggcgggttctccattgttgggccgtgggaagagtccagggacatcattaccaccctcggcgcatacgaccctcagtttagcggcgccatggcgggtacggcgctggagatggcgggcatggacaggtacatgcagctgcagcaggaccaggtgccgttcaaagtgcgcgccaagcgcgggtgcgccacgcaccccaggagcatcgccgagagggagaggaggacgaggatcagcgagaagctcaggaagctccaggacctcgtgcccaacatggacaagcaaacgagcaccgcggacatgttggaccttgcagttgagcacatcaagggcctgcagagcgaactgcaggctctgaaacacgagcaggagaagtgcacctgctgccgaaagcgatag

SEQ ID NO: 2174 - protein, 338 aa, Sorghum bicolor
MRRFLPAGGGGGGGGEPSSSSSSGGQHQHGGGLAGERAAAGLRYRGGDISLGHGHDDGHRRHQYHLGAGDAADRQNDGSMDMLARHSSSPVGFFSNLVMDNGYPRSNKAGVSGGGEGQRDPSTANNNSGSSSSGRKMKPSSSGFNFAGGTQQQGQQQGAAGGHLSRISEDGCASFPAGGLVGDRAAGGRGSGESSSGGAAAAARSYSGGFSIVGPWEESRDIITTLGAYDPQFSGAMAGTALEMAGMDRYMQLQQDQVPFKVRAKRGCATHPRSIAERERRTRISEKLRKLQDLVPNMDKQTSTADMLDLAVEHIKGLQSELQALKHEQEKCTCCRKR

SEQ ID NO: 2175 - DNA, 933 bp, Sorghum bicolor
atgtcgtcgtcgtcgtcgtcgatggactgcgtcgccgcctcaaaggacaaggaggagacgcctccgctcaatagcagggcggcggcgtggtggacgggggagacggtggcggtggtgacgggcgcgaaccgcggcatcgggcacgcgctggccgcgcggcttgccgagcagggcctgtgcgttgtggtcacggcgcgggacgaggcgcgcggggaggccgccgcggccgcgctccgcgccagggggccgctccgcggcgccgtgcggttccgccgcctcgacgtcgccgacccggcctccgtcgccgcgttcgcgtcgtgggtgcgcgacgagctcggcggcctcgacatcctggtgaacaatgctggggtgtcgttcaacgagatggacaccaactccgtggagcacgcggagacggtgctccggaccaacttctacggggccaagatgctcaccgaggcgctgctgccactcttccgccgctcgcccaccaccagccgcatcctaaacatcagctcccagcttggtcttctcaacaaggtgaaggaccctcagctgcgtcgcatgctcctggacgaggcggcgctgacggagggcgacatcgaggggatggcgtcgcggttcctggcgcaggtggcggacggcacctggcgcgggcgcgggtggcccgaggtgtggacggactacgccgtgtccaagctggcgctcaacgcctactcccgcctgctggcgtcgcggctggcgggccgcggggtgagcgtcaactgcttctgccccgggttcacgcgcaccgacatgacgcgcgggctcggcaagcgcaccgccgaggaggccggccgcgtcgccgcggggctcgcgctgctcccgccccaccacctgcccaccggcgagttcttcaagtggcgcacgccgcagctctactccaagctgtga

SEQ ID NO: 2176 - protein, 310 aa, Sorghum bicolor
MSSSSSSMDCVAASKDKEETPPLNSRAAAWWTGETVAVVTGANRGIGHALAARLAEQGLCVVVTARDEARGEAAAAALRARGPLRGAVRFRRLDVADPASVAAFASWVRDELGGLDILVNNAGVSFNEMDTNSVEHAETVLRTNFYGAKMLTEALLPLFRRSPTTSRILNISSQLGLLNKVKDPQLRRMLLDEAALTEGDIEGMASRFLAQVADGTWRGRGWPEVWTDYAVSKLALNAYSRLLASRLAGRGVSVNCFCPGFTRTDMTRGLGKRTAEEAGRVAAGLALLPPHHLPTGEFFKWRTPQLYSKL

SEQ ID NO: 2177 - DNA, 483 bp, Sorghum bicolor
atggcggagcagacagagaaggctttcctcaagcagcctaaggttttcctctgctcgaagaaggccgccaaggggaataagcctggcaagggtggcaacaggttctggaagaacattggccttggtttcaagactcccagggaagccatcgaaggaacctacattgataagaaatgcccattcactggcactgtgtcaattagaggccgcatcattgctggaacatgccatagcgccaaaatgaacaggaccatcattgttcgtaggaactaccttcactttgtcaagaaatatcagaggtatgagaagaggcactctaacatccccgcccacatttccccttgctttcgtgtgaaggaaggagaccatgtgattattggccagtgcaggccactgtccaagacggtgaggtttaatgtgctgaaggttatccctgccgggtcaaagagtggtgcagtgaagaaggcattcactgctgcctga

SEQ ID NO: 2178 - protein, 160 aa, Sorghum bicolor
MAEQTEKAFLKQPKVFLCSKKAAKGNKPGKGGNRFWKNIGLGFKTPREAIEGTYIDKKCPFTGTVSIRGRIIAGTCHSAKMNRTIIVRRNYLHFVKKYQRYEKRHSNIPAHISPCFRVKEGDHVIIGQCRPLSKTVRFNVLKVIPAGSKSGAVKKAFTAA

SEQ ID NO: 2179 - DNA, 4998 bp, Sorghum bicolor
atgaagcccaccacttccgccgcggcggcggcggcggcggtcaccaccgatgacccttccccttcgccgtcggactccacgtcggcgacgtttacggtcgaccgccgcggggacgcctccgcctcctgccggtggacgctcccggacttcccccgcacccgcgcccgcaccttctacagccggtacttcgaggtcggcggcttcgactgccgcctcctcctctacccgcgcggcgactcgcaggcgctgccggggtacctctccctctaccttcaggtcctcgaccccaaaaccccggtgtcgtcgtcgtcatccaccacgacaaccacctcctccaaatgggactgcttcctcagctatcgcctctccgttgtccaccccaccgatcccgccaagtcgctgggccgcgattcctggcaccgattctcgtccaagaagcgctcccacggctggtgcgattttgcgccctcctccgccgccgccttcctcttccagccccacgacgccctcgtcattgctgctgacatatctgtgctctccgaggcggcctccttcgctgatgctgacggtcgttttacctggaaggtgctcaattttggcctcttccgagaaatgatccgcacacagaagatcatgagccctgcattcttccctgccgctgcctctgctggcgggactgactgcggcctccggattagcgtctatcagagcaatgtctctggcgcagaacatttatctgtttgtctggaaagcaaggagcccgttgtgcaggtagcatctgggtcatcgacgtcggcattgacatcaggtggtacagggagtggtgtgccagatggtgatcgagggtgctggtgtcttttccgcatttcgatccttaatcagaggtctggtgggagccatatccacaaggactcgtatggtcgttttggggcggatagtgccagtctaggttggggagaatacatcaagatggatgagtttttggctgctgatagcggatacctggtagatggagctgtggtgtttagtgcctctgtgcatgtcataaaggagtcaaactcattcactcggagcttgccaatggttcccggaatatgtggtgctggtggtgggcgtgccggggctaggaagtctgatggacactttgggaagtttgtgtggaggattgaaagcttcacaagactcaaggagcttctcaaaaagcgcaagattgcgggtctgtgtatcaaaagcagacggtttcaagttgggaatcgagattgccgtcttattgtttatccacgggggcagtctcaaccaccatgccacctgtcagtgtttctggaagttacagatccccgaaatacaactactgagtggagttgctttgtcagccatcgtctctctgtcatcaaccaaaaagtggaggagaagtcgatcacgaaagagtctcagaatcgttactctaagtcagcgaaagattggggttggcgcgaatttgtgacattaactagcctctttgatcaggatgcaggttttctcgtgcaggataccgttgtgttttcagccgaagttctcattctgaaggaaacagcaactatgcaagagcttaccgatgaagattctgaaatatgcagttcaacttatggatgtcagattgaagctttaccaaagcggccatcattcacatggaaagtggaaaatttcttgtcttttaaggagattatggagtccagaaagatttttagtaaattttttcaggctgggggctgtgagctgcggataggtgtatatgagtcgtttgatacgatctgcatatacttggagagtgatcagtcatctgggtatgatcctgataagaacttttgggtgcattataaaatggctatagttaaccagaagaattctgcaaaaactgtgtgcaaggaatcttcaatctgcacgaaaacatggaataattcagttctccagtttatgaagacttcggacatggttgacaccgatgctggctttcttgttcgggacactgttattttcacttgtgaaatcatagactgttgcccatggtttgatttctctgatcttgaggtttgggcctcagatgatgaccaggatgaattgtcgacagatcctgatgaacttgttgattctgaagatagcgaagatatgagtggtgatgaggaggatattttccggagcctcctctcgagagctggattttctcttacatacgaagataactatactcaaccacaggttactttaagagagaaaattctaacagatgctactgcgatagctggattccttactggactgcgtgtttatctggataacccagcaaaagttaagcgtatgcttcttccaaccaaagtatccaccaagagtggtggaaagaaagatgcttcaaagtgtgattcaagctcaagctccacaagtctcattagcttgttgatgggggttagtgccttgaagcaggctatcatagatttgcttctagatataatggttgagtgttgccaaccttcagaagaaagtagttcctcagcaagcactaaagcttctcctgattcaaatggggctagctctccaccagagcttagcgttgaaggtgaactaacagaatgtgcatgcagtgatgtgtatgcgagggtggaatctaatagtgatgatattcgagatagtcctgcaatgcataatacagatttggctgcaactgagatcgctgtaaataatctagaacattcctgttttcctccagaaacatctgctgctgatttgccagcagatgaaggccctgagctggcttcctggtcaaagtggccagagcaatcagaggaactgttagggttgattgttaattcattgagggcattggacagtgctgtcccacatggatgccgtgaaccaagaaggcggccccaggctgtccggaagattgcacttgtcctcgacaaagctccaaaacaactccatcaagatttgatttcccttgtaccaaagttggtggatggttcggaacactcccttgcagcttgtgccctgttagatcatcttcaaaagccagatgcagagccttcattgagattgccagtttttggtgctctttctgagttggaacttgaaagtgatatctggaaacaagcatctgttcatgcacttgaattattgtctgactcaaacgatgagtctcttgtagctgccattacttatgttcttaaggcggcatcacagtgtcagcatctttctgtagcggttagagctattagatggagattgaaagatttgggaacggaagttccacattgcgtgctggactttttgtctaaaactattcaaacccagccagatgtagccgaagctatattgaaggatattgattctgattgtgagcctgaaaacaattgcctatcatcaacatcaccttgtagtacttgttctacagacgggctttcagctgaagggatgtattcttggcaagagcaagctgtgcatggaagaagtcatctatcagatgtttttgcactgatagaaatgttatcaatgcctggattatttgttgaagtcgcacaggtttttgagagggctttattgcgagggtcctttggtctacaattagtagccatggtgctggaaagaagacattcttacagttcaagttcaaagtctgggtctgttgtgaatgattcacagaacaaacaagttctgttagatgggcagttggaacctttatctgtccaagaaaatgatttcacttcagttcttgcacttggtgaggtattatctctatctacagaaacgaaggttcaagattttgtgcggatgctttacgctatcatatttaagatctatgccgaggatcattatagatatagaattcttaagggccttgttgaacgagcaacaaatacatcagataactgccgagcagttgacatcgatatggatgtcttggtatttcttgttaaggaggagtatgggatcgcgagacctgttttgaacatgatgcgtgaggttgctgaagttgctcaggctgaccgtgcaaatctttggcaccaaatatgtgctactgaagatgaaaatattcgtcttcgagaggacatggaaatggagcaaacaaatttcaccaacgaaaagattgcactaaaccaacagcgaactgagttggaggcaactattggcggtctaaagtctgagctaaaagctgagagggaccgttttactcgtgagaagaaggcattatccgatcagatgcgagagattgagaatcagttggaatgggtgcgatcagagaaaggtgatcagattgtaaagctcactgctgaaaagagaaatctccatgatcgtcttaatgatgcagagtcacaactctccttggtgaaagcacggaaacgtgaagaattaaagaaagtgacaaaggagaaaaatacattagcagaacggctgaagaatgctgaaggttcaaggaaaaggtttgacgatgaattaaaacgttatgcagctgaaacacagactcgtgaagaaattcgaaaatcactagagaatgaagtgagaaggctgacacagacagttgggcaaacagagggagaaaaaaaggaaaaagaagagcaaattactcgttgtgaagcatacattgatgggatggaatccaaacttcaagtttgccagcaatacattcggacacttgaaacgtcactccaagaagagatggctaggcatgctccactttatggtgttggcgtcgaatcactgtcgttggaggagctggaggcacttgcaaacatccacgagcagagtttaaggcagatcaaagctatccagcaaaggaaaggtagcagccatctcttgggtggccccgccctttctcacatccctgccctattctcctcgcctccttcagtggcagttggccctccgtcctcacggatccccacatccccaatggcacccaacggtgcagggatccatgggaatgggcacctgaacggcgcgactggccgctggttcaatccgagctga

SEQ ID NO: 2180 - protein, 1665 aa, Sorghum bicolor
MKPTTSAAAAAAAVTTDDPSPSPSDSTSATFTVDRRGDASASCRWTLPDFPRTRARTFYSRYFEVGGFDCRLLLYPRGDSQALPGYLSLYLQVLDPKTPVSSSSSTTTTTSSKWDCFLSYRLSVVHPTDPAKSLGRDSWHRFSSKKRSHGWCDFAPSSAAAFLFQPHDALVIAADISVLSEAASFADADGRFTWKVLNFGLFREMIRTQKIMSPAFFPAAASAGGTDCGLRISVYQSNVSGAEHLSVCLESKEPVVQVASGSSTSALTSGGTGSGVPDGDRGCWCLFRISILNQRSGGSHIHKDSYGRFGADSASLGWGEYIKMDEFLAADSGYLVDGAVVFSASVHVIKESNSFTRSLPMVPGICGAGGGRAGARKSDGHFGKFVWRIESFTRLKELLKKRKIAGLCIKSRRFQVGNRDCRLIVYPRGQSQPPCHLSVFLEVTDPRNTTTEWSCFVSHRLSVINQKVEEKSITKESQNRYSKSAKDWGWREFVTLTSLFDQDAGFLVQDTVVFSAEVLILKETATMQELTDEDSEICSSTYGCQIEALPKRPSFTWKVENFLSFKEIMESRKIFSKFFQAGGCELRIGVYESFDTICIYLESDQSSGYDPDKNFWVHYKMAIVNQKNSAKTVCKESSICTKTWNNSVLQFMKTSDMVDTDAGFLVRDTVIFTCEIIDCCPWFDFSDLEVWASDDDQDELSTDPDELVDSEDSEDMSGDEEDIFRSLLSRAGFSLTYEDNYTQPQVTLREKILTDATAIAGFLTGLRVYLDNPAKVKRMLLPTKVSTKSGGKKDASKCDSSSSSTSLISLLMGVSALKQAIIDLLLDIMVECCQPSEESSSSASTKASPDSNGASSPPELSVEGELTECACSDVYARVESNSDDIRDSPAMHNTDLAATEIAVNNLEHSCFPPETSAADLPADEGPELASWSKWPEQSEELLGLIVNSLRALDSAVPHGCREPRRRPQAVRKIALVLDKAPKQLHQDLISLVPKLVDGSEHSLAACALLDHLQKPDAEPSLRLPVFGALSELELESDIWKQASVHALELLSDSNDESLVAAITYVLKAASQCQHLSVAVRAIRWRLKDLGTEVPHCVLDFLSKTIQTQPDVAEAILKDIDSDCEPENNCLSSTSPCSTCSTDGLSAEGMYSWQEQAVHGRSHLSDVFALIEMLSMPGLFVEVAQVFERALLRGSFGLQLVAMVLERRHSYSSSSKSGSVVNDSQNKQVLLDGQLEPLSVQENDFTSVLALGEVLSLSTETKVQDFVRMLYAIIFKIYAEDHYRYRILKGLVERATNTSDNCRAVDIDMDVLVFLVKEEYGIARPVLNMMREVAEVAQADRANLWHQICATEDENIRLREDMEMEQTNFTNEKIALNQQRTELEATIGGLKSELKAERDRFTREKKALSDQMREIENQLEWVRSEKGDQIVKLTAEKRNLHDRLNDAESQLSLVKARKREELKKVTKEKNTLAERLKNAEGSRKRFDDELKRYAAETQTREEIRKSLENEVRRLTQTVGQTEGEKKEKEEQITRCEAYIDGMESKLQVCQQYIRTLETSLQEEMARHAPLYGVGVESLSLEELEALANIHEQSLRQIKAIQQRKGSSHLLGGPALSHIPALFSSPPSVAVGPPSSRIPTSPMAPNGAGIHGNGHLNGATGRWFNPS

SEQ ID NO: 2181 - DNA, 2082 bp, Sorghum bicolor
atggcttcgacgaacaaccactggctgggtttctcgctctcgggccaggataacccgcagcctaatcatcaggacagctcgcctgccgccgccggcatcgacatctccggcgccagcgacttctatggcttgcccacgcagcagggctccgacgggaatctcggcgtgccgggcctgcgggacgatcacgcttcttatggcatcatggaggccttcaacagggttcctcaagaaacccaagattggaacatgaggggattggactacaacggcggtggctcggaactctcgatgcttgtggggtccagcggcggcggcgggggcggcggcaagagggccgtggaagacagcgagcccaagctcgaagatttcctcggcggcaactcgttcgtctccgagcatgatcagtccggcggttacctgttctctggagtcccgatggccagcagcaccaacagcaacagcgggagcaacaccatggagctctccatgatcaagacctggctccggaacaaccaggtgccccagccgcagccgccagcagctccgcatcaggcgccgcagactgaggagatgagcaccgacgccaacgccagcgccagcagctttggctgctcggattcgatggggaggaacggcacggtggcggctgctgggagctcccagagcctggcgctctcgatgagcacgggctcgcacctgccgatggttgtggccggcggcggcgccagcggagcggcctcggagagcacgtcatcggagaacaagcgagcgagcggcgccatggattcgcccggcagcgcggtagaagccgtcccgaggaagtccatcgacacgttcgggcaaaggacctctatatatcgaggtgtaacaagacatagatggacagggcgatatgaggctcatctatgggataatagttgtagaagagaagggcagagtcgcaagggtaggcaagtttaccttggtggctatgacaaggaagacaaggcagcaagggcttatgatttggcagctctcaagtattggggcactactacaacaacaaatttccctataagcaactatgaaaaggagctagaggaaatgaaacatatgactaggcaggagtatattgcatacctaagaagaaatagcagtggattttctcgtggcgcatcaaaatatcgtggagtaactagacatcatcagcatgggagatggcaagcaaggatagggagagttgcaggaaacaaggatctctacttgggcacattcagcaccgaggaggaggcggcggaggcctacgacatcgccgcgatcaagttccgcggtctgaacgccgtcaccaacttcgacatgagccgctacgacgtcaagagcatcctcgagagcagcacgctgcctgtcggcggcgcggccaggcgcctcaaggatgccgtggaccacgtggaggccggcgccaccatctggcgcgccgacatggacggcggcgtgatctcccagctcgccgaagccgggatgggcggctacgcctcgtacgggcaccacgcctggccgaccatcgcgttccagcagccgtcgccgctctccgtccactacccgtacgggcagccgccgtcccgcgggtggtgcaagcccgagcaggacgcggccgtcgccgccgccgcgcacagcctgcaggacctccagcagctgcacctcggcagcgcggcacacaacttcttccaggcgtcgtcgagctcggcagtctacaacagcggcggcggcggcgctagcggcgggtaccaccagggcctcggtggcggcagcagctccttcctcatgccgtcgagcactgtcgtggcgggggccgaccaggggcacagcagcagcacggccaaccaggggagcacgtgcagctacggggacgatcaccaggaagggaagctcatcgggtacgacgccatggtggcggcgaccgcagccggcggggacccgtacgccgcggcgaggagcgggtaccagttctcgtcgcagggctcgggatccacggtgagcatcgcgagggcgaacgggtactctaacaactggagctctcctttcaacggcggcatggggtga

SEQ ID NO: 2182 - protein, 693 aa, Sorghum bicolor
MASTNNHWLGFSLSGQDNPQPNHQDSSPAAAGIDISGASDFYGLPTQQGSDGNLGVPGLRDDHASYGIMEAFNRVPQETQDWNMRGLDYNGGGSELSMLVGSSGGGGGGGKRAVEDSEPKLEDFLGGNSFVSEHDQSGGYLFSGVPMASSTNSNSGSNTMELSMIKTWLRNNQVPQPQPPAAPHQAPQTEEMSTDANASASSFGCSDSMGRNGTVAAAGSSQSLALSMSTGSHLPMVVAGGGASGAASESTSSENKRASGAMDSPGSAVEAVPRKSIDTFGQRTSIYRGVTRHRWTGRYEAHLWDNSCRREGQSRKGRQVYLGGYDKEDKAARAYDLAALKYWGTTTTTNFPISNYEKELEEMKHMTRQEYIAYLRRNSSGFSRGASKYRGVTRHHQHGRWQARIGRVAGNKDLYLGTFSTEEEAAEAYDIAAIKFRGLNAVTNFDMSRYDVKSILESSTLPVGGAARRLKDAVDHVEAGATIWRADMDGGVISQLAEAGMGGYASYGHHAWPTIAFQQPSPLSVHYPYGQPPSRGWCKPEQDAAVAAAAHSLQDLQQLHLGSAAHNFFQASSSSAVYNSGGGGASGGYHQGLGGGSSSFLMPSSTVVAGADQGHSSSTANQGSTCSYGDDHQEGKLIGYDAMVAATAAGGDPYAAARSGYQFSSQGSGSTVSIARANGYSNNWSSPFNGGMG

SEQ ID NO: 2183 - DNA, 1302 bp, Sorghum bicolor
atggataaccaccttaaatcgcccttgatctccctactgctcttttgcactgccacaacagtagcataccctgcttgcagtgaaatactatctcacaaggtgagcaaacattttgtatcatacagcccacagccaagggatttcccaaatgaacaactttatcgcgcctacttcgtcatccagcgcttcaagaacaccatcaccggcgaccccaagaatatcaccgccacttggactggtcatgatatctgcggaaagacatcctatgttggtttctactgcggagcactgccagggcgagataacaagttgacagtcacagcggtcattttgaatggctacaatctacatgcacctaggttgcatgggtttgtagatcagctacccgatctcgcgcttttccatgctgcttccaacaattttggtggcgacgtcccccgccttgccggcctaggatacatgtacgatataagtgttagtaatgatcatcccatacatacacttattgacacatatggggcgcaaggcgcaggtagtatcaacgttgtgtctcagtgtgtaactgctaccataaacttcaattttcatttgggaattcccggcagtaaggaagggaagcatagtactggagctacggatgctaaggcgctccttctgaaccacaacaacttgtcggggccacttccttcgaacattggtttctccaagttgagctacctcgccctcgccaacaacaagctcaccgggccaattccatcgtcaatcatccacctgcaagactccctcttcgaggtgctccttctcaacaaccaactctccggctgcctcccccacgagctcggcatgctcaccaaggcggccgtgattgacgccgggatgaaccagctcactggcccaatcccgtcgtccttctcctgcctcagcagcgtcgagcagctcaacctggccgggaaccgcctctacggtcaggtacccgacgcactctgcaagctcgctgggcccgctggccgcctcgccaacctcacgctgtccggcaactacttcacctccgtcggtccggcgtgcgcgacgctgatcaaagacggcgtgctggacgtgaagaacaactgcattccgggcctcgccaaccagaggcgcgcggcggagtgcgcggcgttccagagccagccaaagacgtgcccggcggcgagcaccacccaggtgacatgccccgccgcagctgccatggatgcggcggcgccaggggagaggaaggtcagggactactccagctacgtgacgtacgctactctgcacgactga

SEQ ID NO: 2184 - protein, 433 aa, Sorghum bicolor
MDNHLKSPLISLLLFCTATTVAYPACSEILSHKVSKHFVSYSPQPRDFPNEQLYRAYFVIQRFKNTITGDPKNITATWTGHDICGKTSYVGFYCGALPGRDNKLTVTAVILNGYNLHAPRLHGFVDQLPDLALFHAASNNFGGDVPRLAGLGYMYDISVSNDHPIHTLIDTYGAQGAGSINVVSQCVTATINFNFHLGIPGSKEGKHSTGATDAKALLLNHNNLSGPLPSNIGFSKLSYLALANNKLTGPIPSSIIHLQDSLFEVLLLNNQLSGCLPHELGMLTKAAVIDAGMNQLTGPIPSSFSCLSSVEQLNLAGNRLYGQVPDALCKLAGPAGRLANLTLSGNYFTSVGPACATLIKDGVLDVKNNCIPGLANQRRAAECAAFQSQPKTCPAASTTQVTCPAAAAMDAAAPGERKVRDYSSYVTYATLHD

SEQ ID NO: 2185 - DNA, 2760 bp, Sorghum bicolor
atgtctgaagtaaagccagtaattgatcacgctcgtggagatggattatctgttcaaaagatcatgtcagaattgaagaacattaccaatcctgttgaggaaaaacttggtgctgatgacaattcttcaagcagaaaatctaatgcaacatcattaaaaatgttattagagaaggagatgtctaaagaagcggagtcaaagagaagacctccaagtgtcattgccagattaatgggtcttgaggaggacttacctactaaagaaccaattgttcaccataccgtaagtgacttgagtagagatttaaatgccacaaacaacaccttacagggaaaagaacggcatcaattcataatgttgaagacacaaaatgaccaatcctgttatgaaaaaattgaatacaatgatgtttatgaagtatctgaaggtcaatcaggaacaggctattttcatgatcgaacttcacagaaaggatggtgtttggagaacaagagtaagcaattcgacattgcacaagacaagatcatggaaccagaacactttggcattgaagagaaggtcctttgtacaaaggagttacctgaagctcttgtttttccatgttcaaatagagatttatttcttgaatttcctgaagaacataaccccacattctcaagacagtcgagtgggcttcacacaaaccgagcaccgcctcagacaaaacgcattacagtgctgagaccaattagatctgttgatattaatagcataagacggtacagagcagaaattggtaagcaaaatgtattgaacatgagaagattccatcagattcctagtccaaaggaagagataccttcccagcacagtcgaatagtacttttgaggcctaccccagggaagcctggcatatcaaaggcaaagctgacctccagggcaacttcatttcagttaactaaccgtaacagtctcaatggatcattagatggtaaccaggcatccataggatctgcaggactagttcatggtatcatgcagtgccgggaagatggatgtcaccaaagagatgattctttattatcttctgcatactcaaatggatatgggggagatgaaagctcattcagtgattcagaagttgattataccagtggttctgaaatcaactatattgaagatggtgatgccctcagtgactctgagggaggtagccctctgtcaaaacattcatggaattacataagaagatacgaaggtcaatgctcaagctcatcctttagcaagatctcccacttttctgagtcatcagtaatcacggaagccaaaaaacagctttcagagcgatggtcaatggttacctgcgatgagaacagccaagtgcaaccgtcgaggagaaaatgcacattgggtgagatgctctccattaaggaagcaaagaaagatgaggccaccactgggatgttttctgtttccagtaaacagtcatgtggcctggaaaatgaactgactacacgttctacaaatgtaactatttctagaaagaatgataacaatggggagagatcttctaggaagttgccaagatcaaaatctgttccagtgatttcatccacgtctgataacatggtggtgaatgtgcaagcttcaaatcctgagagcctcaaactgaaggtggctgttgtgtcaaataaaggaaaatcagctttcaagggaagagtttcagattttttcttgtctaatagtaaaaggccaagaaggaagatgtccacttatcatccatctgattgctttgctgagaggcttgaaggttgtgtttttcatagtagacaggattgcaatcatgaaatggatgccattgagaaagcaatgcattgtgaggacagatttgatagtttttcgacacgaatatcaactagcacatctgatagaacaacgtctggtgcatctgtatcattggaatgttcaagtggaaacctggataaacaaggagtaaataaaggcctaaatagtaaccgtgatcaacccagccctacctcagttctcgatgcaccatctgaagatagcagttgtaatgaacctgaagcacctggaataactacttccaagaatgctacatcaagatcttcaacaattgaaactgtcacccgtttcttatcatgggatgacaccacctcagagtcacagtcaccttgtaacccaaggctgagttctcgtctccctgatgtagatgatgatgagtcagaatgccatgtccttgtgcaaaatataatgtcatcagctggattaggcacttcgcaatcatgtatggttttcaccggttggcatttacctgatcaccctcttgacccggtactgtgcaacaaattatcagagctgcaggagaaaagttcatacagaaggcttctatttgactgtgtgaatgttgctctaattgagatcggtgagaacactttactgagtgcattcccatggagtaaaagacactccaggacatggagaggcacctcatctcctgatctgggtgtagaagtctggagtatcctgaaggactggatatatggggccaggatgtttgtggtgagcaagagagataatgctgggatcatattggatagaattgtgaagcaggaggtcgaagcaagagggtgggtgaaactgatgatggcgcaggtggttgacatcactgaggagctcgaggggggagtaatggaggagctggttgaagaagcggtgctggattttcacagtttgttttcaatgatgagatatcgattgtaa

SEQ ID NO: 2186 - protein, 919 aa, Sorghum bicolor
MSEVKPVIDHARGDGLSVQKIMSELKNITNPVEEKLGADDNSSSRKSNATSLKMLLEKEMSKEAESKRRPPSVIARLMGLEEDLPTKEPIVHHTVSDLSRDLNATNNTLQGKERHQFIMLKTQNDQSCYEKIEYNDVYEVSEGQSGTGYFHDRTSQKGWCLENKSKQFDIAQDKIMEPEHFGIEEKVLCTKELPEALVFPCSNRDLFLEFPEEHNPTFSRQSSGLHTNRAPPQTKRITVLRPIRSVDINSIRRYRAEIGKQNVLNMRRFHQIPSPKEEIPSQHSRIVLLRPTPGKPGISKAKLTSRATSFQLTNRNSLNGSLDGNQASIGSAGLVHGIMQCREDGCHQRDDSLLSSAYSNGYGGDESSFSDSEVDYTSGSEINYIEDGDALSDSEGGSPLSKHSWNYIRRYEGQCSSSSFSKISHFSESSVITEAKKQLSERWSMVTCDENSQVQPSRRKCTLGEMLSIKEAKKDEATTGMFSVSSKQSCGLENELTTRSTNVTISRKNDNNGERSSRKLPRSKSVPVISSTSDNMVVNVQASNPESLKLKVAVVSNKGKSAFKGRVSDFFLSNSKRPRRKMSTYHPSDCFAERLEGCVFHSRQDCNHEMDAIEKAMHCEDRFDSFSTRISTSTSDRTTSGASVSLECSSGNLDKQGVNKGLNSNRDQPSPTSVLDAPSEDSSCNEPEAPGITTSKNATSRSSTIETVTRFLSWDDTTSESQSPCNPRLSSRLPDVDDDESECHVLVQNIMSSAGLGTSQSCMVFTGWHLPDHPLDPVLCNKLSELQEKSSYRRLLFDCVNVALIEIGENTLLSAFPWSKRHSRTWRGTSSPDLGVEVWSILKDWIYGARMFVVSKRDNAGIILDRIVKQEVEARGWVKLMMAQVVDITEELEGGVMEELVEEAVLDFHSLFSMMRYRL

SEQ ID NO: 2187 - DNA, 1860 bp, Sorghum bicolor
atggccaccaggccgggccctttgactgaatggccatggcagaggcttggcaacttcaagtacttggtgatgggtcccgtggtggtggacggggcgcggcgggtggtggcgcggggctggggcgacatcgacctggcgttcgcgctcatcctgccgtcgctgctgctgcggatggcgcacaaccagatctggatcagcgcggcgcgctaccagacggcgcggagcaagcaccggatcgtggaccggggcatcgagttcgagcaggtggacagggagcggggctgggacgaccagatcatcctcaacgggctgctcttctacgcgggctacctggccatcccgagcgcgaggcacctgccggcgtggaggacggacggcgccgccgtgatggcgctgctccacgcggggcccgtcgagttcctctactactggttccacagggcgctgcaccaccacttcctctactcgcgctaccactcgcaccaccactcctccatcgtcaccgagcccatcacctcggtgatccatccctttgctgaacacatggtctactacgtcctgtttgcgatccccatgctgtcgactgtttacattgggaatgcctctgttctgggtattgtggtctacatcgcctacatcgacttcatgaacaacatggggcactgcaatttcgagctggtgcctaagtggatgttccaagtcttccctcctctcaagtacctcatgtacacgccatcgtttcattctctgcaccacacgcagttccgcacaaactactcgctgttcatgccgttctacgactacatatacaacaccatggacaagtcatctgaccagctgtatgagagctcactcaggggaacagaggaaacacctgaccttgttcacctcacgcacatgaccgatctgcaatcggcctatcatctacggattggattcgcctccatagcgtccagaccgtctgacagctccatgtggtatatgtgggtgctatggcctgtggcgtggctgtcaatggtgcttgcatgggtttatgggtcctctacgtttgtggttgagagaatcaaactagggaagctgaagatgcagacatgggcagtaccaagatacaacttccaatatggcctgagctgggagagagaatcgatcaacgacttaatcgaaaaggcgatattagatgctgatgcaagaggtgttaaagtgctcagtctaggactattaaaccaggcgaaacaactaaatggtggtggtgaactatttaggcagaagtatccaaaattaacagttcgccttgtcgatggaagtggcttagcgactgcggtggtgcttaaaagcattcctcatgacgcaaagcaagtttttcttcatgcaggcccttctaagatagcgtgtgccacagctttcgcattatgtgagaggggcgtccaggtgatcatgaatccaaagaaggaatatgatatgcttaagtcacagattgcagatagcaaagcaagctatttgaaacactccagcaaccacacgcctcagatttggctagtagacaacattgacgataaagaacagaagatggcaccacaaggagctatattcgttcctatctcacagttccccatcaagaaaattcgcaaggattgcacttacttgagcactccagcaatgaagatccctgaaacaatgcagaatatccatgcctgcgagaactggctgccaagaagggtgatgagcgcttggcgcatcggaggaatacttcacgccctggaagggtggaccatgcacgagtgtggggatgccatgatgcatactgagaaagcatggtcagctgctattaggcacggattcattcctctgactaaagcttga

SEQ ID NO: 2188 - protein, 619 aa, Sorghum bicolor
MATRPGPLTEWPWQRLGNFKYLVMGPVVVDGARRVVARGWGDIDLAFALILPSLLLRMAHNQIWISAARYQTARSKHRIVDRGIEFEQVDRERGWDDQIILNGLLFYAGYLAIPSARHLPAWRTDGAAVMALLHAGPVEFLYYWFHRALHHHFLYSRYHSHHHSSIVTEPITSVIHPFAEHMVYYVLFAIPMLSTVYIGNASVLGIVVYIAYIDFMNNMGHCNFELVPKWMFQVFPPLKYLMYTPSFHSLHHTQFRTNYSLFMPFYDYIYNTMDKSSDQLYESSLRGTEETPDLVHLTHMTDLQSAYHLRIGFASIASRPSDSSMWYMWVLWPVAWLSMVLAWVYGSSTFVVERIKLGKLKMQTWAVPRYNFQYGLSWERESINDLIEKAILDADARGVKVLSLGLLNQAKQLNGGGELFRQKYPKLTVRLVDGSGLATAVVLKSIPHDAKQVFLHAGPSKIACATAFALCERGVQVIMNPKKEYDMLKSQIADSKASYLKHSSNHTPQIWLVDNIDDKEQKMAPQGAIFVPISQFPIKKIRKDCTYLSTPAMKIPETMQNIHACENWLPRRVMSAWRIGGILHALEGWTMHECGDAMMHTEKAWSAAIRHGFIPLTKA

SEQ ID NO: 2189 - DNA, 537 bp, Sorghum bicolor
atgtcgacgcagtccatttcgccggcgtccgcggccgcgcagttcacctaccccgctgcggcggcggccgcggccgcggccacgggctcgtcctacttccccgtgccattccacctccagaacgcgcagtacgccgcatggccagcgggggccgcagctgccgcgccgccggtgcctgcgtacaacgccatctaccctatgccccaaatccagcaggcccaacagttgttccaaaaagactcgaacataattactcctgaagctctagctactgttaaggcagctattgcaaatagtgagaaagacaagaaggttgaagcaacaaaaaaggcagtgcctcgaaaggcggctgggcaaagttgggaagaccctaccttggctgattggcctgaaagtaagatatctaattctcaattgtcttttttttttcacaaagtttctcaaataccccaattctgtggttatggaatccttaacctggcaatgtggcggttttttagctcttattttccattatcttgcagacaacaaccatga

SEQ ID NO: 2190 - protein, 178 aa, Sorghum bicolor
MSTQSISPASAAAQFTYPAAAAAAAAATGSSYFPVPFHLQNAQYAAWPAGAAAAAPPVPAYNAIYPMPQIQQAQQLFQKDSNIITPEALATVKAAIANSEKDKKVEATKKAVPRKAAGQSWEDPTLADWPESKISNSQLSFFFHKVSQIPQFCGYGILNLAMWRFFSSYFPLSCRQQP

SEQ ID NO: 2191 - DNA, 909 bp, Sorghum bicolor
atggcactgagggagatcgagtcgacgttgccaccggggttcaggttctaccccagcgacgaggagctggtgtgccactacctccacaagaaggtggccaacgagcgcatcgcgcaggggacgctcgtcgaggtcgacctgcacgcgcgcgagccctgggagctcccagaggtggcgaagctgacggccaccgagtggtacttcttcagcttccgggaccgcaagtacgcgacggggtcgcgcaccaaccgcgccaccaagacgggctactggaaggccacgggcaaggaccgcgaggtgcgcagcagcagcagcagcggcgccgtcgtcggcatgcgcaagacgctcgtcttctaccggggcagagcccccaacggcgtcaagtccggctgggtcatgcacgagttccgcctcgacaccccgcattcgccaccgagggaggactgggtgctgtgcagggtgttccagaagacgaaaggcgacggcggcgacggccaagacggcgactactcctcctcctcgcccgcctttgccggcacgtcgcaagccatgccggacccggactactattccgcggcgtcgtcagcaggatcaggctactacggcctcgcatttgcgccgccgccgccgcagcagcaggaggaggtggcggcgcccgtgcttccacagtattactacggcggcacggtcgacgtcgaccaccaccaccaccaccacggcttcacgcgagacgacaacgtgggcgccgcgttgccagggttcggcggcgcgatgatgaggggatcatcagtcgccgccggcggtgatcagtacgggtttggatactttgacatgggcgggggcggctttgatgacatggccagctttggtggtggagacatggacttcgtccctcaagtgtggagctag

SEQ ID NO: 2192 - protein, 302 aa, Sorghum bicolor
MALREIESTLPPGFRFYPSDEELVCHYLHKKVANERIAQGTLVEVDLHAREPWELPEVAKLTATEWYFFSFRDRKYATGSRTNRATKTGYWKATGKDREVRSSSSSGAVVGMRKTLVFYRGRAPNGVKSGWVMHEFRLDTPHSPPREDWVLCRVFQKTKGDGGDGQDGDYSSSSPAFAGTSQAMPDPDYYSAASSAGSGYYGLAFAPPPPQQQEEVAAPVLPQYYYGGTVDVDHHHHHHGFTRDDNVGAALPGFGGAMMRGSSVAAGGDQYGFGYFDMGGGGFDDMASFGGGDMDFVPQVWS

SEQ ID NO: 2193 - DNA, 456 bp, Sorghum bicolor
atggccagcgtcgtcggtggagcagcagcggtcgcgagtgcggcggcggcggcggcggcggcggccggtggggcggcgggcgtgggggcgacgccgcacgtcctcgcggtggacgacagctccgtcgaccgcgccatcatcgctgccatcctacggagctcccggtttcgtgtgacggcggtggaaagtgggaagagggccctggaactgttgggcacggagccgaacgtgagtatgataatcactgattactggatgccagagatgacgggatacgagctcctcaagaaggtcaaggagtcatccaagctgaagcagatcccggtggtgatcatgtcctcagagaacgtctccaccagaatcagcagatgcctggaggaaggggcagaggatttcctggtgaagcccgtccgcgcgtcggacgtgtcgcgcgtcttcagccgcgtcctccgatga

SEQ ID NO: 2194 - protein, 151 aa, Sorghum bicolor
MASVVGGAAAVASAAAAAAAAAGGAAGVGATPHVLAVDDSSVDRAIIAAILRSSRFRVTAVESGKRALELLGTEPNVSMIITDYWMPEMTGYELLKKVKESSKLKQIPVVIMSSENVSTRISRCLEEGAEDFLVKPVRASDVSRVFSRVLR

SEQ ID NO: 2195 - DNA, 1086 bp, Sorghum bicolor
atggctctggtgccctcaggctcgggtgccggccaggtgatcgccgaggtggcgatgaacggcggcgccgacccgaacgcgaccaccgtgcgcgctaccgtcgtgcaggcgtccaccatcttccacgacacgcccgccactctcgataaagcagagagattgatagcagaagctgctgggtatggttcacagttagttgtctttccggaagcttttattggaggctatcctcgtggatccacatttggcttcgggatcagtattagtattattaatccaaaagacaagggaaaggaagcattccggaggtatcatgcagctgctatagatgtgcctggtccagaggttacacgattagctgctatggctggaaaatataaggttttcttggttatgggggtgattgaaagggaaggttataccctttattgttcagtgcttttctttgatcctcttggccgttacctgggtaagcaccgcaagctcatgccaacagcattagagagaattatatggggatttggggatggatcgactattcctgtttatgatactccacttggaaagattggggcgctcatttgctgggaaaataaaatgccacttttgaggacagcgctgtatggtaaaggtattgagatatactgtgcccccactgctgactccaggcctgtttggcaagcctccatgacacacattgctttggaggggggatgctttgtcttgtcagcaaaccaattctgccgcagaaaggactaccctcccccaccggagtatgagtttgctggtttaggtgaagagccatctgcagacactgttgtttgctctggaggcagcgttatcatttctccatctggagaagtcttagcaggtcccaactatgagggagaggcactgattacagccgaccttgacctgggagagattgttcgagccaagtttgatttcgacgtggtgggccactattctcgacctgaagtccttagcttggtagtgaatgaccagccacatctccctgtgtctttcacgtctgccggtgagaagactccagctgccaagagtgacagcgatgctaagtcttactga

SEQ ID NO: 2196 - protein, 361 aa, Sorghum bicolor
MALVPSGSGAGQVIAEVAMNGGADPNATTVRATVVQASTIFHDTPATLDKAERLIAEAAGYGSQLVVFPEAFIGGYPRGSTFGFGISISIINPKDKGKEAFRRYHAAAIDVPGPEVTRLAAMAGKYKVFLVMGVIEREGYTLYCSVLFFDPLGRYLGKHRKLMPTALERIIWGFGDGSTIPVYDTPLGKIGALICWENKMPLLRTALYGKGIEIYCAPTADSRPVWQASMTHIALEGGCFVLSANQFCRRKDYPPPPEYEFAGLGEEPSADTVVCSGGSVIISPSGEVLAGPNYEGEALITADLDLGEIVRAKFDFDVVGHYSRPEVLSLVVNDQPHLPVSFTSAGEKTPAAKSDSDAKSY

SEQ ID NO: 2197 - DNA, 1011 bp, Sorghum bicolor
atgcttcacaggaggagccgcacgctgggagggagcgccgatcgagctgctgcgcgccgagctgtcgcgacgatgaagggcgggaggggcagcaatggcgcggtcacggacctgctcgtctgcttcccgtcgcgggcgcacctcgcgctcatgccgcccaaggccatctgcagcccgtcgcggccgtccgcgtccgagccggtggtgaagcgccgccacagcaccagccgggcggggccgatgccgcccagcgggctctacaagtcggccacggccaggaacccgagccggcgcggcgcgggagatgtccccgtggacgacgagccgacgtcgcccaaggtgacgtgcgtggggcagatcaaggcacgcccggccaagcccaagggccccggcggcggaagcggtggcggtggcggtggcggtgggaagaagaccaagaaggccacgtggctgcaggctctggggatcaagaaggacgccatggcgctcttggacgccctgcacggcgctttcaggttcaacgtcgccggctgcttcggcagcttccccggcgccgtgggcgtggggtacacttccggggaggacgaggacgaggatgaagacgatgcgccgcgcaccgagaaggaaacagagcacggcgcggcgttggcccggtggttcatggtgttggaggaaggcaagaaagtgtctgccaagaagctgcagggacaagacccggaacagagccaggaggacgacaaggaggaagaagcggtcccgccggcgaacgcgctgatgctgatgcggtgccggtcggcgccggcaaagggattagcgaggaggctagaggcagaggagtgcgaggatgtgaagagcgccaagaagactccagaggaagagaaggagaaggagagccttgtgctcatgacatactcgccggacttcttcaaggtatcccttgacattgccaaggagacttggatcgtcggcggtgatgacgcagtcctgcgctgccggagctggaagcgatga

SEQ ID NO: 2198 - protein, 336 aa, Sorghum bicolor
MLHRRSRTLGGSADRAAARRAVATMKGGRGSNGAVTDLLVCFPSRAHLALMPPKAICSPSRPSASEPVVKRRHSTSRAGPMPPSGLYKSATARNPSRRGAGDVPVDDEPTSPKVTCVGQIKARPAKPKGPGGGSGGGGGGGGKKTKKATWLQALGIKKDAMALLDALHGAFRFNVAGCFGSFPGAVGVGYTSGEDEDEDEDDAPRTEKETEHGAALARWFMVLEEGKKVSAKKLQGQDPEQSQEDDKEEEAVPPANALMLMRCRSAPAKGLARRLEAEECEDVKSAKKTPEEEKEKESLVLMTYSPDFFKVSLDIAKETWIVGGDDAVLRCRSWKR

SEQ ID NO: 2199 - DNA, 1560 bp, Sorghum bicolor
atgcttgcctgctcaagcacatcaacaccatggccgcagcggcagccgccgtccccgtgcccagtcgcgggcggcgccgccccgcgccatgtggcactcgcggccaggggcaagcggcggggtgcgggcgccgccggagaggagggggtggacgaggcggcggaggcagcggagctggtgcgctcggtgctgcggaggacggccggcggcaaggagcggctggtgccggtgctggaccgccacgtgcggggggtccgcaccgagcactgcttcctcctcttcgaggagctcggccgccgcgatgcctggctccagtgccttgaggttttcagatggatgcagaaacaacggtggtatgttgctgacaacggcatctactccaagttaatatctgtgatgggaaggaaaggccagatacggatggcaatgtggttgttctctcagatgcggaacagcgggtgcaagccggacacttctgtatataactctcttatcggcgcacatctgcattcacgggacaagagtaaggctttggccaaagctcttggatattttgagaagatgaagtgtatagcgagatgccaaccgactattgtgacctacaacattcttctaagggcttttgcacaggctggtgacacaaagcaggtagacatcttgttcaaggatctggatgaaagtgtagtctcccctgacatatatacttacaatggagtgcttgacgcatacgggaagaatggcatgatcaaagagatggaatctgtgttgctgcggatgaaaagcaagcaatgccgtccagatgtgatcacattcaatatactcatagattcatatgggcgaaagcagatatttgataagatggagcaggtgttcaagagcctactgcgatcaaaggagaggcctacacacccgacgtttaattccatgataacaaattatgggaaagcaaggctcagagagaaagcagagtatgtggttaagaagatggaagaattgggatacaaaccaaactatgtgacacaagaatgcctcatcatgatgtatgctcattgtgattgtgtctcaaaggcccggcaagtgtttgatgagcttgtgagctcacaaaacaaagtgcaactttcttcgttgaactcgatgcttgatgcctactgcatgaacggcttgcacacagaagcagatcagctgctggatactgcactgcagaaatgtgttgtgcccaatggttcgacctacaagctgctctacaaggcctacaccagggcaaacgataaggtactagtgcagaagttgctcaagagaatgaataaacaggggattgtcccgaataaaaagttcttcctggatgctttggaagcatttggcacctctgagaggaaacccaggacatcaccagccataaactctgcaagcaaactaggtgcagattctgctggtgattcagaatcaggaagaatacatttgatctgcaccagaaccgttaatatagtgtacttggagctacagcagttcctctactcccaacaggaacaggacgctcctttccctactgaagaatgctga

SEQ ID NO: 2200 - protein, 519 aa, Sorghum bicolor
MLACSSTSTPWPQRQPPSPCPVAGGAAPRHVALAARGKRRGAGAAGEEGVDEAAEAAELVRSVLRRTAGGKERLVPVLDRHVRGVRTEHCFLLFEELGRRDAWLQCLEVFRWMQKQRWYVADNGIYSKLISVMGRKGQIRMAMWLFSQMRNSGCKPDTSVYNSLIGAHLHSRDKSKALAKALGYFEKMKCIARCQPTIVTYNILLRAFAQAGDTKQVDILFKDLDESVVSPDIYTYNGVLDAYGKNGMIKEMESVLLRMKSKQCRPDVITFNILIDSYGRKQIFDKMEQVFKSLLRSKERPTHPTFNSMITNYGKARLREKAEYVVKKMEELGYKPNYVTQECLIMMYAHCDCVSKARQVFDELVSSQNKVQLSSLNSMLDAYCMNGLHTEADQLLDTALQKCVVPNGSTYKLLYKAYTRANDKVLVQKLLKRMNKQGIVPNKKFFLDALEAFGTSERKPRTSPAINSASKLGADSAGDSESGRIHLICTRTVNIVYLELQQFLYSQQEQDAPFPTEEC

SEQ ID NO: 2201 - DNA, 993 bp, Sorghum bicolor
atggaggcgggcctggcgctgcagacgcgggccgcgggcttcggctccggacggcgccggggcggcctacagtcgcccatcgggagcctgagagtcgctgatccggcgggagctgcggttgccgcgggcttcggctccggacggcgccggggcggcctacagtcgcccatcgggagcctgagagtcgctgatccggcgggagctgcggttgccgtgcgggctcgcgggtccaagcccgtcgcaccgctccgtgccaagaaatcgttcggaggtcatgaaaacttgcataactccgttgacgaagctctcctgttgaagaggaaatccgaagaagttctgttctacttgaacgggaggtgtatttacttagtaggaatgatgggttctggaaaaagtacagtggggaagattatgtctgaagtcttgggttattcgttctttgacagtgacaaattagtggagcaagctgttggaatgccttcagttgctcaaatattcaaggttcatagcgaagccttctttcgggataatgagagtagtgtcttgagagatttgtcctccatgcaacgattagttgttgccaccggcggtggtgctgttatccgaccagttaactggaaatatatgaagaagggcctatctgtttggttagatgtgcccttggatgctcttgctaggcgtattgctaaagtgggaactgcctctcgtcctctcctggaccaaccatctggtgatccatacacaatggccttctctaagctcagcatgcttgcagagcaaaggggtgacgcttatgcaaatgcagatgtaagggtttctctagaagagattgcatctaagcaaggtcaccatgatgtctctaagctgacacccactgatatcgcaattgagtcacttcataagatcgagagcttcgtcagcgagcacactcctgataatccagctagcgactcgcaagctgagtcgcagatccaaaggatacagaccttgtag

SEQ ID NO: 2202 - protein, 330 aa, Sorghum bicolor
MEAGLALQTRAAGFGSGRRRGGLQSPIGSLRVADPAGAAVAAGFGSGRRRGGLQSPIGSLRVADPAGAAVAVRARGSKPVAPLRAKKSFGGHENLHNSVDEALLLKRKSEEVLFYLNGRCIYLVGMMGSGKSTVGKIMSEVLGYSFFDSDKLVEQAVGMPSVAQIFKVHSEAFFRDNESSVLRDLSSMQRLVVATGGGAVIRPVNWKYMKKGLSVWLDVPLDALARRIAKVGTASRPLLDQPSGDPYTMAFSKLSMLAEQRGDAYANADVRVSLEEIASKQGHHDVSKLTPTDIAIESLHKIESFVSEHTPDNPASDSQAESQIQRIQTL

SEQ ID NO: 2203 - DNA, 1437 bp, Sorghum bicolor
atgccggagctccgcctaccgataatcgccccggcagcggccgggtcccgtcgccattcccggaggctacggcgccgctgccgcctaatcctcctccctgtcctctccctcgccctcctctccctcgcctacctctccttttcttcccatgccaacctcccaatccacgcaatgcatcatggcctatctaataaggagaaccttttgaagtggaatggtcagggatacagccctgatgttacaaatatctctatgactaaagctgagttggaaacccccaaaagtcgaaagaaaccacacaagcgctatgcaccatgcgaaattcagtttttgccatcagttgatgatcttgtggagcctgctcactatgggaattttacacagttctctttgagctatatattgaaggaaaaagtattgctcggtaatggcttcttcgaaccagtatttggtggacaccagagtcttggggatagagaagagacataccatgctaaagaccaaaccctccactgcggttttgttagaggaccagatgattaccctagtaccggatttgatttggatgaaaatgatagaaggtatatggctacctgccatgttgctgtatcatcatgtatttttggaagctctgattacttgaggagaccaactaaaagcaggattggctcttacgctaagaagaatgtgtgcttcgtcatgttcatggatgagctaacaatggcaaccctttcctctgaaggacacatgcctgatggaaatggattcataggcttatggagaagtgttgtagttaagaacttaccatataaagatatgcgaagagctgggaaggtgccaaaatttctagctcatcgactcttcccatctgccatgtattctatatggttggatagcaaactgcgcctccatgctgatccaatgcttatcattgagtatttcttatggagaaagaaagcagaatatgccatctcaatgcactatgatcgctcttgtgtatgggaggaagtactccaaaacaagcggctgaacaagtacaatcatactgctattgatgagcaatttcacttttaccggtctgatggtcttgtcaagtttaataactctggccaactgcctgttcttccaagctatgtacctgaaggatcattcattgtgcgtgctcatacaccaatatctaacttgttttcatgcctttggtttaacgaagtaaaccgttttacctcacgtgatcaattgagttttacatacacttatttgaagctcaggagaacgaatccagggaaaccttttcacctaaatatgtttaaggactgcgaaagaagagcgatagctaaactgttccatcaccgaactaacgagactacagatccaccaccagctaatcttcgtttggacacgattcgtcattcatacaaggctgagactgccatttga

SEQ ID NO: 2204 - protein, 478 aa, Sorghum bicolor
MPELRLPIIAPAAAGSRRHSRRLRRRCRLILLPVLSLALLSLAYLSFSSHANLPIHAMHHGLSNKENLLKWNGQGYSPDVTNISMTKAELETPKSRKKPHKRYAPCEIQFLPSVDDLVEPAHYGNFTQFSLSYILKEKVLLGNGFFEPVFGGHQSLGDREETYHAKDQTLHCGFVRGPDDYPSTGFDLDENDRRYMATCHVAVSSCIFGSSDYLRRPTKSRIGSYAKKNVCFVMFMDELTMATLSSEGHMPDGNGFIGLWRSVVVKNLPYKDMRRAGKVPKFLAHRLFPSAMYSIWLDSKLRLHADPMLIIEYFLWRKKAEYAISMHYDRSCVWEEVLQNKRLNKYNHTAIDEQFHFYRSDGLVKFNNSGQLPVLPSYVPEGSFIVRAHTPISNLFSCLWFNEVNRFTSRDQLSFTYTYLKLRRTNPGKPFHLNMFKDCERRAIAKLFHHRTNETTDPPPANLRLDTIRHSYKAETAI

SEQ ID NO: 2205 - DNA, 1659 bp, Sorghum bicolor
atggaagcaggtggccacgcgttgcgcgccgtcggtgacgtcgtcttcttgggcgcgtacggccgccggttgtcgttgtcagcgacgatcgccgccttcgtggagtcgctgctccaggggtgggcggaggtcagggccgggctgctggtgccgctgctccgggccgcggtgctgctgtgcacggccatgtcggtgatcgtgctggccgagaaggtgttcctgggcgcggtcagctccgtgatgaagctgcggcgccggcggccgtcgcgggtgtacaggtgcgaccccatcgcgcggcccgacaaggacgaggaggcagctgcttatcccatggtgctcgtccagatccccatgtacaacgagaaggaggagcctgaaacgcttactacgcaggtgtaccagctatcaataggggcagcttgcaggctcacatggccggtagatcgactgatagtgcaggtgctggacgactccaccgacgccgtcatcaaggagctggtgaagggcgagtgcgagcggtgggccgcggaggggatcaacgtcaagtacgagacgcgcaaggacagggccgggtacaaggccggcaacctcaaggaagggatgcgccacgcctacgtgcgcggctgcgagttcgtcgccatgttcgacgccgacttccagccggcgccggacttcctcgtcaagaccgtcccgttcctcgtccacaacccaagcctcgcgctcgtgcagacgcgctggaagttcgtgaatgccaacgactgcttgctgacgagaatgcaagagatgtccatggactaccatttcaaggtggagcaggaagctggatcttcactctgcaacttctttggctacaacggaactgctggagtatggagaacgcaagcgattgtcgagtccgggggttgggaggaccgaactactgctgaggacatggacttggcactcagagcagggctcttgggctgggaattcgtttacgttgggagcataaaggtcaagaatgagctgccaagtactctcaaggcgtaccggtcccagcagcatcgctggtcatgtggacctgcgctcctgttcaagaaaatgttctgggaaattcttgctgccaagaaagtgtcggtttggaagaagttgtatatcatctatgacttcttcattgcccggaggatcataggcaccttcttcaccttcttctttttcagcgtcctgattcctctttacattctattaccagaagcgcagattcctgtgtgggagctgatctacatccctacagctatcactcttctcaactctgttgggactccaaggtctatccatctgattatactgtgggtcttatttgagaatgtaatggcgttgcatcggtttaaagccatcttgatagggtttttcgaagctgacagggccaatgaatggattgttacacaaaagctggggaacttgcagaagctgaaatcgattgccagtcttacagggaactatcgtttcaaagacaggttccatttcttggaggtatttatcggactattccttttggcctcggcatgcttcgactacttctacagagatgactatttttacctctttgttcttcctcaatcgatcatgtattttgcaattggatttcagttcattggtctcagtgtctcccaagactga

SEQ ID NO: 2206 - protein, 552 aa, Sorghum bicolor
MEAGGHALRAVGDVVFLGAYGRRLSLSATIAAFVESLLQGWAEVRAGLLVPLLRAAVLLCTAMSVIVLAEKVFLGAVSSVMKLRRRRPSRVYRCDPIARPDKDEEAAAYPMVLVQIPMYNEKEEPETLTTQVYQLSIGAACRLTWPVDRLIVQVLDDSTDAVIKELVKGECERWAAEGINVKYETRKDRAGYKAGNLKEGMRHAYVRGCEFVAMFDADFQPAPDFLVKTVPFLVHNPSLALVQTRWKFVNANDCLLTRMQEMSMDYHFKVEQEAGSSLCNFFGYNGTAGVWRTQAIVESGGWEDRTTAEDMDLALRAGLLGWEFVYVGSIKVKNELPSTLKAYRSQQHRWSCGPALLFKKMFWEILAAKKVSVWKKLYIIYDFFIARRIIGTFFTFFFFSVLIPLYILLPEAQIPVWELIYIPTAITLLNSVGTPRSIHLIILWVLFENVMALHRFKAILIGFFEADRANEWIVTQKLGNLQKLKSIASLTGNYRFKDRFHFLEVFIGLFLLASACFDYFYRDDYFYLFVLPQSIMYFAIGFQFIGLSVSQD

SEQ ID NO: 2207 - DNA, 3747 bp, Sorghum bicolor
atggagacctcggaggcggcggccgcgcatccgcagaaggatagcgtgaaggtggccgtcaacataaggccgctcatcacggctgagctgcaggagggctgcacggattgcgtcaccgtcacgcccggcgaaccgcaggttcaaattgggccccatgtcttcacctttgaccacgtctatggcagctcgggtccttcatcatcattaatatttgagcaatgcgtgcacccgttgattgatgcattgttcagcggatacaacgccactgtcctagcatatggccagactggttctggcaagacatacacaatgggtactgactacagttgtgaaggcaactctggagggataattcctcaagttatggatacaatatttagaaaagttgatacctcaaaggatggctccgagtttttaattagagtgtcttttattgagatattcaaggaagatgtttttgatttgcttgatgcaaatcaagctgctgcaagacctgatgcaggttctatggcaaaagcatcagcacctggcagagtgccgattcaaattcgagagactgcaactggaggcataacccttgctggtgtcacagaggctgaggtgaagtcaaaagaagaaatggcatcatatttgacacgtgggtcctcgtcacgtgcaacagcaagcacaaacatgaataggcagtcgagtcgctctcatgccatctttacaatatgcgtcgaacaaaagagaatatctggtacatctgacaagtcagccagcagtgattatgacataatatcatcgaagtttcaccttgttgatcttgctggttctgaaagggctaaacgtactggagcagatggacttaggcttaaagaagggatacacataaataaaggccttctagctcttggcaatgttataagtgcactaggcgatgaaaagaaaaggaaagaaggagcatttgtaccataccgggatagcaaattaacccgtcttttacaggattctctaggaggaaatagcaaaactgtcatgattgcatgcattagccctgctgatataaatgcagaagaaaccataaatacactcaaatatgccaatcgcgcacggaacattcaaaacaaagcagtggtaaaccgtgatccagctacagcagagatgcaaaaattgaggagccagctggagcagctgcaaactgagcttttgttttcccgcagtgggagtgcagcgttagaagaacttcagttgctgcagaaaaaggtctctcttcttgagctaaagaattctgagcttaacaatgaactcaaggaaagggaattgtcatgtgagcagttggcagagcgggcacgggctgctcagttggaaagggatcagttgatgctgaagattgaatccgcgaggaatggaaaatcatgggatgatattgaaaatgctgataatgaccaagacatggacctcttgaagggctacatatcgaaagtacagcagttggagagtgaactgatgcggcaaaacttctccaatgcttgcagacatggcttaaatgatcaacttgccatggagcgggacattttactaaatgaattgggttctggatgtgaagtaggaacacctgatgcttcaagtgaagttgatgaagaagaaaaggagagagaacattcatccatgcaagaccaacttgacaaagagctgcaggaactagataaacgtcttcagcaaaaggaggaagagatgaaacaatttgccaagagtgatacttctgttctcaagcaacattatgaaaagaagttaaatgagttggagcaagaaaagaaagctcttcagaaagaaatagagaatcttcgccatgctttaaccaatatatcttcttctacggatgacaatgctcaaaaactgaaagaaaactatcttcagaagctgaatgcacttgaatcccaggtccatgagctcaagaaaaagcaggaagctcaacaacagcttctaaggcagaaacagaaaagtgacgaggcagcaaaacgtttacaagaagatattcatcgtataaaatctcagaaggttcaacttcaacaaaagatcaagcaagaatctgaacaatttaggtcttggaaggctgcccgtgaaaaggaagtacttcagctcaagaaggaagggagacgaaatgaatatgagatgcacaagctcttggccttaaatcagaggcagaaaatggtcctacagaggaaaactgaggaagcagcagctgctacaaaaagattgaaggagttactggaagcaaagaagtcatcacgtgaaacatatggaggtgcaaatggttctgggatgcaggccttaatacgagctattgatgatgaactggaagtcactgtaagagcacacgaattacgctcatattacgagcgacaaatgcaggagagagcagcaatatccaaggaaatagcaaagctgaaggaggaatcaaagcacaagatgagtgattgtcctcaagctatgtctcctagtgctagaagttctaggatatcagcattagagaacatgttatcctcatcatctagtgccatggtgtctatggcttctcaactgtcagaagcagaggagcgggagcgtgtattcaatggtaaaggtagatggtaccatgtcaggtccctcccagaggcaaagaacataatgaactaccttttccagtcagcatcatccgcaaggtgtcaagtactggataaagaggtgatttgtaatgaaaaagaacacaccattagtgaattgaaggaaaaggtggttgtgcttaatagtggaatgaggcagttagaaacacaactgatggatctaaggagccaaaatacacagcttttcactgcattgaataatgcaaagaaatctgctaggtcaaatggcactggatttgctcagcgtaagagcgttcgatcttcccagcattttggttgtagtaaggacaacttcatcaattgggtggacgatatggacatttcagatggtgagcactcagacgagttagagagtatgagtgatggatctgattcagactgggtacagtcgaacaggaaagcgaaaaaacatcagagaagagtgtctagcaattcaaatcataagctggattgtcaaaatacacaagacaatgcagaaccagagaagccctcagatgaaaagtgcattctgccaaaaaatcttccatcagacggctgttcatgctcaaaatcctcatcatgcaagaccaacaagtgcgagtgcagaggctcaggtgcacaatgtggtgcaggctgtggttgtaaggactccaaatgttctaacagggattcttcttctactaaagaaaaggccaatcagggagccatgcttcttcagaacgcgttttctgagaaggaagcccaagatgcaaagccaagaaagcctttggctaacattggtaataatgtggttaaccaaactgccgagacagagaagaagcccaggaaaaactggcgcaagtcgacagttcaactcgtcccagggcctctcctgccgtcggagccagagaccaccgaagctgctcctcgggacagagccgatattcctctcaagctaccgagagccatgtcctcagggactcctgcggagagcaaccctccccccctcacggaccgcaatgctgccaagccccaccaatccgtgagcacaggcaacaaggatagcaccggaactgccgccacgaggccaccgtctcagctgagaaaaaacgcagccaccgagaaggagaaccagttgcgataa

SEQ ID NO: 2208 - protein, 1248 aa, Sorghum bicolor
METSEAAAAHPQKDSVKVAVNIRPLITAELQEGCTDCVTVTPGEPQVQIGPHVFTFDHVYGSSGPSSSLIFEQCVHPLIDALFSGYNATVLAYGQTGSGKTYTMGTDYSCEGNSGGIIPQVMDTIFRKVDTSKDGSEFLIRVSFIEIFKEDVFDLLDANQAAARPDAGSMAKASAPGRVPIQIRETATGGITLAGVTEAEVKSKEEMASYLTRGSSSRATASTNMNRQSSRSHAIFTICVEQKRISGTSDKSASSDYDIISSKFHLVDLAGSERAKRTGADGLRLKEGIHINKGLLALGNVISALGDEKKRKEGAFVPYRDSKLTRLLQDSLGGNSKTVMIACISPADINAEETINTLKYANRARNIQNKAVVNRDPATAEMQKLRSQLEQLQTELLFSRSGSAALEELQLLQKKVSLLELKNSELNNELKERELSCEQLAERARAAQLERDQLMLKIESARNGKSWDDIENADNDQDMDLLKGYISKVQQLESELMRQNFSNACRHGLNDQLAMERDILLNELGSGCEVGTPDASSEVDEEEKEREHSSMQDQLDKELQELDKRLQQKEEEMKQFAKSDTSVLKQHYEKKLNELEQEKKALQKEIENLRHALTNISSSTDDNAQKLKENYLQKLNALESQVHELKKKQEAQQQLLRQKQKSDEAAKRLQEDIHRIKSQKVQLQQKIKQESEQFRSWKAAREKEVLQLKKEGRRNEYEMHKLLALNQRQKMVLQRKTEEAAAATKRLKELLEAKKSSRETYGGANGSGMQALIRAIDDELEVTVRAHELRSYYERQMQERAAISKEIAKLKEESKHKMSDCPQAMSPSARSSRISALENMLSSSSSAMVSMASQLSEAEERERVFNGKGRWYHVRSLPEAKNIMNYLFQSASSARCQVLDKEVICNEKEHTISELKEKVVVLNSGMRQLETQLMDLRSQNTQLFTALNNAKKSARSNGTGFAQRKSVRSSQHFGCSKDNFINWVDDMDISDGEHSDELESMSDGSDSDWVQSNRKAKKHQRRVSSNSNHKLDCQNTQDNAEPEKPSDEKCILPKNLPSDGCSCSKSSSCKTNKCECRGSGAQCGAGCGCKDSKCSNRDSSSTKEKANQGAMLLQNAFSEKEAQDAKPRKPLANIGNNVVNQTAETEKKPRKNWRKSTVQLVPGPLLPSEPETTEAAPRDRADIPLKLPRAMSSGTPAESNPPPLTDRNAAKPHQSVSTGNKDSTGTAATRPPSQLRKNAATEKENQLR

SEQ ID NO: 2209 - DNA, 1164 bp, Sorghum bicolor
atggcgtcagctttgccgcaggagaaagagcagcagcaggcgcggcggccgatgcacgcgggggtcggcggcgctggcgccaatggccgccaccacgcgtacagccgcaaggacaagtctctcggcctcctctgctccaacttcgtggttctctacaaccgcgacgacgtggagtccatcgggctggacgaagcggccaaatgcctcggcgtggagaggcgccggatctacgacattgtcaacgtgctcgagagcgtcgggattcttgtgaggaaagccaagaatcgctacacctggataggtttcggcggagtcccaatggccttgcgagaactcaaggaaagggcgctaagagagaagtctggcttggctcctctgcaaaacgagcagcaatttgctggcattaattttggttgttacattttagatcataggaaggaaaagtcacttgggttgctcacacagaatttcgtgaagctcttcctcaccatggaggttgacacgatctcacttgatgaagctgcaaagctgctccttggagaaggccacgaggagaccaatatgagaactaaagtccggaggttatatgatattgctaatgtcctgtcttcattgaatctaattgagaagatacatcaaggggacacgagaaagcctgcttttcgttggttgggtagggccacaacgccgaacacagaaaacggtgtcacagttgctgtacccccaccagggaagaccacatcgaacaaaagagcatttggaactgaactcactaacattgacatacatagaagtaatctagattcaaaagttcagaagaaagcaaaactggcacagagtggtagtgatgtcttgacaaattgcaaattagctttgcggagtcagcttgggcagggtaaacaaagtggctttgtttatggtcatttccaccctgctggtgcgaggaaacatgaacttgatggtggcaataaacctgggcaaagggagagggctcaggactgggagagcctttctgcttcctttcgaccacagtaccagaaccaagcactcagtgatctttttgcccattatgtcgaagcatggaagacatggtattctgaatttgctcaaggtagcaacatcatgcaacaacactttggccattctgttaaccattttttgtag

SEQ ID NO: 2210 - protein, 387 aa, Sorghum bicolor
MASALPQEKEQQQARRPMHAGVGGAGANGRHHAYSRKDKSLGLLCSNFVVLYNRDDVESIGLDEAAKCLGVERRRIYDIVNVLESVGILVRKAKNRYTWIGFGGVPMALRELKERALREKSGLAPLQNEQQFAGINFGCYILDHRKEKSLGLLTQNFVKLFLTMEVDTISLDEAAKLLLGEGHEETNMRTKVRRLYDIANVLSSLNLIEKIHQGDTRKPAFRWLGRATTPNTENGVTVAVPPPGKTTSNKRAFGTELTNIDIHRSNLDSKVQKKAKLAQSGSDVLTNCKLALRSQLGQGKQSGFVYGHFHPAGARKHELDGGNKPGQRERAQDWESLSASFRPQYQNQALSDLFAHYVEAWKTWYSEFAQGSNIMQQHFGHSVNHFL

SEQ ID NO: 2211 - DNA, 1173 bp, Sorghum bicolor
atggccgcggccgccctccttcgccgcatccccgccgcgcgggccccggccacggccttcatggcggcgcgcccgatctccgattccacggcggcgctcaccatcgagacatctgtccctttcacctcccacctcgtcgacccaccctcgcgcgatgtcaccaccacccccgccgagctcgtcaccttcttccgcgacatgtccctcatgcgccgcatggagatcgccgccgactccctctacaaggccaagctcatccgcgggttctgccacctctacgacggccaggaggccgtcgccgtcggcatggaggccgccatcacccgctccgattccatcatcaccgcctaccgcgaccactgtacctacctcgcccgcggaggggacctcgtctccgccttctccgagctgatgggccgcgagggcggctgctcccgcgggaagggcggatccatgcatttctataagaaggatgccaatttctacggcggccacggcatcgtcggcgcgcaggtgcccctaggatgcggcctcgccttcgctcaaaagtacaagaaggaggacacggccacgttcgcgctctatggagacggtgcggctaaccagggacagctctttgaggctctcaacatttcggccctctggaagctgcctgccatattggtgtgcgagaacaaccattatgggatgggaacagcagagtggagggcagccaagagccctgcctactacaagcgtggcgactatgtgcctggattgaaggttgatggaatggatgttcttgctgtgaaacaagcatgcaaatttgcaaaagatcatgctgttgcaaatggcccaattgtccttgagatggatacctacaggtaccatggccactctatgtcagatccaggaagcacttaccgcaccagagatgagatttctggtgttaggcaggaacgggacccaattgaaagggttagaaaattgcttttgactcacgacctggcaactgctgctgagctcaaggatatggagaaagaaatcaggaaacaagtagatgacgccattgctaaagcaaaggaaagttctatgcctgatacttctgagctcttcacaaatgtttataagaagggcttcggtgtggagtcatttgggccagacaggaaggagttgagagcttcccttccttag

SEQ ID NO: 2212 - protein, 390 aa, Sorghum bicolor
MAAAALLRRIPAARAPATAFMAARPISDSTAALTIETSVPFTSHLVDPPSRDVTTTPAELVTFFRDMSLMRRMEIAADSLYKAKLIRGFCHLYDGQEAVAVGMEAAITRSDSIITAYRDHCTYLARGGDLVSAFSELMGREGGCSRGKGGSMHFYKKDANFYGGHGIVGAQVPLGCGLAFAQKYKKEDTATFALYGDGAANQGQLFEALNISALWKLPAILVCENNHYGMGTAEWRAAKSPAYYKRGDYVPGLKVDGMDVLAVKQACKFAKDHAVANGPIVLEMDTYRYHGHSMSDPGSTYRTRDEISGVRQERDPIERVRKLLLTHDLATAAELKDMEKEIRKQVDDAIAKAKESSMPDTSELFTNVYKKGFGVESFGPDRKELRASLP

SEQ ID NO: 2213 - DNA, 1071 bp, Sorghum bicolor; identical to SEQ ID NO: 377

SEQ ID NO: 2214 - protein, 356 aa, Sorghum bicolor; identical to SEQ ID NO: 378

SEQ ID NO: 2215 - DNA, 690 bp, Sorghum bicolor
atggacgcccgacgacaacgacggtcgccgtcgtgctcgtgctcgtgggcggccgccgcgcctctcctgctgctcctggcggtgtccttggggggtggccaccacgcggctgcagcgtcggacggagccgtcgtcggcggcgccccagccccaggcgccgccggcatgacggagctgcagaagcacgtggcgttcttcgaccgcgaccacgacggcatcgtcaccttcgacgagacctaccaaggtctggtggacgtcggagttggcgaagtcacggccaaagccagcgccgctctgatcaacggcgccctcggcgccaagaccagaccagacaatgccaacacctcgcgcatggatatctacatagagaacatccaaaagggtaaacatggaagcgacacaggcgcctacgacgctcaaggaaggtttgttcccgccaagttcgatgagatattcaccaagcacgccaagaccgtgccgaattccctgtcaaaagacgagctcgacgagatgctcaaggacaaccaggagaagaatgacttcgcaggatggttggcagccaagtcagagtgggagatgctgtacaaggtcgccaacaaggacgggcgcctgcccaaggacactgtgagggccgtgtacgatggaaccctcttttaccagctggcggcgcatcaggagaagaaggcctga

SEQ ID NO: 2216 - protein, 229 aa, Sorghum bicolor
MDARRQRRSPSCSCSWAAAAPLLLLLAVSLGGGHHAAAASDGAVVGGAPAPGAAGMTELQKHVAFFDRDHDGIVTFDETYQGLVDVGVGEVTAKASAALINGALGAKTRPDNANTSRMDIYIENIQKGKHGSDTGAYDAQGRFVPAKFDEIFTKHAKTVPNSLSKDELDEMLKDNQEKNDFAGWLAAKSEWEMLYKVANKDGRLPKDTVRAVYDGTLFYQLAAHQEKKA

SEQ ID NO: 2217 - DNA, 1473 bp, Sorghum bicolor
atggcggccgccgccgcgggggctacaccggcgactgcgaggaagactctcttcaccactacagtcaccctcctctcatcctcactcacacgtagcagcagcagcagcagccgcagccgcagcctctcctgctctgccgcgtccgccgccgccccgcgcctcgcgccgcagccgccggaccttgtccggtgggtgcagcgcgagggtggattcgtccaccctgccctccgcgtcgcgaatcacccggaacacgggctcggggtctctgccgccgcgcctgacggcgacatcccccctggggacgtcctcatcgcgctcccgggccggctccctttacgactacggcgccccaccggtgccgcggatgacgtgcttgtgcagctcgcccaacaagtcccggaggaactatgggctatgaagctgggcttgaggttgcttcaagaaagggccaaatctgattcattttggtggccgtatattgccaatttgccagagacatttactgttccaatcttctttcctggggaagacataaaaaacttgcagtatgctcctctcctccaccaggttaataaaagatgtcgttttctccttgagtttgagaaagagatacagcagaagcttcatactgtgccctcggtagatcatcctttctatggacaagatgtaaattcatcttcccttggatgggctatgtcagctgcctcttctcgtgcattccgattgcatggtgaaatcccaatgttgttgcctcttattgatatgtgcaaccatagtttcaaccccaatgctaggatcgttcaggaaggaagtgtaaacagcttagatatgtcagtaaaggttgtcgctgagaagaagattgagcaaaatgcatcaataacactgaactatggctgccacccaaatgatttctttcttcttgattatggatttgtgataacaccgaatccttacgatcaagtggaactaagttatgatggaacccttcttgatgctgcaagcatggcagcaggagtctcttctcccaacttttcagcgccagccaagtggcaacaagatatattgtcacagctaaatctgcatggagagggtgccattttaaaggtaagcttaggaggcccagacattgttgatggacgcttgttagctgctctaagggtgcttcttgcggatgatccagaggctttgcacaagcatgacctgaaaacactgatgtcccttgatgtgcaagctcctttaggccccgctattgaagcatcagcactccgaacagttcttgccctttgtgcgattgctctccaacacttccacacaaagataatggacgacgaggccattctaagaggggggccacctcttaccacggagctggctgtccagtttagattgcagaagaagttcatgatcgttgacgtgatgcagaatgtcagcaggagaatcaagatgctatcgccgcagaaatccaccgcgtag

SEQ ID NO: 2218 - protein, 490 aa, Sorghum bicolor
MAAAAAGATPATARKTLFTTTVTLLSSSLTRSSSSSSRSRSLSCSAASAAAPRLAPQPPDLVRWVQREGGFVHPALRVANHPEHGLGVSAAAPDGDIPPGDVLIALPGRLPLRLRRPTGAADDVLVQLAQQVPEELWAMKLGLRLLQERAKSDSFWWPYIANLPETFTVPIFFPGEDIKNLQYAPLLHQVNKRCRFLLEFEKEIQQKLHTVPSVDHPFYGQDVNSSSLGWAMSAASSRAFRLHGEIPMLLPLIDMCNHSFNPNARIVQEGSVNSLDMSVKVVAEKKIEQNASITLNYGCHPNDFFLLDYGFVITPNPYDQVELSYDGTLLDAASMAAGVSSPNFSAPAKWQQDILSQLNLHGEGAILKVSLGGPDIVDGRLLAALRVLLADDPEALHKHDLKTLMSLDVQAPLGPAIEASALRTVLALCAIALQHFHTKIMDDEAILRGGPPLTTELAVQFRLQKKFMIVDVMQNVSRRIKMLSPQKSTA

SEQ ID NO: 2219 - DNA, 477 bp, Sorghum bicolor
atgagggagcagcagggttccggcgacgtggcggcggggcggcggggcggggtcatcaggtcgctgctgggcgtcgagcgccggctcggggaaggcgacgcggacgccgccgagggggcggtcggagtctcctcggggaagcagccggccgccgcggacagccgtggcgaggagaggaaggccgtggtgagggtggtggcggccgacatgccgcccgcgctgcagcgccgcgcgttccgctgcgcccgcgacgagctcgccgccatgccgcacttcccgcgccggctcgagcccaagcgcctcgcgctcgcgctaaaaaaggagttcgatactgcatacgggccagcttggcactgcatcgtggggacgagtttcggttcatatgtcacgcacgctcgcggtggattcttgtatttttccgtcgataaggtctacatcctgctcttcaggacagccgtggagccctcatctcattga

SEQ ID NO: 2220 - protein, 158 aa, Sorghum bicolor
MREQQGSGDVAAGRRGGVIRSLLGVERRLGEGDADAAEGAVGVSSGKQPAAADSRGEERKAVVRVVAADMPPALQRRAFRCARDELAAMPHFPRRLEPKRLALALKKEFDTAYGPAWHCIVGTSFGSYVTHARGGFLYFSVDKVYILLFRTAVEPSSH

SEQ ID NO: 2221 - DNA, 1206 bp, Sorghum bicolor
atggacgccgtgctaccttccctcctcatcggcggcggactctccgtgtccgtctccattcccaccgccaccaaagccggcagccaatccatttcagtcccccacctctcgacctccgccctccgttcaacccctcgccgtcggggccgacggcgtttgaccctcctcgcctcatcttcgcagttgcctcccacgccactttccgccgcttcgactgagagccagtcgcgttcctccaggtgggtggttgtgatggatacgccctctgccgccgcgggaggcagcagggtgtcccgcgcagacgccgtggattactacgcagccacactggcccaggtcgtgggaagtgagaaggaggcgcagatgcgcatatatgaggcttcgtgggatggggcctacgagttccgctgcgagatcgacgaagatgcatcgaaggagcttgcaaagatgcctggagtgctatctgttcagccagatatggataacaaatcagagaagggtaatcacagcttgagtctctcgacatctaaccttgtaagcattagtgatagtgcttctacatcttcaagtgggaaaaatgagttttggcttgtccgaatggagaagcccggagttgaagtcgtgacgaaggcccaaatggtggatcactatacccaaatccttatgaaagtgttggggaacgaacaggatgcccaagttagcatatatcacatttcatgggagagggattatggtttctgctgtcatatagatgaagaatgcgcaaaagagttagctgatgttcctggagtgttatctgttcaacctgatatgaactttggatcagacaacaaagagtacaaagtttcaggtgatgatggcttgaaatcatctgaagggactgtagcagccgatatcaaaactaaaaggctctttgttacagggctttcattttatacatctgagaaaactttgcgggcagcatttgagcctttcggtgagctcgtcgaagtgaagataattatggacaggatatcaaaaagatcaaaaggttatgccttcatagaatacactactgaggaagctggaggtgctgctctaaaagcaatgaatggacagataataaacggctggatgatagttgttgatgttgctaaaactagatcgagagaccgtctatctggtggatctaatcaagcatttcgaccacactatcaggctagatga

SEQ ID NO: 2222 - protein, 401 aa, Sorghum bicolor
MDAVLPSLLIGGGLSVSVSIPTATKAGSQSISVPHLSTSALRSTPRRRGRRRLTLLASSSQLPPTPLSAASTESQSRSSRWVVVMDTPSAAAGGSRVSRADAVDYYAATLAQVVGSEKEAQMRIYEASWDGAYEFRCEIDEDASKELAKMPGVLSVQPDMDNKSEKGNHSLSLSTSNLVSISDSASTSSSGKNEFWLVRMEKPGVEVVTKAQMVDHYTQILMKVLGNEQDAQVSIYHISWERDYGFCCHIDEECAKELADVPGVLSVQPDMNFGSDNKEYKVSGDDGLKSSEGTVAADIKTKRLFVTGLSFYTSEKTLRAAFEPFGELVEVKIIMDRISKRSKGYAFIEYTTEEAGGAALKAMNGQIINGWMIVVDVAKTRSRDRLSGGSNQAFRPHYQAR

SEQ ID NO: 2223 - DNA, 1779 bp, Sorghum bicolor
atgggggcgctgccggtgggcctgccgccaatgccgccgcagctggggactctgcgatcgacgctggaccaccgcggcggggcgcgggagccgctgctcgcgttcgactggggcgtccccgacggtgagcacgcggcgtggggtgtggaggacggttccgcgaggggcgtcgtggggcgcctgcggcgggtggcccaggcggtgcgcgcgctcgccgtggagatgtgggcgttcgcgcgcaaggacccgcggaagcccgtgttcgcggcgaaggtggccgtggcgctcgcgctcatcacgctgctcgtcttcctccgcgagcccagcgatatcgccagccattctgtgtgggccatactcaccgtcgtcgtcgtcttcgagttcagcatcggtgcaactttgagcaaaggattcaacagaggattgggtactcttattgcaggggggcttgctctagctgtcgccgagttagcagcacaaatgggaaaatatgacatggtggtactcatcataagcacttttgtagttgcattctgtgccaccttgacgaagctgcacccgaagatgaaaccatatgagtatggatttcgtgtgttcttgctgactttctgctatgtcacggtctctgggtacaacacgggagaattcaccgctacggctataagtagatttctgttgatcgctcttggtgctgctgtcagtctcggcatcaacataggcatacacccaatctgggcaggagaggatctgcacacgttggtggccaaaaattttgctggtgttgcaaaatctttagaaggatgtgttgatggatatctgacctgcatggagtatgaaaggattccttccaagatactcacatacgaagcatctgatgatgatcctgtctatagcgggtacagggcagctgttgaggcatcaacacaggaggaagccttgttaggatgtgctatatgggagccgccgcatggaccttataagatgatgaaatatccatggaagagctacaccaaagttggtggtgcgttgaggcattgctcattctctgtcatggcattgcatgggtgcatactttcagagattcaggcaccaccggagagcagaaaggttttctgcgcagagcttcatagagtgggccatgaaggtgctaaagtgctgcgcgaacttgggcagagagtcaagacgatgacgaaactgagctctcgaaacattctttcagaagtgcactttgcagctgaagagctgcaaaagaagattgatgagaattcttaccttctcgtcaatacagaaagatgggaagtcattccgaggcatgccagaactgcacaaactcatgatggtgccaatgatgctgctgacaaggatgaatcacccgagaacaccactgtcgattcactgcacatatcaaacagcttcgcttcaaacccgtttctgagcagatattcttcaaatccgttcctcggcagatatgattcaggatcaatgatggtcggttcattgaaggcgcaatcatcatggcctgttcgacaatcttttcatccaagctttccatttgaaagtggggaatcaagaacttatgagagcgcaagtgccttgtcgctggccacattcgcatcgctcctcattgagtttgttgcccggctccagaatcttgttgatgcatttgaggagttgagcgacaaagctaacttcaaggaccctgtggaggaaccttcgacaatcagcagggagcctcctggggttttagctagaatacatgacttttttcggttgaagtga

SEQ ID NO: 2224 - protein, 592 aa, Sorghum bicolor
MGALPVGLPPMPPQLGTLRSTLDHRGGAREPLLAFDWGVPDGEHAAWGVEDGSARGVVGRLRRVAQAVRALAVEMWAFARKDPRKPVFAAKVAVALALITLLVFLREPSDIASHSVWAILTVVVVFEFSIGATLSKGFNRGLGTLIAGGLALAVAELAAQMGKYDMVVLIISTFVVAFCATLTKLHPKMKPYEYGFRVFLLTFCYVTVSGYNTGEFTATAISRFLLIALGAAVSLGINIGIHPIWAGEDLHTLVAKNFAGVAKSLEGCVDGYLTCMEYERIPSKILTYEASDDDPVYSGYRAAVEASTQEEALLGCAIWEPPHGPYKMMKYPWKSYTKVGGALRHCSFSVMALHGCILSEIQAPPESRKVFCAELHRVGHEGAKVLRELGQRVKTMTKLSSRNILSEVHFAAEELQKKIDENSYLLVNTERWEVIPRHARTAQTHDGANDAADKDESPENTTVDSLHISNSFASNPFLSRYSSNPFLGRYDSGSMMVGSLKAQSSWPVRQSFHPSFPFESGESRTYESASALSLATFASLLIEFVARLQNLVDAFEELSDKANFKDPVEEPSTISREPPGVLARIHDFFRLK

SEQ ID NO: 2225 - DNA, 1557 bp, Sorghum bicolor
atggcgaccaagggagggaacgcgaggggcgtcccggtgggggcgctgctggtggccgcgcttctccttagctccttggctcccgcctccgcgtcctcgtaccccgcaagggtggtgagcgggttcctctccaatgcggcgtcggcggtggtgaagcggatgtggtcgctcaaatccaccaccaagacagcagcgagcgggggcaagtcgatggtgaagtacgagggcgggtacaccgtggagacggtcttcgacggcagcaagctggggatcgagccctactccgtggaggtcacccagggcggcgagctgctcgtcatggactccatgaacagcaacatctacaggatggcgctgccgctctcccgatatagcaggccgaagcttgttgctggttcccctgaaggatttcctggtcatgttgatgggaagctgcgagaggcgaggatgaaccatccaaagggatttacagtggatgacaggggtaacatctatgtggctgatgcaatgaacatggccattagaaagatcagtgatacaggggttacaactattgctgggggaaaatcaggcagaggagggcatgttgacggaccaagtgacgaggcaaaattttctaccgattttgaagtccgctacgttggcagtagctgctcccttctggtgattgacagaggaaaccaagcaattcgggagattcagctccactttgatgactgtgtgtaccagtatgaagctggttttcctctaggagtcgcactgctgcttgctgccgctttctttggctacatgcttgcactgcttcaacgacgagttttagggatgtattcaaatggagatgagcaggaacatgagagtccagtaaaagctaaattatctagcattccacctccataccagaagccactgaagccttctcttcgccccccgctaattccaactgatgatgaacctgtgaaacaagaggaggaagaagggctcttcacgtcaatcggcaaacttgtgggtggagcaaaatcatcaattgcagagataatcggcgccgcattctccagaaagaagcgagtaaacattcatcaccatcaactgggtaggccaacctcctggccagtacaagaaagctatgccatcccgcgggacgagaccccaccaccactggacacaagagccccgacccctcgtaagaactacgccttcatgtccaaggagccagagaagatccaccacatacggcacggccggcctcagttacatggctggaccggagaagcagcacctcagcagcagcagcagcagcagccaccgtcgcagccgcaacaggtgcatcaccagcagtacctgcagcaccacaggcagtactcggcggggccgcagaccttctacgagccgagctgcgatgcgaccaaggagatcgtcttcggagccgtgcaggagggggacaccagccgccgtcccgtggagatcaaggccgtgaaccatggggacgcggcgtcgtacgagcagaacgggctgcgattccgcagcagttacagcatgggctacaatggcaacaactag

SEQ ID NO: 2226 - protein, 518 aa, Sorghum bicolor
MATKGGNARGVPVGALLVAALLLSSLAPASASSYPARVVSGFLSNAASAVVKRMWSLKSTTKTAASGGKSMVKYEGGYTVETVFDGSKLGIEPYSVEVTQGGELLVMDSMNSNIYRMALPLSRYSRPKLVAGSPEGFPGHVDGKLREARMNHPKGFTVDDRGNIYVADAMNMAIRKISDTGVTTIAGGKSGRGGHVDGPSDEAKFSTDFEVRYVGSSCSLLVIDRGNQAIREIQLHFDDCVYQYEAGFPLGVALLLAAAFFGYMLALLQRRVLGMYSNGDEQEHESPVKAKLSSIPPPYQKPLKPSLRPPLIPTDDEPVKQEEEEGLFTSIGKLVGGAKSSIAEIIGAAFSRKKRVNIHHHQLGRPTSWPVQESYAIPRDETPPPLDTRAPTPRKNYAFMSKEPEKIHHIRHGRPQLHGWTGEAAPQQQQQQQPPSQPQQVHHQQYLQHHRQYSAGPQTFYEPSCDATKEIVFGAVQEGDTSRRPVEIKAVNHGDAASYEQNGLRFRSSYSMGYNGNN

SEQ ID NO: 2227 - DNA, 2325 bp, Sorghum bicolor
atggatctggaggccgcgggcggcggggaggcggcgcaacgcaagcggcggaatggggagtcatggcgcgcgacgctgctgctcgcgtaccagagcctcggggtggtgtacggcgacgtggccacgtcgccgctctacgtctacaagagcgccttcgccggcaatgacatccagcactcggagggcaacgaggagatctacggcgtgctctcattcgtgttctggacgctgaccctcatcaccctcgtcaagtacgtgctcatcgtgctccgtgccgacgtcggcggggagggcggcaccttcgcgctctactccctcatctgccgtcacgtccgcgccggcctcctgcccggcggcggcaccagagacgagctcatggaggaagacaaggtcaccgggcgtcgtggcgagcggcccgtgtccagggtcagggcggtgctggagaagtacagagtgctgcagcggctgttgctgctcttcgcactgctcgggacatgtatggtcatcggggacggcgtgctcacccctgcagtctcagtgttttctgcggtatctgggcttgagttgtcgttggaaaaggaacagcacaaatatatagaacttccagtggcttgtgccatacttatatgcttgtttgcactgcaacactacggcacacacaaagttgggtttctttttgcaccaatcgtatgcatttggcttctctgcataagtgcaataggcctctacaatatcatccactgggaccaccatgtttatcgagccctctcgccatactacatgtatcaattcctccggaagactcaaactggtggctggatgtcactgggtggaatccttctttgtgtgacaggctctgaagctatgtatgcagatcttggacatttttcacaatcatcaatccagattgcattcatatccttggtttatcctgcacttgtattggcttatatgggacaagcagcttttatttcacaacatcacaacattgagagcagttatcatattggcttttatgtgtcagtaccagaaacactcagatggcctgttctggtgattgcgatactagcagctgtagttgggagtcaggcaattattactggaaccttttcaatcatcaagcagtgctcttcattaagttgtttccctggagtgaagattgtgcacacatcctcgacagtgcatggtcagatatacataccagaaatcaattggatgctgatgatactctgcctggctgttactattggcttcagagacacaaagcacttggcaaatgcacaagggttggcagtaataactgtcatgcttgttaccacttgcttaatgtcactcgttattgtgctttgctggaacaagagtatcttccttgcccttggtttcctgcttttctttggcacgatcgaagtaatctacttctcagctgcccttgtcaagtttcacgaaggtgcttgggttcctattactctctccttcatatttatggtggtcacgtgtgtctggcactatggcacaataaagaagtacgagttcgatgtgcaaaacaaggtttcagtaaactggctcttaaaccttggtccttcactgggcattgttcgtgttcgaggcattgggctaatacatacagaactaatgtctggaattccagctatcttctcccacttcgtcaccaatctgcctgcgtttcaccaggtactggtattcctctgtgtcaaatcagttcctgtgccgcatgtggaacctgaggaacgatttctggtgggtcgcattggtccaaaagagtataggttatacagggtcattgtcagatatggttatcgcgatgtgcagaaggatgatctagagttcgagaaggagctagtcagcaacattgcagagttcatccgcagcagtggggagtatgacaagaatggcttcgtcgaggacacagataagccctccgagaagctgtccaccatcagtactggaattaatatgtgggaagaggatggagaacttgatgcatctggaacccctcataaggagatagacccacacaatgcagtacccaagcaaaagaaagcaaggttcatgataccgaagagtgctcaggtggacagtgaggtgcgccgtgagctgcaggagctcatggacgctagggaggcaggcatgtccttcatcctggggcactcgtacatgaaggcaaagagcgggtcaagtttcataaagcgaattgtgataaacttcttctacgagttcttgaggaagaacagccgtggccctgcatacgctgcgaacataccacatgcctccactctggaggtaggaatggtctaccaggtctga

SEQ ID NO: 2228 - protein, 774 aa, Sorghum bicolor
MDLEAAGGGEAAQRKRRNGESWRATLLLAYQSLGVVYGDVATSPLYVYKSAFAGNDIQHSEGNEEIYGVLSFVFWTLTLITLVKYVLIVLRADVGGEGGTFALYSLICRHVRAGLLPGGGTRDELMEEDKVTGRRGERPVSRVRAVLEKYRVLQRLLLLFALLGTCMVIGDGVLTPAVSVFSAVSGLELSLEKEQHKYIELPVACAILICLFALQHYGTHKVGFLFAPIVCIWLLCISAIGLYNIIHWDHHVYRALSPYYMYQFLRKTQTGGWMSLGGILLCVTGSEAMYADLGHFSQSSIQIAFISLVYPALVLAYMGQAAFISQHHNIESSYHIGFYVSVPETLRWPVLVIAILAAVVGSQAIITGTFSIIKQCSSLSCFPGVKIVHTSSTVHGQIYIPEINWMLMILCLAVTIGFRDTKHLANAQGLAVITVMLVTTCLMSLVIVLCWNKSIFLALGFLLFFGTIEVIYFSAALVKFHEGAWVPITLSFIFMVVTCVWHYGTIKKYEFDVQNKVSVNWLLNLGPSLGIVRVRGIGLIHTELMSGIPAIFSHFVTNLPAFHQVLVFLCVKSVPVPHVEPEERFLVGRIGPKEYRLYRVIVRYGYRDVQKDDLEFEKELVSNIAEFIRSSGEYDKNGFVEDTDKPSEKLSTISTGINMWEEDGELDASGTPHKEIDPHNAVPKQKKARFMIPKSAQVDSEVRRELQELMDAREAGMSFILGHSYMKAKSGSSFIKRIVINFFYEFLRKNSRGPAYAANIPHASTLEVGMVYQV

SEQ ID NO: 2229 - DNA, 273 bp, Sorghum bicolor
atgtcggacgacactggccgcactatacccaagttcggcgaatgggacgtcaacaacccggcctctgccgacgggttcacggttatcttcagcaaagccagggatgagaagaaagccccgacgaccaaaccacaaccaggccacatcacccaaaggtcggcgtcggctgacagcaaggactccaggaccgacaagatgacctcctacaactccaggaccaacgcatcgaagaaatggttctgctgtgtctcgcccagtcctacacaatcttga

SEQ ID NO: 2230 - protein, 90 aa, Sorghum bicolor
MSDDTGRTIPKFGEWDVNNPASADGFTVIFSKARDEKKAPTTKPQPGHITQRSASADSKDSRTDKMTSYNSRTNASKKWFCCVSPSPTQS

SEQ ID NO: 2231 - DNA, 924 bp, Sorghum bicolor
atggaccagtcgtaccatggcggcgccgccgccgccgccgccggtggaagcgatggccaaattctctgggattggcaaacaggagagcactgcgaacctagcgatggaagtcatgatgctactaaattcttgtgggattgcctcaatcaagatgacaatgagctgctgggattgcttggaaatcgaaccccactgagagactgctgtgatttcttcgccgaccttggtgacatcacctgcaaggagaccctggacctggaggaatctcgggagtcaaagcggcggcgcatattggagtacccttcagagtctagtcagtcagaagttgcaagtcatgaaactggttctccttttgtcacatctgaggtagcagaggtttcattgctctgcactgatgaaccagagagcttaaattgtgatatgcagtacacttcaaataatttagatacgaattcaaatgaagcaccctatgagcaagaagataaccattttgaacattgctcttatggaaccccagtgtacatcgagcctgatcaagtgccttgtagctgggagagcattgcaaatattgatgatcaagctggtatttcaggaacaagcgagattgcaccgttgacagaaagtttcataatgcaggaaactaggaagctttctacactcaaagtctctaaaggtgcttcaacagttaaggtgaagcaaaacttaactacatcagtagcatacccttttactctcatcaaaccatcttgggaggaaggtgatgttactcttcaggatataaacaagcgaatccatgctcccccaaagaaggccccggagatcctgggaacttcagctttctctggcaagccagtgatcggcaagacaagaatcagaacagaaggggggagaggcagcatcacaattctaaggacaaagggctga

SEQ ID NO: 2232 - protein, 307 aa, Sorghum bicolor
MDQSYHGGAAAAAAGGSDGQILWDWQTGEHCEPSDGSHDATKFLWDCLNQDDNELLGLLGNRTPLRDCCDFFADLGDITCKETLDLEESRESKRRRILEYPSESSQSEVASHETGSPFVTSEVAEVSLLCTDEPESLNCDMQYTSNNLDTNSNEAPYEQEDNHFEHCSYGTPVYIEPDQVPCSWESIANIDDQAGISGTSEIAPLTESFIMQETRKLSTLKVSKGASTVKVKQNLTTSVAYPFTLIKPSWEEGDVTLQDINKRIHAPPKKAPEILGTSAFSGKPVIGKTRIRTEGGRGSITILRTKG

SEQ ID NO: 2233 - DNA, 372 bp, Sorghum bicolor
atggcggagaggaagcgcggcgccggcacccgcaaggatgaggtggtaacccgcgagtacaccatcaacctccacaagcgcctccacggatgcaccttcaagaagaaggccccaaatgccatcaaggagatcaggaagtttgctcagaaggccatgggtactacagatgtcaggattgatgtgaagctcaacaagcacatctggagcagtggtatccgtagtgtgccgaggcgagtccgtgtcagaattgcccgcaagaggaacgacgaggaagatgctaaggaggaactctactccctggtcacagttgctgagatccctccggagggtctcaaaggtttgggaactaaggttgttgaggatgaggattaa

SEQ ID NO: 2234 - protein, 123 aa, Sorghum bicolor
MAERKRGAGTRKDEVVTREYTINLHKRLHGCTFKKKAPNAIKEIRKFAQKAMGTTDVRIDVKLNKHIWSSGIRSVPRRVRVRIARKRNDEEDAKEELYSLVTVAEIPPEGLKGLGTKVVEDED

SEQ ID NO: 2235 - DNA, 4152 bp, Sorghum bicolor
atggcggggaaatccaagggtgggaagaacaaagggaaggcgcagggcgcgggtcagcccacctctgctgagccagaggtgctggcgactgacggagccgaagtggttaatccagagaatggggaagtgcacgaaacccctgccacggaggatggtgtggcagatgtggagaaacgagacggggatgccccggaggctgtgcagcctgcaagaaagccagctgaaggagagcttcatctctaccctgttcctgtcaggacacaatcaggtgaaaagctcgagctgcagctaagcccaggagattctgttattgacgttaagcaattcctcttggatgctcctgaaacatgcttctatacatgctatgatttgatattgcatactgaagatgggtcagctcatcagttagaagactacaatgaaatatctgaaatagcagatataacttctggtggatgttcactggagatggttgctgcaatatatgatgagaggtctattaggtcacatctccgacgtgtgagggagctactatccctgtctagtcttcatgtttccctatcaacatccttagctctgcagcatgagtctgctcagggaaaatctgcaggttctgaaaaaagccctattcaggagcttgatggtttaaattttatggaggatagtgctggtgctctcactaatttattggcttctgcaccaacagagataaaatgtgttgaaagcatagttttttcgtcgttcaatcctccgccgagttatcggaggttacatggagatctcatctatattgatgttgccacattagaaggaaacaaatactgcattaccggaagctccaaatctttctatgttaacagtagcaatggaagtatatttgactcgagacctacaaaacaagcactggaggccagcactcttgtaggtctactacagaagatcagtgccaaatttaagaaaggttttcgtgaagtcttggatcgcagggcatcggctcatccatttgagaatgttcagtctttgcttccagtgacttcttggttaggagcttatcctgtgccagcacatagaagggatgcagccagggctgaagactctgttgtgttgtcatatggcactgaattaattggcatgcagagagactggaatgaagaattgcagtcctgccgggagtttcctcatggcaatcctcaagaaaggatattgcgtggcagagcgctctacaaagtaacatgtgattttgttgatgctgctgtaaaaggtgccgttggtgtcattaatagatgtatacccccaataaatccaactgacccagaatgttttcatatgtatgttcacaacaatattttctttagttttgctgtcgactccgactatgaacacatttcaaaggaccacaagccagattgccaaaatggctccagcagaagcaccaaggtttcctccccagatgtgatcactaagccagatacaaaccatactgaatctgctgaggtagctgactcaaaatccgaagaggcacaacttgcagatagtgagcaggcgacatatgcttctgcaaacaatgacttaaaaggaactaaggcttatcaagaagctgatgtttctggcctttacaatcttgcgatggcaataattgattacagaggtcacagggttgtagctcagagcatcatacctggtattcttcaaggagacaagtcagattcccttctgtatggctctgttgataatggcaagaagatatcttggaatgaagccttccattcaaaggtagttgaggctgcaaagcggctccatttgaaggagcatgtggttttggatggttctggtaatcctgtaaaattagctgctacagtcgaatgcaagggcattgttgggagtgatgacaggcattacattttggatctgatgagagtgactccgcgagattctaactacattggacaagagcaccgcttctgcgtgttgagacctgaacttatagcatcatttgttgaggctgaatccattaaacaatcgtttaagcagaaggttccagatgctccagttgcaagtgcttctgatgctgaggctacctctgttgaaggagatgacaagtctgaagaaagctctgttcatacacacgaggaaaatgacaactcaacctctgagattcttttcaacccgaatgtgtttacggagtacaagcttgctggcagtccagaggaaatcactgctgatgaagtgttggtaaaaagggctggcacttatcttattgatatagtgatcccaaagtttgttcaggatctttgctcccttgatatctcccctatggatggacagactttaactgatgccttgcatctccatgggataaatattaggtacctgggcaagattgcaggcatggtcaaacatttaccacacttacgggatttgttttctgctgagataatagttagatctgcaaagcatgttatcaaggatatactgaggcaaagtttggatcatgatattgggccagctattgctcatttcttaaactgtttcgtggggaaagttttaggtgcttccacaaagggtagtcttagcaatgcgcagtcaaaaactctgaagggtcatgaaaatagccaaattcagaagtcctctaaaggccataaactgagcaatgctgctgcttcaagaaaaagcttatcagcttattcccatctaacctccgatggaatttggcttagcattaaggaatttgcaaaatcaaaatatcagtttgaagtgccagatgatgcaaggctttcagccaaaagggtagctgttctccgcaatctttgccaaaaggtaggaataacaattgctgcacgcaaatatgatctggatgcttcgactccatttgaagcctcagatatgttaaatctccaaccagttgtcaagcattctgttccaacctgtacagacgcaaagaatcttatggaagcagggaaagtcaggatggctgagggaacattgaatgaggcatatgcattgttttcagaagccttttcactgcttcaacagataactggacccatgcacaaggatgctgcaaattgttgccggtaccttgctatggttttgtaccatgctggtgatacagccggagcaattgtgcagcaacatagggaactcattataaatgagagatgtcttggtcttgatcatccggacacagcccacagttatggtaacatggcgttattctatcatgggctcaatcaaactgaactggcactgcggcacatgtcccgcacactgttgttgctaagtttggcgtcaggacctgatcacccagatgttgcagcaactctcataaatgttgcaatgatgtaccaggatgccagcaatatgaatactgctcttaggtatcttcaagaagcccttatgaagaatgagcgacttcttggccctgaccatgttcaaacagctgtgtgctatcatgctcttgccattgcattcagctgtatgagcttatataagctttcaattcagcatgaaaagaagacttatgatatactggtaaaacaattaggggaaaatgactcacggactaaagactcagaaaattggttgagtacttttaagcttcgagaagagcaggtcaacgcccagaagcagaagggccagggagctaatgcatccgataacgctgttaaattcttgaaggcaaaccctgcatttttacaagcaatgaaggctgctgcgatacaatcaggtgatgggtcagcaaatgtcaacaggtcgctcaatgcggcagtagttggagaaggtgtaccacgactgagaggagtggatgagcgagctgctcgagcgactgcagaagctcggaagaaagctgctgcaagaggtcttaatgtccgtaatggccctgcggcaaaccatgcgtctgatgaactagctcagattctcaaactcatcaacgctgcttcaggttcttccacttctgcctcagccaaaactgaggaatctgcctctgaagggcaggcaacaaatggatctgttcaaaacggaactgcaactgaagcgatagctgtggataccaatggcccatctgcatctgctaagtccactgttaacacaccagttggattggggacaacattggagttgaagaagcagaaatcaaagcaaaagtcgtag

SEQ ID NO: 2236 - protein, 1383 aa, Sorghum bicolor
MAGKSKGGKNKGKAQGAGQPTSAEPEVLATDGAEVVNPENGEVHETPATEDGVADVEKRDGDAPEAVQPARKPAEGELHLYPVPVRTQSGEKLELQLSPGDSVIDVKQFLLDAPETCFYTCYDLILHTEDGSAHQLEDYNEISEIADITSGGCSLEMVAAIYDERSIRSHLRRVRELLSLSSLHVSLSTSLALQHESAQGKSAGSEKSPIQELDGLNFMEDSAGALTNLLASAPTEIKCVESIVFSSFNPPPSYRRLHGDLIYIDVATLEGNKYCITGSSKSFYVNSSNGSIFDSRPTKQALEASTLVGLLQKISAKFKKGFREVLDRRASAHPFENVQSLLPVTSWLGAYPVPAHRRDAARAEDSVVLSYGTELIGMQRDWNEELQSCREFPHGNPQERILRGRALYKVTCDFVDAAVKGAVGVINRCIPPINPTDPECFHMYVHNNIFFSFAVDSDYEHISKDHKPDCQNGSSRSTKVSSPDVITKPDTNHTESAEVADSKSEEAQLADSEQATYASANNDLKGTKAYQEADVSGLYNLAMAIIDYRGHRVVAQSIIPGILQGDKSDSLLYGSVDNGKKISWNEAFHSKVVEAAKRLHLKEHVVLDGSGNPVKLAATVECKGIVGSDDRHYILDLMRVTPRDSNYIGQEHRFCVLRPELIASFVEAESIKQSFKQKVPDAPVASASDAEATSVEGDDKSEESSVHTHEENDNSTSEILFNPNVFTEYKLAGSPEEITADEVLVKRAGTYLIDIVIPKFVQDLCSLDISPMDGQTLTDALHLHGINIRYLGKIAGMVKHLPHLRDLFSAEIIVRSAKHVIKDILRQSLDHDIGPAIAHFLNCFVGKVLGASTKGSLSNAQSKTLKGHENSQIQKSSKGHKLSNAAASRKSLSAYSHLTSDGIWLSIKEFAKSKYQFEVPDDARLSAKRVAVLRNLCQKVGITIAARKYDLDASTPFEASDMLNLQPVVKHSVPTCTDAKNLMEAGKVRMAEGTLNEAYALFSEAFSLLQQITGPMHKDAANCCRYLAMVLYHAGDTAGAIVQQHRELIINERCLGLDHPDTAHSYGNMALFYHGLNQTELALRHMSRTLLLLSLASGPDHPDVAATLINVAMMYQDASNMNTALRYLQEALMKNERLLGPDHVQTAVCYHALAIAFSCMSLYKLSIQHEKKTYDILVKQLGENDSRTKDSENWLSTFKLREEQVNAQKQKGQGANASDNAVKFLKANPAFLQAMKAAAIQSGDGSANVNRSLNAAVVGEGVPRLRGVDERAARATAEARKKAAARGLNVRNGPAANHASDELAQILKLINAASGSSTSASAKTEESASEGQATNGSVQNGTATEAIAVDTNGPSASAKSTVNTPVGLGTTLELKKQKSKQKS

SEQ ID NO: 2237 - DNA, 1164 bp, Sorghum bicolor
atgggtgccggcggcaggatgaccgagaaggagcgggagaagcaggaacagctcgcccgtgctactggtggcgctgccatgcagcgatctccggtggagaagccaccgttcacggtgggtcagatcaagaaggccattccaccacactgcttcgagcgctcagtgttgaagtccttctcctacgtggtccatgacctcatcattgccgcggcgctcctgtactttgcgctggccatcataccggcgctcccaagcccgctccactacgcggcctggccgctctactggatcgcccaggggtgcgtgtgcactggcgtgtgggtcatcgcgcacgagtgcggccaccatgccttctccgactaccagctcctggatgacatcgttggcctggtgctgcactcgtcgctgatggtgccgtacttctcgtggaagtacagccaccggcgccaccactccaacaccggctccctggagcgagacgaggtgttcgtgccaaagaagaaggaagcgctggcgtggtacaccccgtacgtgtacaacaaccccgtcggccggctggtgcacatcgttgtgcagctcaccctcgggtggccgctgtacctggccaccaacgcgtcgggacgcccgtacccgcgcttcgcctgccacttcgacccctacggcccgatctacaacgaccgggagcgcgcacagatcttcatctcggatgctggcgtcatggccgtgtcgtttggtctgtacaagctggcggcaacgttcgggttctggtgggtggtgcgcgtctatgccgtgccactgctgatcgtgaacgcgtggcttgtgctcatcacctacctgcagcacacccacccggcgctcccccactacgattcgactgagtgggactggctgcgcggcgcgctggccaccatggaccgcgactacggcatcctcaaccgcgtgttccacaacatcacggacacgcacgtcgcgcaccacctcttctccaccatgccacactaccacgccatggaggccaccaaggcgatcaagcctatccttggcgagtactaccagttcgacccaactcctgttgccaaggcgacctggcgtgaagccagggagtgcatctacgtcgagcctgagaaccgcaagggcatcttctggtacaacaacaaattctag

SEQ ID NO: 2238 - protein, 387 aa, Sorghum bicolor
MGAGGRMTEKEREKQEQLARATGGAAMQRSPVEKPPFTVGQIKKAIPPHCFERSVLKSFSYVVHDLIIAAALLYFALAIIPALPSPLHYAAWPLYWIAQGCVCTGVWVIAHECGHHAFSDYQLLDDIVGLVLHSSLMVPYFSWKYSHRRHHSNTGSLERDEVFVPKKKEALAWYTPYVYNNPVGRLVHIVVQLTLGWPLYLATNASGRPYPRFACHFDPYGPIYNDRERAQIFISDAGVMAVSFGLYKLAATFGFWWVVRVYAVPLLIVNAWLVLITYLQHTHPALPHYDSTEWDWLRGALATMDRDYGILNRVFHNITDTHVAHHLFSTMPHYHAMEATKAIKPILGEYYQFDPTPVAKATWREARECIYVEPENRKGIFWYNNKF

SEQ ID NO: 2239 - DNA, 573 bp, Sorghum bicolor
atggccaccatcctggagaacatccagaaggcgaggttcctgccgaccaggccgctcaaggacgagctgcccaccttccagggcggcggtggtggcaaggaggagagccacctcatgggcctgaggaagcggctgtcctccttctcgggcaagatccagcccatctcctccgcgtcggccgagtgggcgttccggcgctccaagtcggcgccctccctcggcgccgcgttcgccgcggggggcggctccctgaggcagtggtggcagtggggcgtcggctggctcctgtccaagaagcccgggttcgcgggcgacctcgagatgaacgaggaggaggtcgccgcgctgggccgccagagcaggggcagctggggccacatcctctacaagatgcgctccggtgtccggcggctcgtcatgtccacgcactcgctccctaccacgcacaagcagtcgtccctgccgtcgtcggcgtcggcggtgcacaacaacgtccagtgcaagccggcggcggcgttcgcctacgcgcagcggcagagcttccaccacaccggccacgccatggcgcactaa

SEQ ID NO: 2240 - protein, 190 aa, Sorghum bicolor
MATILENIQKARFLPTRPLKDELPTFQGGGGGKEESHLMGLRKRLSSFSGKIQPISSASAEWAFRRSKSAPSLGAAFAAGGGSLRQWWQWGVGWLLSKKPGFAGDLEMNEEEVAALGRQSRGSWGHILYKMRSGVRRLVMSTHSLPTTHKQSSLPSSASAVHNNVQCKPAAAFAYAQRQSFHHTGHAMAH

SEQ ID NO: 2241 - DNA, 1080 bp, Sorghum bicolor
atggcgcgatgccaggggaccgtcgagagcctctgccaggggctgctcgacctcgacgacgacaggttcagcgcaatgtgcagcgccttcggctacctccaggagtggccggacctgggcgccatgtgcggcgcgaatctcgccgtgcctgccgtggcggcggcggcggcaccgagcgccggcgacggcaacgactcctcctcttgcagcggcagcggcgggatcaggaagaggagaccggacgcgtacctcgatgccaagggtggtgcaaacgacatgagcaagagacccagagggaagcagctgactggcctctctgagatcgcggcgcccgggaaagggaagcaggagcggccaaaggctggcaccaagaagaaggcggaggctgcgtcgacggcggcggcggcggcggcggcggcggcagcggctgccggccagaagaccgactacatccacgtccgggcccgccgcggccaggccacggatagccacagcctcgccgagcgggtgaggagggagaggatcagcgagcggatgcggtacctgcaggagctggtgcccgggtgcagcaaggtcacgggcaaggccggcatgctcgacgagatcatcaactacgtccagtcccttcagaagcaagtcgagttcctgtccatgaagatcgctgcttccaacccggtggtgagcttcgacatcgtcgaggacctcttcggccggcagctgaagcaggcggcagccctgcccgcgatggctctgccggccgggcagctggagccgtcctgccttcagatgagccccatgcagcaggtgcacccatctgcagccgcaggcggctccactggctttgggcttgagatggtcgtcaacaacctgtacgcgcccgccgccgcgagctgccctgtgtccgctgcgccgtcggtatcggcggctgccggaccgtcgacgatcgagccgtgcctcaacgtgaatggaactgctgctgcctgggatattggcgcccagaatttgttcagcggttttgatgcacaatttcagtcagtagaaagtgactgtttgctagacaacctcaaaatggaaatgtaa

SEQ ID NO: 2242 - protein, 359 aa, Sorghum bicolor
MARCQGTVESLCQGLLDLDDDRFSAMCSAFGYLQEWPDLGAMCGANLAVPAVAAAAAPSAGDGNDSSSCSGSGGIRKRRPDAYLDAKGGANDMSKRPRGKQLTGLSEIAAPGKGKQERPKAGTKKKAEAASTAAAAAAAAAAAAGQKTDYIHVRARRGQATDSHSLAERVRRERISERMRYLQELVPGCSKVTGKAGMLDEIINYVQSLQKQVEFLSMKIAASNPVVSFDIVEDLFGRQLKQAAALPAMALPAGQLEPSCLQMSPMQQVHPSAAAGGSTGFGLEMVVNNLYAPAAASCPVSAAPSVSAAAGPSTIEPCLNVNGTAAAWDIGAQNLFSGFDAQFQSVESDCLLDNLKMEM

SEQ ID NO: 2243 - DNA, 1173 bp, Sorghum bicolor
atgtccgtcgcgtccgtggccgccctccggacggccgcctccggctccggccggtgccacggcgcgggttccccacaggtcggcctgaacggtgggcgccctcgttctctaccagggggcaggttcttgatgatgcagaggagggagctggtgaccaaggccgggatcgcgctcgccgtctcctgctccatggcaacttctccagccccggccaacggctctgctcaagggctggaggttttgccgttcaaagcggacgggtacaacttctggacgtggcggggtcgccggatacactacgtcgagcaaggcgccgggcagcccattgtgctcatccacggcttcggcgcttccgccttccactggaggtacaacatccctgagctggccaagaagtacaaggtgtacgccatagacctgctggggttcgggtggagcgagaaggcgctggtggactacgaggccaccatctggatggagcaggtctccgacttcctccgggagatcgtcaaggagcctgccgtcctcgtaggcaacagcttgggaggtttcacgacgctgttcacggcaaccgaggtgccggagctggtccggggcgtcgtgctgctcaactctgccggccagttcggcgaccccaacaagccggccgccgcaccggccgaggaggaggagggcagcccgctgtccaggttcatcgtgaagccgctcaaggaggccttccagcgggtggtgctggggttcctcttctggcagtccaagcagcccgccagggtcgagaaagtcttgaaaagcgtgtacatagactccagcaacgtcgacgactacctggtcggttccatcacggcgccggcggcggaccccaacgccggcgaggtgtactacaggctgatgtcgcggttcatgtcgaaccagagccggtacacgctggaccggctgctggggaagctgtcgtgcccgctgctgctgctgtggggggacctggacccgtgggtcggcccggccaaggccgcgcggatccaggagttctacgccgacaccgccgtcgtgcacctgcaggccggccactgcccgcacgacgaggcgccggagcaggccaaccgggcgctgctcgagtggctcgcggctctcgacgcccgcgccaagccggccgagcccagcctccagaccgtctga

SEQ ID NO: 2244 - protein, 390 aa, Sorghum bicolor
MSVASVAALRTAASGSGRCHGAGSPQVGLNGGRPRSLPGGRFLMMQRRELVTKAGIALAVSCSMATSPAPANGSAQGLEVLPFKADGYNFWTWRGRRIHYVEQGAGQPIVLIHGFGASAFHWRYNIPELAKKYKVYAIDLLGFGWSEKALVDYEATIWMEQVSDFLREIVKEPAVLVGNSLGGFTTLFTATEVPELVRGVVLLNSAGQFGDPNKPAAAPAEEEEGSPLSRFIVKPLKEAFQRVVLGFLFWQSKQPARVEKVLKSVYIDSSNVDDYLVGSITAPAADPNAGEVYYRLMSRFMSNQSRYTLDRLLGKLSCPLLLLWGDLDPWVGPAKAARIQEFYADTAVVHLQAGHCPHDEAPEQANRALLEWLAALDARAKPAEPSLQTV

SEQ ID NO: 2245 - DNA, 1623 bp, Sorghum bicolor
atgaggatgaagacgctggcgtgctgccggcggcggccgcaggacttcagcatcgacatggacaaagagcccgacagggtgatgacatataatggcctcgagacctgcattatcaacagttccgcctatgacgatgatagtgccattagtgcaacaacaggcggagatggatgtgtcaccactgattcccttgatgatgaagtctctagttgctctagtaaagatgcttctggttcttccttctcttcacactgccttagcaagcaggatgagcattcactagatgagttgggtacacccatcgcaattcatctactccctttcaaagggaagaaaccaatcacatataccttgagcgcttcagatattgaaaacatgaaggaaaaatttgcaaagctattgctcggtgatgatacttcaggaggagctaggggcgtttgcgcggctctggccttgtccaatggcataatcaatctctctgcaactgtttttggagaactctggaagctggaaccattgtgcgaagataaaaagatcaggtggagaaaagaaatggactggttgctgtctcctacaacttatatggtggagttggttccaacgaagcaaagcggggcagatggatgcacatttgagattatgactccaaaggcccgctcagatgttcatgtgaaccttcctgcccttcagaagcttgatgcgatgctcattgaagtgatggactctatgatagatacagagttctggtatgaggagagtggtagcagagctgatggtcggggcaaaattacaggtccaaggaagagtaaaaagtggtggctcccatctcctcgtgtccctgaggaagggctatctcaatttcagcgaaaaaggcttgtttttcaggctaagcttgttcatcagatcctcaaagctgcaaaatccatcaacgaacaagtcctattccatatgcctattccggcagctgttatggatgcccttcctaagtctgggagagctagcttgggggaagatttgtatcaggctataaccacacagtatattcctatagaggaaatatttgtttcgctcagtttgaaaactgagcatagtgtgctcgagactattaaccggttggagggtgcagtgtttgcatggaaccaaagaattctagaggaaagaagcaagaggtccccaggacgccattcctggagcttcatgaaggatagctcatcagaacttgacaagatgtctgcatgcatcgaaagggttgacacacttgtgcagcttctgaaatccagatatccgaacctgcctccaacttttatagatgttttaaaggtccaatacaatgtggacgtggggcatgcaattgtggaggcctactctagggttcttgttggggtagcattcagcatactgtcacgtgtagccgagatactgctggaggatgacttgatcaagaagcccaacacccccatggccacactgaagttcgacctctcctcggacgtgtacttggcaggtatcacagagacgccaccgggacacatccgacggtcccttatggaccagatcagcatggttgacgggcgctttgatgctgttgtcaagaagaaaggggtgaaacagctgaggtggtga

SEQ ID NO: 2246 - protein, 540 aa, Sorghum bicolor
MRMKTLACCRRRPQDFSIDMDKEPDRVMTYNGLETCIINSSAYDDDSAISATTGGDGCVTTDSLDDEVSSCSSKDASGSSFSSHCLSKQDEHSLDELGTPIAIHLLPFKGKKPITYTLSASDIENMKEKFAKLLLGDDTSGGARGVCAALALSNGIINLSATVFGELWKLEPLCEDKKIRWRKEMDWLLSPTTYMVELVPTKQSGADGCTFEIMTPKARSDVHVNLPALQKLDAMLIEVMDSMIDTEFWYEESGSRADGRGKITGPRKSKKWWLPSPRVPEEGLSQFQRKRLVFQAKLVHQILKAAKSINEQVLFHMPIPAAVMDALPKSGRASLGEDLYQAITTQYIPIEEIFVSLSLKTEHSVLETINRLEGAVFAWNQRILEERSKRSPGRHSWSFMKDSSSELDKMSACIERVDTLVQLLKSRYPNLPPTFIDVLKVQYNVDVGHAIVEAYSRVLVGVAFSILSRVAEILLEDDLIKKPNTPMATLKFDLSSDVYLAGITETPPGHIRRSLMDQISMVDGRFDAVVKKKGVKQLRW

SEQ ID NO: 2247 - DNA, 840 bp, Sorghum bicolor
atgagcatgttcgaggggatggagagggccgggtacggcggcgctgggccgatgggcggggtggtgctgtcgcgggaccccaagccgcggctgcggtggacgcccgacctgcacgagcgcttcgtcgaggccgtcaccaagctcggcgggcccgacaaggcgacgcccaagtcagtgctgaggctgatgggaatgaaagggctcactttgtaccacttgaagagtcacctccagaaatacaggcttggaaagcagagcaagaaagacacaggtttggaagccagcagaggggcattcgcggcgcagggcatcaatttctccacaccagtacctcctagcattccatctacggccagtaacaatacgggagaaacgccacttgcggatgcgctgaagtaccaaattgaagtccaaaggaaactgcacgaacagctcgaggttcagaagaagctgcaaatgcggatcgaggcgcaaggcaaatatctgcagacgatactcgagaaagcccagagcaacctctcctacgacgcaaccggaggcgcaaatctagaagcaaccaggtcacagctgacggacttcaacctcgcgctctcagggttcatggacaacgtgacccaagtgtgcgagcagaaaaatggcgagctggcgaaagccatgtccgaggacggcctcagagcgagcaataatcttggatttcagctgtaccaccatggagttcaggacagggacgatgtcaagtgcgcgacggatgaagggctgctgctgctggacctgaacattagaggagggtacgatcaccgggcttcggcggatctgaagatgaatcagcacatgaggtaa

SEQ ID NO: 2248 - protein, 279 aa, Sorghum bicolor
MSMFEGMERAGYGGAGPMGGVVLSRDPKPRLRWTPDLHERFVEAVTKLGGPDKATPKSVLRLMGMKGLTLYHLKSHLQKYRLGKQSKKDTGLEASRGAFAAQGINFSTPVPPSIPSTASNNTGETPLADALKYQIEVQRKLHEQLEVQKKLQMRIEAQGKYLQTILEKAQSNLSYDATGGANLEATRSQLTDFNLALSGFMDNVTQVCEQKNGELAKAMSEDGLRASNNLGFQLYHHGVQDRDDVKCATDEGLLLLDLNIRGGYDHRASADLKMNQHMR

SEQ ID NO: 2249 - DNA, 1416 bp, Sorghum bicolor
atggacgcaggatcccactcgatctcctcggagaagagccgcgccgccgccgcgccccggccgccgctgcaggaggcggtctcccgcccctacatgccatcgctgggctcgggatgccgtaacccgtcggccaagtgctacggcgacagattcatcccggacagatcggcgatggacatggacatggcacacttcctgctcactgagcccaggaaggacaaggagaacgcggcggcgtccccgtccaaggaggcgtaccggaggctgctcgcggagaagctgctcaacaaccggacacggatcctcgccttcaggaacaagccgccggagcccgagaacgtatctttcgccgatgcggcttcctccaacctgcaggccaagcctgctaagcagcggcgccacattccccagtctgccgagaggaccctagacgccccagagcttgttgatgactactacctcaacctgcttgactgggggagcaacaatgtgctgtccattgctctgggagacacactgtacctgtgggatgcgtcgagtggatccacatccgagcttgtgaccatcgatgaggacagcggtcctattaccagtgttagctgggctcctgatggtcggcacatcgccgtggggctcaactcgtccgacgtccagctttgggacaccagctccaaccgactgttgagaacactcagaggtgtgcatgaggcaagggtaggttcactggcatggaacaacagcatcctaaccaccggtggcatggatggcaagattgtgaacaatgacgtgaggattagagaccacgttgtgcagacttacgaggggcacagccaggaggtgtgcgggctcaagtggtctggatcagggcagcagctggccagcggaggcaacgacaaccttctgcacatttgggatgtgtcgatggcatcatccatgccatctgctggccgcaaccagtggctacataggctcgaggaccacacggccgccgtgaaggcactcgcgtggtgcccgttccagagcaacttgcttgccactggcggtggtggcagcgatcgttgcatcaagttctggaacacacacactggtgcgtgcctgaactcagttgacaccggatcacaggtgtgcgctcttctctggaacaagaatgagagggagctgctgagttcacatggattcacacagaaccaactgactttgtggaagtacccatcgatggtgaagatggctgaacttactggccatacctctcgtgtccttttcatggctcagagtcctgatggatgcacagtagcgtcagctgctgcagatgagaccctccggttctggaacgtttttggagcccctgaagcgcccaagcctgctgccaaagcttcccacactgggatgttcaacagcttcaaccatatccgatag

SEQ ID NO: 2250 - protein, 471 aa, Sorghum bicolor
MDAGSHSISSEKSRAAAAPRPPLQEAVSRPYMPSLGSGCRNPSAKCYGDRFIPDRSAMDMDMAHFLLTEPRKDKENAAASPSKEAYRRLLAEKLLNNRTRILAFRNKPPEPENVSFADAASSNLQAKPAKQRRHIPQSAERTLDAPELVDDYYLNLLDWGSNNVLSIALGDTLYLWDASSGSTSELVTIDEDSGPITSVSWAPDGRHIAVGLNSSDVQLWDTSSNRLLRTLRGVHEARVGSLAWNNSILTTGGMDGKIVNNDVRIRDHVVQTYEGHSQEVCGLKWSGSGQQLASGGNDNLLHIWDVSMASSMPSAGRNQWLHRLEDHTAAVKALAWCPFQSNLLATGGGGSDRCIKFWNTHTGACLNSVDTGSQVCALLWNKNERELLSSHGFTQNQLTLWKYPSMVKMAELTGHTSRVLFMAQSPDGCTVASAAADETLRFWNVFGAPEAPKPAAKASHTGMFNSFNHIR

SEQ ID NO: 2251 - DNA, 2085 bp, Sorghum bicolor
atggaggcggcgacggccatggatttccactcgctctcgcgccgtgagctccaggcgctgtgcaagcgcaacggcgtccgcgccaacatgaccaactccgccatggccgatgcgctccagggcctagattcggtcgacgggatcgatgagatcggcacgactctctgtctcccgactccaggaaggtcggcgatgaagtcggcggcgaagatggtggccgtcgaggagcagcagcacggtagcccgctcccccgcggccgccgcgtgtcagtgaaatcacccgaggccatccggatggaggttgaaggaggagaggacgaggtgaaggagatcgtgaaaactcccggcgtcgctctgcgcagcacacgccgcggcactcgggcaacgcccgcaccgcttcctactccggtggcggcgtgcagtacgcgcgcaacagcgaggaggaccgccgctcgtaagacgggcgaggtggtgccgaccccagccacccggaggagccagaggacggcgtctcgcaaggccgcggaggcagtggaggcggaccgacccgccgatgatgtacccgaggaaaagatatcgaagatgacgatagctttggatcaggaagcagaggtcgtggcggccgcatcaaaggaggagaaggtgcataacgacgaaccgaaagctgattcctgtgatgaaactacagtgtctgcagctgttttggttaagagctgcaatgatcctaaggtggaggaagtggtggttgtcatggaggaacagtccgcaaagccccacgaaggaattgtgaaagagctggaacctatcagtgttgagacatctgctcttttgacagtcatggatgattcaccaatcttaggtgttgttgagaaggaacagggtgcctcggttgaagattgtgaggacttggctgaatcacctgcaagggagatcattcctgttactgaagataaggacttggctgaatcacctgcaagggagatgactgatgagatcattcctgttactgaagataaggaagtggccatcagtgaggaggttgttactgaagataatggagtggccatcagtgtggaggctactgaatataaggaagtggccatcatagaggaagtggcaatcaatgaggaggccgtcaaggaagatggttttgctaacactgttgagactgattctaccccagaggagattctgactgctgcgggagaagatgagaccattgaggaaggtgaagaagataagaccattgaggaaggtgaagtcatacttactgaaggcaaagaaagtgctgctgaagagatgttacaggctggtgagaccagtgaagaagatgaggaagaatacctcactgaattgaaacaaggggctgctgatgaggtgctgcaggctgagctggcagacagtgaaacaagtgaagaagatgaagatgacctgagtgaagagagagaaggagctgctgctaagatgctgcagggtgaaatgacagaagatgagatcagtgaagaagatggtctcgatgaggatgaggaatggtcttcagatgatgatgagaacactgaggaaattggctctactgacgagagcgatgaagatactgatgagagcagtgaagtccaaatgttgcagggaactgggataactgaagaggccaacgaagatgcctctactgaagatgatgatttcagtggtgacctaccaccagaatttgacaatatcatgatattcagtgatgctgaaactgagagtgacattgctcctccagtgctcgaggaaaaccaggctgctgttgcatctgcaaccaaaactgcaaagtctctggatgattctgccatgagttcagagcaggagggtcctgaggttgacaacattgtgaagtccctggatgagttcaccttcaaggagggagaatcagaggagatgcagaaggagcagccgcaggattataacagcatgagcctaaggaagcttaaaagcacgtacaagaaatgtcttattgctcaaaaggaaggaaagcaggaggaggtcaccgaagggaagaggcttcctctcgaggaggtggatgagaacgcctgcatcaaccactga

SEQ ID NO: 2252 - protein, 694 aa, Sorghum bicolor
MEAATAMDFHSLSRRELQALCKRNGVRANMTNSAMADALQGLDSVDGIDEIGTTLCLPTPGRSAMKSAAKMVAVEEQQHGSPLPRGRRVSVKSPEAIRMEVEGGEDEVKEIVKTPGVALRSTRRGTRATPAPLPTPVAACSTRATARRTAARKTGEVVPTPATRRSQRTASRKAAEAVEADRPADDVPEEKISKMTIALDQEAEVVAAASKEEKVHNDEPKADSCDETTVSAAVLVKSCNDPKVEEVVVVMEEQSAKPHEGIVKELEPISVETSALLTVMDDSPILGVVEKEQGASVEDCEDLAESPAREIIPVTEDKDLAESPAREMTDEIIPVTEDKEVAISEEVVTEDNGVAISVEATEYKEVAIIEEVAINEEAVKEDGFANTVETDSTPEEILTAAGEDETIEEGEEDKTIEEGEVILTEGKESAAEEMLQAGETSEEDEEEYLTELKQGAADEVLQAELADSETSEEDEDDLSEEREGAAAKMLQGEMTEDEISEEDGLDEDEEWSSDDDENTEEIGSTDESDEDTDESSEVQMLQGTGITEEANEDASTEDDDFSGDLPPEFDNIMIFSDAETESDIAPPVLEENQAAVASATKTAKSLDDSAMSSEQEGPEVDNIVKSLDEFTFKEGESEEMQKEQPQDYNSMSLRKLKSTYKKCLIAQKEGKQEEVTEGKRLPLEEVDENACINH

SEQ ID NO: 2253 - DNA, 3012 bp, Sorghum bicolor
atggccgggggcttggagtggaggagctctgcagccacaaccagaggagtcgagcaggccattattactctcaagaaaggttcacatctcctgaaatgtgggaagagagggaaacccaaattctgtactgtcaggctatcttatgatgagagagcactaatatggtactccaaagagagggaaaaacgtttaagcttgaattcagtgtccagtgtagttcttggacagaagactacaaaacttttgcgtctgcattggccagaaaaggaatctcactccttgtcagttatatacaagaacggcgaatcctcgctagatttggtacattcgctatatggcagtcctaggttgatacagaacaagtacttgcacagtaatttggattgttccgaaccattcttttctccaagacagaaagcatggtcagaactagattcctacttggaaaagattagtcccgaattggtaaatcgagtaaaaaataatttgagagacataagatctgctgaaacaattaaggaccaaagaattattcaaatgcctaaactcaaacaatctgagggatcaaatgcagcaacagattctctgaaggacatttttgtctggggtgatgttctgggtcgtatgtcagatcatggacatgtaccagcaaccaatatatcacttccaaggttattgaaatcatcgcagattcttaatgtgcagagcattgcttgtggagagaaacatgcggcaatagttactaagcagggtcaggtattctcttggggtgaggaaaatggagggagattgggacacaaaacaagtgacagtgtctctgatcctaagatcattgactctcttgcctccacacctgtgaagactattgcatttggggcaaagtacacctgtgcagtttcagtttcaggagaactttatgaatggggtgaagggattcatagcctagggttcgggaagaatcagtgtcaaagaagcccatggttcccacataaattgatcagtacttcagatggcatatctgtgttgaagattgcatgtggtcaatggcacacagctataatatcctccctaggtaagctgtacacatatggatatgggacatttggtgttcttggacatggtgacacacatagtgttgttcatccaaaagaagtggagtccttgagagggtcaagagccaagtctgtcgcatgtggaccatggcacactgctgctattgtggaaacatcaggaacactcaagagcagtgctcctggtgggaagctattcacatggggtgacgcaggtggagggaagctgggccacactaacaaaaagtcgaagcttgtaccaactcgcgttgaatcactcattgattgtgattttactcaggtatcctgcggtatgtcactaacagctgtgctaaccataacaggtgttgtatttaccattggaagcaaggaacatggtcaattagggaattctcggtctgacaacacatctatttgtatggttgaagggccactcaagactgagtttgtcaaagatatatcctgcggcagttcccatgtcgcagtcttgacaatgaatggaaaagtgtttacctggggcaaaggcacagaagggcaacttggtttaggggattatgttgacaggagctccccaactctggtggaggccctggaagacaaacaggtggacagtatagcatgttcttccaattttactgctgtaacttgtgtgcacagggaaatctcaagcaaggatcaatctgtgtgcagcagttgcaggttggcatttcggttcacaaggaagaagcataattgctacaactgtggttccatgttctgcaattcctgcagcagcaacaaggttcaaagggctgcccttgcaccagataagagcaaaaggtgtcgtgtttgtgatgcttgtttcaacgagctgaataaaacagctcagcacggcaaaatgagttgtggatcaaagacccaaaaagaagaatcgtctttaacagaaacaagaacatatacaccaaaattatcacgaatgcttaaggaagcaaatttcatcatggaaaaaatgggttctgcacaaagtcccaaccagagaaatcaggaatcagccactctgaatcaaatgcaaagacagaggtggggacaggtagaatgccctgatcaattcaaatgtgcaagagacaacattccacattggttgacatcaaagaagcagacaattgatgttctgtgtatagggagaatgactgatccagtctcacaaaagactactgcccctttgccacaagctactaatgatagaaggaaagaacaagatttgatggaaaaaatactgctggaggaggtgaaacagcttcaagcacagatggtgatcttgctattacctaagcaggtaaccactctagcagaagaatgccggcataggagcctgaaagttcagttgtataaacgaaaacttgaggaaacttggttgatagtgaaggatgaggccacaaagtgcaaagctgcaaaggagattataaagattttaacaaatcagaggaatgctttatcaaataaacttcttgatgatctagaactagatgattccagtatcgtgcccgacccacccgacaaaactcatgtcactggcaaaattccaccactaaacagcatcagggatcaacacaacaacaacatagaggaagtggatatgcaatctacaacatcttctaacactgctgtggtggataactcagctgtgcatcagaatggcagaagagcctccaatagcagcacagggtggtatgatgggggaacagatagcacaattgctcctactgactccaatggagtgatcgagcaaattgagcgtggggtgtacattacagtcgttacatcccccagtggtaataagggaatcaagcgcatccggttcagccggaagcattttggggaggctgaggcacagaaatggtgggaagacaatgagagcaaggtatttgcaaagtacaacagcatggaatacttggcagtataa

SEQ ID NO: 2254 - protein, 1003 aa, Sorghum bicolor
MAGGLEWRSSAATTRGVEQAIITLKKGSHLLKCGKRGKPKFCTVRLSYDERALIWYSKEREKRLSLNSVSSVVLGQKTTKLLRLHWPEKESHSLSVIYKNGESSLDLVHSLYGSPRLIQNKYLHSNLDCSEPFFSPRQKAWSELDSYLEKISPELVNRVKNNLRDIRSAETIKDQRIIQMPKLKQSEGSNAATDSLKDIFVWGDVLGRMSDHGHVPATNISLPRLLKSSQILNVQSIACGEKHAAIVTKQGQVFSWGEENGGRLGHKTSDSVSDPKIIDSLASTPVKTIAFGAKYTCAVSVSGELYEWGEGIHSLGFGKNQCQRSPWFPHKLISTSDGISVLKIACGQWHTAIISSLGKLYTYGYGTFGVLGHGDTHSVVHPKEVESLRGSRAKSVACGPWHTAAIVETSGTLKSSAPGGKLFTWGDAGGGKLGHTNKKSKLVPTRVESLIDCDFTQVSCGMSLTAVLTITGVVFTIGSKEHGQLGNSRSDNTSICMVEGPLKTEFVKDISCGSSHVAVLTMNGKVFTWGKGTEGQLGLGDYVDRSSPTLVEALEDKQVDSIACSSNFTAVTCVHREISSKDQSVCSSCRLAFRFTRKKHNCYNCGSMFCNSCSSNKVQRAALAPDKSKRCRVCDACFNELNKTAQHGKMSCGSKTQKEESSLTETRTYTPKLSRMLKEANFIMEKMGSAQSPNQRNQESATLNQMQRQRWGQVECPDQFKCARDNIPHWLTSKKQTIDVLCIGRMTDPVSQKTTAPLPQATNDRRKEQDLMEKILLEEVKQLQAQMVILLLPKQVTTLAEECRHRSLKVQLYKRKLEETWLIVKDEATKCKAAKEIIKILTNQRNALSNKLLDDLELDDSSIVPDPPDKTHVTGKIPPLNSIRDQHNNNIEEVDMQSTTSSNTAVVDNSAVHQNGRRASNSSTGWYDGGTDSTIAPTDSNGVIEQIERGVYITVVTSPSGNKGIKRIRFSRKHFGEAEAQKWWEDNESKVFAKYNSMEYLAV

SEQ ID NO: 2255 - DNA, 768 bp, Sorghum bicolor
atggggaggggacgagttgagctgaagcggatcgagaacaagatcaaccgccaggtcaccttctccaagcgccgcaacggcctgctcaagaaggcgtacgagctctccgtgctctgcgacgccgaggtcgcgctcatcatcttctccagccgcggcaagctctacgagttcggcagcgccggcataactaaaacactagaaaggtatcaacattgctgctacaacgctcaagattccaatggtgcactctctgaaactcagagctggtaccaggaaatgtcaaaactgagggcaaaatttgaagccttgcagcgcactcagaggcacttgctcggggaggaccttggcccactgagtgttaaggaattgcagcagctagagaaacagctagaatgtgctttgtcacaggcaagacagagaaagacacaacttatgatggagcaagtggaagagcttcgcagaaaggagcgtcacctgggagaaatgaacaggcaactcaaacacaagcttgaagctgaaggttctagcaactacagaaccttgcagcatgccgccgcctggccagctcccggcggcaccatcgtggagcatgacggcgccacgtatcatgttcatccacctgctcactcagttgctatagactgtgaacccactctgcaaattgggtaccctcatcaccagtttctgccttctgatcaggcagccaataatatcccaaggaacgcccccggaggcgagaacaacttcatgctgggatgggttctttga

SEQ ID NO: 2256 - protein, 255 aa, Sorghum bicolor
MGRGRVELKRIENKINRQVTFSKRRNGLLKKAYELSVLCDAEVALIIFSSRGKLYEFGSAGITKTLERYQHCCYNAQDSNGALSETQSWYQEMSKLRAKFEALQRTQRHLLGEDLGPLSVKELQQLEKQLECALSQARQRKTQLMMEQVEELRRKERHLGEMNRQLKHKLEAEGSSNYRTLQHAAAWPAPGGTIVEHDGATYHVHPPAHSVAIDCEPTLQIGYPHHQFLPSDQAANNIPRNAPGGENNFMLGWVL

SEQ ID NO: 2257 - DNA, 1383 bp, Sorghum bicolor
atgtctccatccgacgacggcgaggagaccctcgccgcgctcatagaagcctccaggaccccggagggccgggagggcctctccgacgtgctcgacgacaccctcttcctcctcccggcctccccgtcgcgcctcctgctcctgcgcctccgcctcctccgcaacctccttgcgggccacgagctcaaccagtacgccttcatcgagcgctgcggccccgccgccgtcgccgcctccgtgctctccttcccctcgctcgcccccgacgtggcgcgcgccgcgctccaggcgctcgggaacgccgcgctcgccggggagttccaccgcaacgccgtctgggaggcgctcttccccgaggtgctgcaggagttcgcggggctcagggaccagggagtcctggatcccctgtgcatggtcctcgacacgtgctgcggcggggaaggcggtcgtgggaggctcgaggagctgtgccacgaggagctaggcctgccaatcctcgtccaagttgtcactacggcctcgcaagtggggcacaaggaagagtggttagagtggcttctgttcaaagtctgtgttgaggagcagaagttcgagagcttgttctatgccttatgctccactaatgatgtcgagcacacagacagtggcgagtataatgccaagcatgtttttcttctgggtacactgtcaaggtgtttgaacagccaccccaaagaagttactgtctcggacggttttgcacatgatgttttcaatctacacaagcatgctgccgaaactgtgaattttactcaccgaggtacgtcccctcttccaactgggagccctgcaatcgatgtccttggatatacactgcagctcctgagggacatttgtgcctgggaatccacctcatcagatactcaacgtcctgttgactcgctattgcagactggctttgtacagcgccttctgagatacctaggtgagcttgagccaccaagtacaatcagaaaatcaatggcaggaggacaaggagataaccatccagctcttgaaaatgcaaaggtctgcccatacattggttacaggagagatttgattgcggtcattgctaattgcttaaacggaaggaagaaggtgcaagatgagattaggcagttaggtgggatcatgttgctactgcagcaatgtgtcatcgatgaagataatccatacttgagggagtggggtctgctggctgttaagaacttgcttgaagaaaatgaagaaaatcagaaggaggtttctgaacttgagatgcaagaacctgttataactccagagattgctaacataggtctcaaggtggagatagacaaggaaacaggtcgtccaaaactggtcaatacttctgatacctga

SEQ ID NO: 2258 - protein, 460 aa, Sorghum bicolor
MSPSDDGEETLAALIEASRTPEGREGLSDVLDDTLFLLPASPSRLLLLRLRLLRNLLAGHELNQYAFIERCGPAAVAASVLSFPSLAPDVARAALQALGNAALAGEFHRNAVWEALFPEVLQEFAGLRDQGVLDPLCMVLDTCCGGEGGRGRLEELCHEELGLPILVQVVTTASQVGHKEEWLEWLLFKVCVEEQKFESLFYALCSTNDVEHTDSGEYNAKHVFLLGTLSRCLNSHPKEVTVSDGFAHDVFNLHKHAAETVNFTHRGTSPLPTGSPAIDVLGYTLQLLRDICAWESTSSDTQRPVDSLLQTGFVQRLLRYLGELEPPSTIRKSMAGGQGDNHPALENAKVCPYIGYRRDLIAVIANCLNGRKKVQDEIRQLGGIMLLLQQCVIDEDNPYLREWGLLAVKNLLEENEENQKEVSELEMQEPVITPEIANIGLKVEIDKETGRPKLVNTSDT

SEQ ID NO: 2259 - DNA, 795 bp, Sorghum bicolor
atggctaccaagatggtcctgtgtcgctttgtggccttggcggctctcgcctgcctcctccgccctggcgcgcccgtcgagctccaccgcaggctctccgcctggtccggcgacgccggcgcgacgtggtacggcgcacccaccggcgctgggagcgacggtggtgcgtgcgggtaccagaacgccgtcgaccagccgccgttctcgtccatgatcgccgccggcagcccgtccatcttccagaacggcgagggctgcggctcctgctatcaggtgaaatgcaccggtcacgcgtcgtgctccggcagcccggtgacggtggtcctgaccgacgagtgccccggcggcgcgtgcctggccgagcccgtgcacttcgacctgagcggcacggcgttcggagccctggcgaagcccggccaggccgaccagctccgcagcgccggactcctcaagatccagtacactcgggtgccgtgcaactggaacgggatggacatcgcgttcaaggtggacggcgggtcgaacgcgaactacttggcggtgctgatcgagtacgagtccggcgacggcgagctgaggtccgtggagctcatgcagcgcggcggcgcggcgtgggcgccgatgcagcggtcgtggggcgccgtgtggaggtacaactccggcgccgccctgcaggcgcccttctccgtccgcctcacctccggctccggcaggacggtcgtggccaccaacgtcatccccgcggggtggtcgcccggcgccacgtaccgctcggtcgtcaacttcaacaactaa

SEQ ID NO: 2260 - protein, 264 aa, Sorghum bicolor
MATKMVLCRFVALAALACLLRPGAPVELHRRLSAWSGDAGATWYGAPTGAGSDGGACGYQNAVDQPPFSSMIAAGSPSIFQNGEGCGSCYQVKCTGHASCSGSPVTVVLTDECPGGACLAEPVHFDLSGTAFGALAKPGQADQLRSAGLLKIQYTRVPCNWNGMDIAFKVDGGSNANYLAVLIEYESGDGELRSVELMQRGGAAWAPMQRSWGAVWRYNSGAALQAPFSVRLTSGSGRTVVATNVIPAGWSPGATYRSVVNFNN

SEQ ID NO: 2261 - DNA, 297 bp, Sorghum bicolor
atggctacgacctgtttccgcgccgccgcccgcgtggcctcggctgccggccgctcggcggcggcctcccgctccgctccctccgcggcccgcgccgctgccgctgccgctgccgcaggccgcggggcctcgtgcttctccagggtgccggtggagctcgggtgctgcgcgggattgtcgctgctgccgctgcacagcgcggtggcggcggccaggctgacgtcgcggctgagcacggcgtcgagctgccgtgctctctctcagggtatcctctgtcgcacctatcccgggctttaa

SEQ ID NO: 2262 - protein, 98 aa, Sorghum bicolor
MATTCFRAAARVASAAGRSAAASRSAPSAARAAAAAAAAGRGASCFSRVPVELGCCAGLSLLPLHSAVAAARLTSRLSTASSCRALSQGILCRTYPGL

SEQ ID NO: 2263 - DNA, 1053 bp, Sorghum bicolor
atggccaccggcagcgtagccccaagccccacgcaagccagcagcaatgtctcacggccgacgatccccacaggcctcgtgcccgtggccgtgcttctcgccgccgccgccgtcctcctcgcgctgctgccgtcgctggcccaggcggtgtgggaggtgccgcacctcttcctcctaggcgccgtcatctccttcggcgtcttcacgcagaggaacaacgacgccgatggcaacggcaatgccgccggcgccaagcgcagctcgctggcgtggaacgcgcggtaccaccccgccgacgaccccctcgtcgtgatcgctgatcatcacgcggtgccgagcgacgaggacgacgacggcggtctggaaggcgcacgacgggagaggccgctttccttgccggtgcggaggctgaagcctgcgtctgcgtctgcgtctgcgtctgcggcgcaggagtccgaaaccggcggcgacgccagctgtggtggtttcggcgaagagacggatagctgcgcgtcgtcgtcagggttttgggccggcgcgcgcgccgtcccttcgccgccctctgttctcgacgccgacctggacttctctccgtgctcacagccgccacagtctgaacggccgttctttgtccaacacagcgccaacaggtcccgtgggtccaatgccgcgacgccgacgccgacgccgacgccggcgtccaccgtcccgaggggcttcgtgcaggggtaccagtaccatccttcggcgcccggcgaccagccgttgagtgacgacggcgaggtcaccgactgggacgatgaggacgccgccgacggttccgatattgagatgacacccgtgtcgtcagaaaggtcggtccgtggcgacgacttcgccgcttgtgacgacgatcataacgacggcgacggcgacggcgacgacacgtccgtggatgaagagcttctgaagctggcggcgaaggcggagccggacggggaggaggaagtggacaggaaggccgacgagttcatcgccaagttcagagagcagatcaggctgcagaggcactag

SEQ ID NO: 2264 - protein, 350 aa, Sorghum bicolor
MATGSVAPSPTQASSNVSRPTIPTGLVPVAVLLAAAAVLLALLPSLAQAVWEVPHLFLLGAVISFGVFTQRNNDADGNGNAAGAKRSSLAWNARYHPADDPLVVIADHHAVPSDEDDDGGLEGARRERPLSLPVRRLKPASASASASAAQESETGGDASCGGFGEETDSCASSSGFWAGARAVPSPPSVLDADLDFSPCSQPPQSERPFFVQHSANRSRGSNAATPTPTPTPASTVPRGFVQGYQYHPSAPGDQPLSDDGEVTDWDDEDAADGSDIEMTPVSSERSVRGDDFAACDDDHNDGDGDGDDTSVDEELLKLAAKAEPDGEEEVDRKADEFIAKFREQIRLQRH

SEQ ID NO: 2265 - DNA, 159 bp, Sorghum bicolor
atgtatgtgcatcactcgctcggcagaagccggcctcggatcaagtgttggattatgcatcagttgatcttcactatccaaaatcaaattactgagcaggaaaaacaacagcaaaaaaaagattggaggggatctgtagttactcagtggtggcaatag

SEQ ID NO: 2266 - protein, 52 aa, Sorghum bicolor
MYVHHSLGRSRPRIKCWIMHQLIFTIQNQITEQEKQQQKKDWRGSVVTQWWQ

SEQ ID NO: 2267 - DNA, 2325 bp, Sorghum bicolor
atgctctgctccggccgcatgctggcctgcaacggcctcttgcccggtcggctccggctgccgagggccgacgcctaccgcctgcgcccaccagcgctcgcgcggaggtggagcgtcgcggcctccgctgcggcgtccggcggctcatctgacctcccatcgtcgtcgtcttcgccgcctaccccgccgttcggggtcggggacgaccaggccgctgcatcacctgggttttgcatcatcgaagggcctgagacggtccaagattttgcaaagctagacttgcaggagattcaagataacattaggagccgccgaaacaagattttcttgcatatggaggagattcggcgattgagaatacagcaaagaataaagaatgtggaactcggaatttcagatgaagagagtgatcgggagctccctgattttccatcatttatccccttcttgcctcctctgagtgcagctaatctaaaggtctactatgccacatgtttcgccctcatagctagtataatggtcttcggtggtcttcttgcaccaatcctggaacttaaacttggtctagggggcacatcttatgaagactttatccgcagcgttcatctgccgatgcagttgagtgaggtagatcccattgtggcatctttctccggcggagcagttggagttatctctgccctaatggttgttgagataaacaatgtcaagcagcaggagcataagcggtgcaaatactgtttaggaaccggggcgaggtcgccgctcctcctgtccgtgcggagcctcaccactcctctcatttgcgcacagggccgaggagctccaagcaaagaaagaacggacgaccgccggcagccgtggaggaagaaccatcgtttggggcttccagttgcgggcaacatgcaggccaccggagtcatgttctcacgcatcggacggctgggtgtactactcgacgtcaaatcgtcggagcggcagcttaaccatggcaacatcgacaacgccggagccagcgagtactcagagagagaccatgttttggccttgccgtacgggataaaggaagtcgatgcctggtttgttcatagggattgtctcgtcctagcagtgacaggaatagtgcggcaggccagcggccccatcgtgggcagggtgcgggcgctgcggccgcggcgctcccggccatcccggcgcaggtgggtccccagagacctcggcgaccctggcggccgtgccgcggtcgtggccgtgcgccgcgccgctgcagctgggcctcaatcaggccacggcctacctcctgccgagccacggccggccccgggaacatgcgggcccggtgcagctcgctggccggccaggaaccgccgccgtggccatccccgggcggaaccagccgccgagaaggcgagcttcgaggcggtcgccccgccctcgctggccctgatgccatcgcggagcaaggagctgtgcgtcagcagcagccggtgctggatgaagcgaagatgggaggagaaggcgagcagcgtcagctgcagggcaagagcaagcgacaggcctgacttgttctcacctgtgcttgtagccatggactggcaggagtgcactatgttcagtttacaaatccttgaagataaacctgatctttcacggtggactctgaagtacgaggtccttgggtgggatgtagaattttcttggcttgcacgtaacatgacaccgttgagcgcggcgctcgccgccgacttctctcgcggccgcgtcgtggacccacatccccaccgattcggctggggtccagcgaggggaaggcggccgatggacgcgctcatggcgagctacgcgtccgactccgactctgacggcggcgagccggctgccgtctccggaggcgccccggagatcccggagccttcggccttgctcccaccacctcccctcgacctcctccagccccccaacttcgcaggttactcggcgatggcgcaggggggtcgcgtccggagcttcccccatgtggaaggcaactatgctgtacatgtttatatccctggtggacggagccgaactgacgcgaacgacgacggcgacgaacgacgaacgtggcctgggctgggcggcgactggcgcaaagacctgggctgggtggcgactggcacgcacgacgtacgtcaaaatggcgcgaagtacgtcaaaatggcgcgaaggaaaaaaaaacgcgcggtccgtttggcccccgccatgcatggcggtggggtcaaggtgcctgctgccgtggcggggtacgtggcaaagtgtaccccgccacccattatggtgggttag

SEQ ID NO: 2268 - protein, 774 aa, Sorghum bicolor
MLCSGRMLACNGLLPGRLRLPRADAYRLRPPALARRWSVAASAAASGGSSDLPSSSSSPPTPPFGVGDDQAAASPGFCIIEGPETVQDFAKLDLQEIQDNIRSRRNKIFLHMEEIRRLRIQQRIKNVELGISDEESDRELPDFPSFIPFLPPLSAANLKVYYATCFALIASIMVFGGLLAPILELKLGLGGTSYEDFIRSVHLPMQLSEVDPIVASFSGGAVGVISALMVVEINNVKQQEHKRCKYCLGTGARSPLLLSVRSLTTPLICAQGRGAPSKERTDDRRQPWRKNHRLGLPVAGNMQATGVMFSRIGRLGVLLDVKSSERQLNHGNIDNAGASEYSERDHVLALPYGIKEVDAWFVHRDCLVLAVTGIVRQASGPIVGRVRALRPRRSRPSRRRWVPRDLGDPGGRAAVVAVRRAAAAGPQSGHGLPPAEPRPAPGTCGPGAARWPARNRRRGHPRAEPAAEKASFEAVAPPSLALMPSRSKELCVSSSRCWMKRRWEEKASSVSCRARASDRPDLFSPVLVAMDWQECTMFSLQILEDKPDLSRWTLKYEVLGWDVEFSWLARNMTPLSAALAADFSRGRVVDPHPHRFGWGPARGRRPMDALMASYASDSDSDGGEPAAVSGGAPEIPEPSALLPPPPLDLLQPPNFAGYSAMAQGGRVRSFPHVEGNYAVHVYIPGGRSRTDANDDGDERRTWPGLGGDWRKDLGWVATGTHDVRQNGAKYVKMARRKKKRAVRLAPAMHGGGVKVPAAVAGYVAKCTPPPIMVG

SEQ ID NO: 2269 - DNA, 192 bp, Sorghum bicolor
cacgatgaacaagaaggaggctgtgttcatggtgcctgcggttgcgtccgggttgatctgtggagacggcatatggaccttcccatcttccgtgctcgctttggccaagatcaaaccaccgatttgcatgaagttcacgcctggaagctagaaacattatggacagttcgtgaaattgtagaatgtgagtga

SEQ ID NO: 2270 - protein, 63 aa, Sorghum bicolor
HDEQEGGCVHGACGCVRVDLWRRHMDLPIFRARFGQDQTTDLHEVHAWKLETLWTVREIVECE

SEQ ID NO: 2271 - DNA, 2064 bp, Sorghum bicolor
atggagatcaaccccgcggacgagatcgacaagtgcgaggccggcggcggcgcggagccgcagcctgcagatccggagcccgaggccgcgtcgctggagctggagcagccgcagccgtggcgcgagcagctgacggcgcggggcttggtggcggcggcgctcatcgggtccatgtacaccgtcgtcgtgatgaagctgaacctcacgacggggttcgtgcccacgatgaacgtgtccgccgcgctgctcgcgttcctggcgctccgcggctggacgggcgcgctggcccgcctcggcgccgccggcgccggcaggcccttcacgcgccaggagaacaccgtcgtcaccacctgcgccgtcgcgtgctactcgctggcgctctgcgggttcgggtccttcattctgggcctcaacaagaggacgtacgaggcggccggagtggacacgccgggaaatgtgccggggagcgtcaaggagccaggattcggctggataaccggcttcctcgtcgccagtagctttggcggcctcctcaccttgattcccctcagaaaggctttggtcatcgactacaagctgacatacccaagcgggacggcaacagctgttcttataaacggcttccacacacctcaaggagacaagaatgcagagaagcaagtgcgtgcatttctgaaatatttcgggattagcttcttctggagcttcttccagtggttctacaccggcggcaacgcctgcggattcgctcagttccctacgtttggcctcaaggcctggaaacaatcgttcttcttcgatttcagcatgacgtacgtcggcgccgggatgatctgcccgcaccatgtcaacctctccaccctcctcggcgcggtcctctcctggggaattctgtggccactcatccacaatcgcaagggcgattggtactctgcagacataccggagagcagcatgaccagcttgtatggttacaagtccttcgtgtgcatagctctgatcatgggtgatggcatctaccacttcgtcaaggtcctcggcgtcaccgccaagagcctgcatgaacaatcaaaactcagacgtggcagcaaccgagtgaatctgatggtggaaccgatcgaacgagatgcagtggccgacgagggcaacgcggccgcgatcgacgacctgcggcgcgacgaggtgttcaaccgggactccatcccggcgtggctcgcgtacgccgggtacgccgtcgtgagcgccgtcgcggtggtcgccatcccgatgatgttccggcaggtgcggtggtactacgtggtggccgcgtacgcgctggcgcccgtgctgggcttctccaactcctacggcgccgggctcacggacatcaacatgggcttcagctacggccagctcgcgctcttcgtcctcgcggcgtgggccgggcgcgacgacggcgtcgtggccggcctcgtcggctgcgggctggtcaagcagctggtgctcatctccgccgacctcatgcacgacttcaagacggcgcacctgaccctgacgtcgccgcgctccatgctcgccgcgcaggccgtcggcgccgccatcggctgcgtcgtcacgccgctcaccttcctcctcttctacagggcgttcgacgtcggcaaccccaacgggtactggaaggcgccgttcgcgctcatctaccgcaacatggcgctactgggcgcccagggcttctcggcgctgcccacgcactgcctgccgctgtccgcggggttcttcgcgttcgccgtgctcgccaacgtcgtcaaggacgtcctgccgccgcggtacaagaggtacgtgccgctgccgacggcgatggccgtgccgttcctcgtcggcgctagcttcgccattgacatgtgcgtagggaccttggtggtctttgcctggcaacgggttaacggcaatgacagcacgttgctggtgccggcggtggcgtcaggcctcatctgcggtgatggcgtatggactttcccgtcgtcgttgctttctctcgccaagatcaagccacccatgtgcctgaaattcacacctggaagctag

SEQ ID NO: 2272 - protein, 687 aa, Sorghum bicolor
MEINPADEIDKCEAGGGAEPQPADPEPEAASLELEQPQPWREQLTARGLVAAALIGSMYTVVVMKLNLTTGFVPTMNVSAALLAFLALRGWTGALARLGAAGAGRPFTRQENTVVTTCAVACYSLALCGFGSFILGLNKRTYEAAGVDTPGNVPGSVKEPGFGWITGFLVASSFGGLLTLIPLRKALVIDYKLTYPSGTATAVLINGFHTPQGDKNAEKQVRAFLKYFGISFFWSFFQWFYTGGNACGFAQFPTFGLKAWKQSFFFDFSMTYVGAGMICPHHVNLSTLLGAVLSWGILWPLIHNRKGDWYSADIPESSMTSLYGYKSFVCIALIMGDGIYHFVKVLGVTAKSLHEQSKLRRGSNRVNLMVEPIERDAVADEGNAAAIDDLRRDEVFNRDSIPAWLAYAGYAVVSAVAVVAIPMMFRQVRWYYVVAAYALAPVLGFSNSYGAGLTDINMGFSYGQLALFVLAAWAGRDDGVVAGLVGCGLVKQLVLISADLMHDFKTAHLTLTSPRSMLAAQAVGAAIGCVVTPLTFLLFYRAFDVGNPNGYWKAPFALIYRNMALLGAQGFSALPTHCLPLSAGFFAFAVLANVVKDVLPPRYKRYVPLPTAMAVPFLVGASFAIDMCVGTLVVFAWQRVNGNDSTLLVPAVASGLICGDGVWTFPSSLLSLAKIKPPMCLKFTPGS

SEQ ID NO: 2273 - DNA, 1317 bp, Sorghum bicolor
atggccgccgccgtccccacgccatccccattcctcgcttcaacccgccgcttcggcttcgcccctcgcctccgctccctcctccccgccgctgccatgtcttccgccgcggtatccgcctccgccctaagccccagttccggcactggggaagaggcgcaggcggccccgctcccgcactcgaccctcgagatcgcgggggcgcgccggggcctcctctccggcttcagcagcctccgcgccccgtaccgtgccttccccgtactcgcgtccaaccgacacgtcgagaccatcttcgctgcgttcacgcggtcgctccccgccgttaagctgcggcgcgagtgcctccgcgcccctgacgacggagccatcgcgctcgactgggtctctggcgacgaccgcgcgcttccgatggatgctccggtgcttatactcttgcctggtcttacaggtggaagtgatgatacatatgtaaggcatatgcttttgagagctcgaagcaagggatggcgtgttgtggtgtttaatagccgtggatgtgcagacagtcctgtgactacacccaagttctattctgcttcatttacaggggatctccgccaagttattggtcatattttaggacgttatccccagtctaatgtctatgctgctggttggtctcttggagcgaatattcttgtgcgctaccttggcgaggaaactgataaatgccctctatctggagcagtctccttgtgcaatccttttaatttggtaattgcagatgaagatttccacaaaggatttaacaacgtttatgatagagcattggctagggctttgacgactatatttaagaagcatgctctccttttcgaaggattggagggtgaatatgatatacccaaggcagcgaatgcaagaactgttagagattttgatgaggggctaacccgagtttcgtttggtttcaagtcagtggatgattattactcaaattcaagcagctcggattctatcaagaatgtttgcatacccttactgtgcatacaggctgataatgacccaattgcaccatccaggggaattcctagagatgatatcaaggcaaataagaactgtctacttatagtaacaccacagggtggccatcttggatgggtagcaggtgacgaagctccattcggatgtccttggacagacccaatagtgatggaatatctggaatatctccaaaatgagaaggactctagtacaaaaattaacatatcctatgagcaacagggtgtttcagaggcatcagtaccccatctaactgtgcatggccagagatag

SEQ ID NO: 2274 - protein, 438 aa, Sorghum bicolor
MAAAVPTPSPFLASTRRFGFAPRLRSLLPAAAMSSAAVSASALSPSSGTGEEAQAAPLPHSTLEIAGARRGLLSGFSSLRAPYRAFPVLASNRHVETIFAAFTRSLPAVKLRRECLRAPDDGAIALDWVSGDDRALPMDAPVLILLPGLTGGSDDTYVRHMLLRARSKGWRVVVFNSRGCADSPVTTPKFYSASFTGDLRQVIGHILGRYPQSNVYAAGWSLGANILVRYLGEETDKCPLSGAVSLCNPFNLVIADEDFHKGFNNVYDRALARALTTIFKKHALLFEGLEGEYDIPKAANARTVRDFDEGLTRVSFGFKSVDDYYSNSSSSDSIKNVCIPLLCIQADNDPIAPSRGIPRDDIKANKNCLLIVTPQGGHLGWVAGDEAPFGCPWTDPIVMEYLEYLQNEKDSSTKINISYEQQGVSEASVPHLTVHGQR

SEQ ID NO: 2275 - DNA, 1092 bp, Sorghum bicolor
atggacactttttctcatgtaccccctggattccgtttccaccccactgacgaggaactcgtcgattactacctcaggaagaaggtggcgtccaacaagatcgaccttgacgtcataaaagacgtcgatctgtacaaaattgagccctgggatctccaagagaagtgcaagattgggatggaggagcagaacgagtggtacttcttcagccacaaggacaagaagtacccgacggggtctcgcaccaaccgggcgaccaccgccggcttctggaaggcgacggggcgcgacaagcccatctacaccaagagctgcctcgtcgggatgaggaagacgctcgtcttctacaggggccgtgcgcccaacggccagaagtccgactggatcatgcacgagtaccgcctcgagaccaccgagaacgggaccgcccctgtacctgaaagcatcttcttctgcttgccccacgaaatggtggttcaggaggaaggatgggtggtctgcagggtgttcaagaagcgagtggcgaccgtgcggagaatggccgacggcgcgccgtggttcgacgaccacgtcgccggcggcgggttcatgccggacctcattggctcgccgaggcagctgatgcaccaccaccaccacccaaacgcggtgtacagcggcggtcagcagcagctctaccactgcaagccggagctggagtaccatcaccttctgcccagccaagacgccttcttgcagcagcttcctcagttggtggagagccccaagcctcctcccgcctacattgccgccgcccaaggcagctgcagcctccagctccagtcccccgacgaggccactgggtacaccacccagcaaccggccctgatgatggaggccgccgcttacatggacgactcggtcaccgattggagagtgctcgacaagttcgtcgcgtctcagctcttcagccacggcgacggcacagcgaaagaggccggctactccagtccggcgcaggtgtttcaggctgagaacaagcaaccagaagaagcactggactacgcctccacatctgcctctggtggcggcgaagcgaacatgtggaaatag

SEQ ID NO: 2276 - protein, 363 aa, Sorghum bicolor
MDTFSHVPPGFRFHPTDEELVDYYLRKKVASNKIDLDVIKDVDLYKIEPWDLQEKCKIGMEEQNEWYFFSHKDKKYPTGSRTNRATTAGFWKATGRDKPIYTKSCLVGMRKTLVFYRGRAPNGQKSDWIMHEYRLETTENGTAPVPESIFFCLPHEMVVQEEGWVVCRVFKKRVATVRRMADGAPWFDDHVAGGGFMPDLIGSPRQLMHHHHHPNAVYSGGQQQLYHCKPELEYHHLLPSQDAFLQQLPQLVESPKPPPAYIAAAQGSCSLQLQSPDEATGYTTQQPALMMEAAAYMDDSVTDWRVLDKFVASQLFSHGDGTAKEAGYSSPAQVFQAENKQPEEALDYASTSASGGGEANMWK

SEQ ID NO: 2277 - DNA, 603 bp, Sorghum bicolor
atgtctttcaccggcacgcaggacaagtgcaaaacctgcgacaagacggtccacttcatcgacctcctcaccgccgacggcgtctcgtaccacaagacatgcttcaagtgcagccactgcaagggcacactctcgattagcagctactcttccatggacggtgtcctgtactgcaagacgcactttgaacagctcttcaaggagacagggaccttctccaagaaatttcaaggtggagcatcttcaaccaagaccgaccaggcaaaggctccgagcaagctatcatctgcattctctggaactcaagataaatgcgcagcctgccagaaaaccgtgtatccattggagaagatgacgttggaaggcgagtcttaccacaagagctgcttcaagtgctcgcacgggggctgcatcctgacaacctcctcctacgccgcgctcaatgggatcctctactgcaagatccacttctcgcagctgttcaaggagaagggcagctacaaccacctcatccagacggcgcagaccaagaagaacgaggctgcggaggccgcaccggaggcaccggcggatgcaggcgcggctgagccagaagcagcgtag

SEQ ID NO: 2278 - protein, 200 aa, Sorghum bicolor
MSFTGTQDKCKTCDKTVHFIDLLTADGVSYHKTCFKCSHCKGTLSISSYSSMDGVLYCKTHFEQLFKETGTFSKKFQGGASSTKTDQAKAPSKLSSAFSGTQDKCAACQKTVYPLEKMTLEGESYHKSCFKCSHGGCILTTSSYAALNGILYCKIHFSQLFKEKGSYNHLIQTAQTKKNEAAEAAPEAPADAGAAEPEAA

SEQ ID NO: 2279 - DNA, 915 bp, Sorghum bicolor
atggaaggacgcacaggcaaccaatctgagaagcaggtcgctgtggttacaggagggaacagaggaattggcctagaaatatgcaagcaactggcttccaatggagtcactgtagtattgacagcaagggatgagaagaggggcgccgaagctgtcagcacgcttgggctatccaacgtcgtatttcatgagctggacgtcagcgatccgtcgagcgctgcacgcttagctgattttatcaaggagaagtttggcaagctggatatattggtcaataatgcaggaattactggaacgacgtggagcgtcggcgacccagaaatttttcgtcaaaagctcgcgggcatggatttcatggagaggatcgaaacaatccataagcacatcacggaaccttatgaggaagcagagaagtgcttgaggactaactaccatggcatcaaagctgtcacaaaagcactgcttcctcttctgcagtcctcatcccacggaaggattgttaacatgtcatctgactatggactactcaggtttttcagtggagatgaacttaaagcggagctcaacaatatcgacagcttgtctgaacagaggctggacgagttgtccgaattgttcctcagggacttcgacgatggcctactggaggctcgagggtggcctacgggagggttcagtgcatacaaagtgtccaaggctcttgtgaatgcctattcccggatccttgcgaaggatcacccgtcactgtgcatcaactgcgtgcatcctggctatgtccagacggacatgaacttccatgctggggatctcccagtcgaggagggagtacggggagttctcatgatggcgatggcacctaagggaggcgtcactggtgcgtacttggacaaaaccaaggtcgtgtcattcgtgtaa

SEQ ID NO: 2280 - protein, 304 aa, Sorghum bicolor
MEGRTGNQSEKQVAVVTGGNRGIGLEICKQLASNGVTVVLTARDEKRGAEAVSTLGLSNVVFHELDVSDPSSAARLADFIKEKFGKLDILVNNAGITGTTWSVGDPEIFRQKLAGMDFMERIETIHKHITEPYEEAEKCLRTNYHGIKAVTKALLPLLQSSSHGRIVNMSSDYGLLRFFSGDELKAELNNIDSLSEQRLDELSELFLRDFDDGLLEARGWPTGGFSAYKVSKALVNAYSRILAKDHPSLCINCVHPGYVQTDMNFHAGDLPVEEGVRGVLMMAMAPKGGVTGAYLDKTKVVSFV

SEQ ID NO: 2281 - DNA, 3585 bp, Sorghum bicolor
atggacgcgctccgtgccgtgcgcggtgcggctggccgcggcgggcttggcatgccgacgccggagaagtttcggagcggccacatgccgcgcggcgcgacggtgccgctgtcacgctcctcgctgcgcagtgacgacggcagcgccgtctcgggatccgacatggacgagtcgtcggacaacgatgagattgaggtctgcagcggcaggtactcggtcgactcgtcaccccgccgcgacgacgtgacccgacgcacggccgtgcccctctaccgctacgcaaccatgcctgggcagcagagctactactctactgatgatggttactcggacttaagctcttctcgagacacagcactgccaagagctaaggcacagccgatggggcggccccaggcacgggttgttgagtatgctgatgaagagtactcggactctccaggcacctccgaattttctagccaggtggaagggcagagcaagggtgggtatgcatcagagtactcccatactggtccagcccgaagagaagtgaacaatttggttcctaagaatcgtgcagcagctgcagagaggacgcggtaccaacatgacagccattctgctcatgtccccgttcgagagaatgtgaaatcaacacgtaaattggttagttttctttgtttatttacaaaaaatttccattcatctaccccgctctttttctatttgatagcaccatctaatgggttgtctgatgtccccagtgcaccgccaataaatgattatgaccaggaccaacatccggttactcatgatgatactcggccttgtgagaattcaaatttcaccaatggcttatctgccaaaaaagatcaccaagaagtcaatggaggagctaacttaggtaggagcacttcgaatgcaggacccacaagcaagccatctagctcgattcctgttcgagtcccaacctttcatgccagcttgcaaaatgtcttgttacaatcggaagaggagcttatgtcgaagcgcgcatcagagctagttagcgaaggggctgcatcaaagcccaagaaaacaataggcaaaatgaaggttcaagttcgcaaagttcggatgtctgtagatatgccttctggttgcaacttctcatctctgccaatggtgaaattggattctgtccggtaccgtttatccaatgtgcaatccacactttcatcaggatgggagtctgtacggagagttcgagttctaccacagcttcctgctaacagttcgttctcaaagcacagcttagcgtacatgcaagcaagtgctcagtatattaagcaggtatccggcctgttaaaggtcggtgtaactactctgcggagcagttcagcatatgaagcaccacaagaaacatactcctgccagttgaggcttaaaagttcacctgaagatgatgtggtacctatgcagccaggatctggtgaaacacatgtcttctttcctgatagcctgggagatgatttgatcatcgatgtgtctgattcaaagggaaagtcctgtggtcgtgttgttgcccaagttgctacaatggctgaggatcctgctgacaagctacgctggtggtcaatatttcgggaacctgagcatgaacttgtgggtcgtatacagctatatatccactatacaactgctgcggatgagaacaatatgaagtatggttctgttgcagaaactgtagcgtatgatattgttttggaagttgcaatgaaagcgcaacacattcaacaacggaaccttgtggtacatggctcctggaagtggttattaacagaatttgcattgtattatggggtttcagatgcctacacgaggttgaggtacctctcttatatcatggatgttgcaactcctactgctgattggctcaatctggttcatgaacttttgttacctatactgatgaaaaaccatggtactgctactttgagccaccaagagaaccgaatactgggggaagttgaggagcaaattgagcaaactctagctatggtttttgagaactacaagtcattagatgactctataccgttgggtttggcggaagattttaggcctccaactggattggctgctgctgctctggaaccagctattaagctgtacagtcttctacatgacgtcctatctccggaagctcaactaagattgtgtggttacttccaggcagctgccaggaagcgctcgaggcgctacatgcttgaaactgatgagtatgtgtcgggaaattcagaaggtatcagggtggacttggtaaccgttaccacggcataccagaagatgaagtcattatgcaacaatctgcgcaatgaaatttttactgatattgaaattcataatcagcacatacttcccagctttgttgatctgccaaatttagctgcctccatctatagtgtagagctctcaaatcgactacgtgcttttcttgtcgcttgccctcctgctggtccagcatcacctgttgctgatttggtggttgctacagctgattttcagaaggatctgtctagctggaatatctgcactataaaagcaggcgttgatgcaaaagagctgttccatttgtacattgtattgtggattgaagacaaacgcaggatgttactggaaaattgcagactggacaaggtcaaatggtcaggagttaggacccagcatatgacaacaccttttgtggatgagatgtatgatttgctaaagaagacattgacagaatatgaagttatcatttgccgatggccagaatacatattcgttcttgagaatgccattgcagatgttgagaaagcggttatagagtctctggaaaaacagtatgcagatgttttggctccactgaaggattgtattgcaccaaagaaatttggcctcaaagttgtccagaaactcacaaagcgcaattcaactgtgccctatactgtacctgaagatcttggcattctcttgaatacattgaaaagactactagaggttttgcgacctcgaattgagagtcacttgaagtcatggagttcttgtataccaaatggaggaaattctgcagccattggagaaaaacttagtgaagttacagtgacattgagagctaaattccgaaattacatgcaagcagttgtcgagaagctttcggagaatacccgtatgcaaaataccacaaagctcaaaaagatcattcaggattcaaaagagttggtgatggaatctgatatccgcagcaggatgcaggccttgaaggatcagctaattgaggcaataaatcatgtgcacaaagtctctgaagtacatgtttttgtagccatatgccgaggtttctgggaccggatgggacaggatgtgctgagtttcctggagaatcgcaaagaaaataaagcctggtataaaggtgcacgagtcgcaatctcagtcttggatgatacttttgcaacccagctgcaacagctgctaggtaatacagtcccaccgaaggaactagagccacccagatctatcgtggaagttcgctctattctctgcaaagatgcaccccgccagaagaattctagtttctattat

SEQ ID NO: 2282 - protein, 1195 aa, Sorghum bicolor
MDALRAVRGAAGRGGLGMPTPEKFRSGHMPRGATVPLSRSSLRSDDGSAVSGSDMDESSDNDEIEVCSGRYSVDSSPRRDDVTRRTAVPLYRYATMPGQQSYYSTDDGYSDLSSSRDTALPRAKAQPMGRPQARVVEYADEEYSDSPGTSEFSSQVEGQSKGGYASEYSHTGPARREVNNLVPKNRAAAAERTRYQHDSHSAHVPVRENVKSTRKLVSFLCLFTKNFHSSTPLFFYLIAPSNGLSDVPSAPPINDYDQDQHPVTHDDTRPCENSNFTNGLSAKKDHQEVNGGANLGRSTSNAGPTSKPSSSIPVRVPTFHASLQNVLLQSEEELMSKRASELVSEGAASKPKKTIGKMKVQVRKVRMSVDMPSGCNFSSLPMVKLDSVRYRLSNVQSTLSSGWESVRRVRVLPQLPANSSFSKHSLAYMQASAQYIKQVSGLLKVGVTTLRSSSAYEAPQETYSCQLRLKSSPEDDVVPMQPGSGETHVFFPDSLGDDLIIDVSDSKGKSCGRVVAQVATMAEDPADKLRWWSIFREPEHELVGRIQLYIHYTTAADENNMKYGSVAETVAYDIVLEVAMKAQHIQQRNLVVHGSWKWLLTEFALYYGVSDAYTRLRYLSYIMDVATPTADWLNLVHELLLPILMKNHGTATLSHQENRILGEVEEQIEQTLAMVFENYKSLDDSIPLGLAEDFRPPTGLAAAALEPAIKLYSLLHDVLSPEAQLRLCGYFQAAARKRSRRYMLETDEYVSGNSEGIRVDLVTVTTAYQKMKSLCNNLRNEIFTDIEIHNQHILPSFVDLPNLAASIYSVELSNRLRAFLVACPPAGPASPVADLVVATADFQKDLSSWNICTIKAGVDAKELFHLYIVLWIEDKRRMLLENCRLDKVKWSGVRTQHMTTPFVDEMYDLLKKTLTEYEVIICRWPEYIFVLENAIADVEKAVIESLEKQYADVLAPLKDCIAPKKFGLKVVQKLTKRNSTVPYTVPEDLGILLNTLKRLLEVLRPRIESHLKSWSSCIPNGGNSAAIGEKLSEVTVTLRAKFRNYMQAVVEKLSENTRMQNTTKLKKIIQDSKELVMESDIRSRMQALKDQLIEAINHVHKVSEVHVFVAICRGFWDRMGQDVLSFLENRKENKAWYKGARVAISVLDDTFATQLQQLLGNTVPPKELEPPRSIVEVRSILCKDAPRQKNSSFYY

SEQ ID NO: 2283 - DNA, 162 bp, Sorghum bicolor
ttaacgtcaaaaatagcacaatttctacagatatgtcattataacgatgaaccgagattacaacgtgagtttgccatttttgcatcagagtttaagttggaccaattagtcccgataaaaatgcaggatctcgccagccgactatcaattgttcattgttag

SEQ ID NO: 2284 - protein, 53 aa, Sorghum bicolor
LTSKIAQFLQICHYNDEPRLQREFAIFASEFKLDQLVPIKMQDLASRLSIVHC

SEQ ID NO: 2285 - DNA, 291 bp, Sorghum bicolor
atggcgttcatgcggtactaccgcgcgctgccggagggggagacgacggtggaggagttcagggcgtggctgagccagttcgacgcggacggcgacggccggatcagccgggacgagctggagcaggcgctgcgcagcctcaacctgtggttcgtgtggtggaaggcgcgggaggcggtgcgcgcggccgacgccaaccgcaacggcgcggtggacggcgacgagatgggcaggctctacgcgttcgcgcacaagcacctccacctcaagatgagccagctggacctggag

SEQ ID NO: 2286 - protein, 97 aa, Sorghum bicolor
MAFMRYYRALPEGETTVEEFRAWLSQFDADGDGRISRDELEQALRSLNLWFVWWKAREAVRAADANRNGAVDGDEMGRLYAFAHKHLHLKMSQLDLE

SEQ ID NO: 2287 - DNA, 801 bp, Sorghum bicolor
atggcgtccactgtaacagccgccaacagccatggaagcgtcctgcgtacccataccgccccctcctccaggcagctcgccggttggagcagcaggcgcacgcttgccatgcctgcacaccacgcgccgtcacccagagctcgggtcgtcgccgtccgagccgccggcacccagcggccgacctggttgcccggactggacccgcctcctcacctcgacggcacactaccaggtgacttcggcttcgatcccttgggcctcggcgaggatccggcaagcttgaagtggtacgttcaggccgagctcgtgcactgccggttcgctatggcaggggtcgccggcatccttttcactgacttgctccgtgtatcagggaacagcgacctccccgtgtggtttgaagcaggtgcggcgaaattcgaattcgcaaacaccacggcgctcttcttcgttcagcttctcttgatggggttcgctgaaaccaagaggtacatggacttcaaaaatccaggatcacaagcagaggaaggaacgttcatagggttagaggctgcacttgcaggtcaacagccaggctaccctggaggccctctgtttaatccactaggacttgcgaaggatatagagaatgctcatgaagagaagctcaaagaaatcaagaatgggaggttggcaatggtagccatgcttggcttcatggtgcaagcatccgtaactcatgccggccccatcgacaatcttttgacacacctttcggacccgttcaacaaaaatatcattcacgcattctcctcttcctaa

SEQ ID NO: 2288 - protein, 266 aa, Sorghum bicolor
MASTVTAANSHGSVLRTHTAPSSRQLAGWSSRRTLAMPAHHAPSPRARVVAVRAAGTQRPTWLPGLDPPPHLDGTLPGDFGFDPLGLGEDPASLKWYVQAELVHCRFAMAGVAGILFTDLLRVSGNSDLPVWFEAGAAKFEFANTTALFFVQLLLMGFAETKRYMDFKNPGSQAEEGTFIGLEAALAGQQPGYPGGPLFNPLGLAKDIENAHEEKLKEIKNGRLAMVAMLGFMVQASVTHAGPIDNLLTHLSDPFNKNIIHAFSSS

SEQ ID NO: 2289 - DNA, 753 bp, Sorghum bicolor
caaccaccaccaccaccaccaccccgccatggcgccgaggttggagcgcggcgggttccagctcccgaacaccgagcaggagaactcactcttcctcggcgcactcatctccgtcgtgtccggggacgccgccgcccccgccgcgttgctcccggcgccggcaccggcttccgcggcgtgcgccaggtgcggcgtggacgggtgccacggcagcggctgcgagctcgtcgctgggtcgagcagcgacagcgacggcgcagagtgctccgccgcgtccgcgagccgcgccagcgttggcggcggaggaggcgtgggcaagcggagagggagagggaggagggtgagcagttacaggggcgtgcggcggcggccgtggggcaagtgggcggcggagatccgcgacccgcgccgcgccgtgcgcaagtggctcggcacgttcgacaccgccgaggacgccgcgcgcgcctacgacgtcgccgcggtcgagttccggggccagcgcgccaagctcaacttcccggcggacgctgctgccgtggcggcgccggcgctggcgccttcctgggcgggggcggctgtgcagccgcaccaccgtccattgcccgatcatcagagcctccgcgagaactgcgggtccaacgccgcgtcgccggtgcacgtggcgcaggcgccgaccacgcagcagggaataaggacggtagccaaggaacaggacatctgggacggcttgaacgagatcgtgatgatggatga

SEQ ID NO: 2290 - protein, 250 aa, Sorghum bicolor
QPPPPPPPRHGAEVGARRVPAPEHRAGELTLPRRTHLRRVRGRRRPRRVAPGAGTGFRGVRQVRRGRVPRQRLRARRWVEQRQRRRRVLRRVREPRQRWRRRRRGQAEREREEGEQLQGRAAAAVGQVGGGDPRPAPRRAQVARHVRHRRGRRARLRRRRGRVPGPARQAQLPGGRCCRGGAGAGAFLGGGGCAAAPPSIARSSEPPRELRVQRRVAGARGAGADHAAGNKDGSQGTGHLGRLERDRDDG

SEQ ID NO: 2291 - DNA, 1863 bp, Sorghum bicolor
atgaatttcccgggaggaagcgggaggcggcagcagcaggagccggagcacctgccgccgatgacgccgctcccgctggcgcggcaggggtcggtgtactcgctcacgttcgacgagttccagagctcgctcggcggggccgccaaggacttcgggtccatgaacatggacgagctcctccgcagcatctggtccgcggaggagatacacaacgtcgcggccgccaacgcgtcggcggcggaccacgcccacgccgcgcgggcgtcgtccatccagcgccagggctcgctcaccctcccccgcacgctcagccagaagaccgtcgacgaggtctggcgggacctcgtgtgcgtcggcggcggaccctccgccgaggctgcggcgccgcccccgccggcccagcggcagcccacgctcggggagatcacgctggaggagttcctcgtccgtgccggcgtggtgagggaggacatgaccgcgccgccgcccgtactgccggcgccggtgtgcccgccacctcctccgcagcagacaatgctgtttccccatggcgatgtgtttgctcccttggtgcctccgctgcaattcgggaatgggttggtgtcgggggctgtcggtcagcagcagggaggtggtcctgcggccccggcggtatcgccgcggccggtgacggcaagcgggttcgggaagatggaaggagacgacttgtcgtctctgtcgccatcaccggttccgtacgttttcggtggtggtttgagagcaaggaagccaccagctatggagaaggtggttgagaggaggcagcgccggatgatcaagaaccgggagtccgccgcgaggtcgcgtcaaaggaaacaggcatatatgatggagctggaagctgaggtggcaaaacttaaagagatgaacgatgaattgcagaagaagcagcgtctgctcgaggtgatcggcgagcgggattccttcccccaatgcaaggtagcggcggtcatagtgccgccgtcaccaagagccaagagctcagtggcggctcagcatggaaagcgcaaccacctgcgcccactgcttcagccgcatcttcaccgtctccggtggatcgcctgcatgaacaaacggcggcgactcttcggaggagacctccgacgcggcgccgcacgagcacgtcggtccctcggcaccgccggcgtggacggcgtagtagaggtcgagcgccggcagcgtctccaggaggcggttcctcccggcacagccgcacgccgcgcacccggacccggcgacggcaggggccggctcaaatccgaaccccagatcgatgcacccgcggagctcgtcgagatcgtcgtccgtgacactccggacgcgccgcagcgccgtgccgccgcggcgcatgccccggcgccggcgctcccatgcctcatcgcgctcgatgtccggcgaccacgagttctgcttctgcagtccaagcgcgggcgccgcggcagaccccgccttcttccctccgccgccgccgccgcctccgataagatggcgttgccccgccgccttatccatggccacgggcactgccgctgccgtagaccctaccacctcccctccgccccctcgcaaggggaaggggggacttggagaagcggagcttcgatgtgggtggaggcggccgcggcggattttatccctcccctccgtcgctgcgttggcgtagcggatgcggatgcgggcgcggtcagctgcgtgacgtctgccgacgtaaccagccgtatatatggagattggagagagatcgtaccttccttgtacaccgggtataacatcgaatcgaacggtggatttttgaactggaaggcagcaagggttaattattag

SEQ ID NO: 2292 - protein, 620 aa, Sorghum bicolor
MNFPGGSGRRQQQEPEHLPPMTPLPLARQGSVYSLTFDEFQSSLGGAAKDFGSMNMDELLRSIWSAEEIHNVAAANASAADHAHAARASSIQRQGSLTLPRTLSQKTVDEVWRDLVCVGGGPSAEAAAPPPPAQRQPTLGEITLEEFLVRAGVVREDMTAPPPVLPAPVCPPPPPQQTMLFPHGDVFAPLVPPLQFGNGLVSGAVGQQQGGGPAAPAVSPRPVTASGFGKMEGDDLSSLSPSPVPYVFGGGLRARKPPAMEKVVERRQRRMIKNRESAARSRQRKQAYMMELEAEVAKLKEMNDELQKKQRLLEVIGERDSFPQCKVAAVIVPPSPRAKSSVAAQHGKRNHLRPLLQPHLHRLRWIACMNKRRRLFGGDLRRGAARARRSLGTAGVDGVVEVERRQRLQEAVPPGTAARRAPGPGDGRGRLKSEPQIDAPAELVEIVVRDTPDAPQRRAAAAHAPAPALPCLIALDVRRPRVLLLQSKRGRRGRPRLLPSAAAAASDKMALPRRLIHGHGHCRCRRPYHLPSAPSQGEGGTWRSGASMWVEAAAADFIPPLRRCVGVADADAGAVSCVTSADVTSRIYGDWREIVPSLYTGYNIESNGGFLNWKAARVNY

SEQ ID NO: 2293 - DNA, 1737 bp, Sorghum bicolor
atgtcatccaagaagaagagggccgcgatagatctctccctagaggtagagaggagtgacgaagaccatggcagcggcggcagaggcaaaggcgatcgccgccggggcaaggatgatggtgaggtggacaagaaagaagaacagttcaaggagcaaggcgaggaacccaaagaggaaaccggcgaggaggagaaggtggtagttgaagtggttgtagaccaaggaggagacggcaccaaggagatcaaatataggactcaacaaggagaggagatggaggacgacaagcaatcgccagcggatgcccacggcgacggggagagcgatggggccgaagctcgtgcgcaggacaagcacgtggtagaggccgccggcaacggcgacggcggggacgatagctacaccaccatggtgcaagacgaggtaagtgcgatgcaggaggagatggagaagatgaaggaggagaaccggatgctccggcgagtcgtcgaccgaaccgtgcgtgactactacgagctgcagaagaaggtagaagcctgctatcagcagcaacaggcagatgagcctaaggagcccgaggtgttcctttccctcggtgccaccgccgccgggactggcggcgccttcccggagccgaagcggaaggagcggcaagcagcgcggcggccgtctgtggggagcgatgacaccgacgacgacgacgccaaggaggaccttgggctgtcccttagcctgagagcgtcgtcgtacgaggaagagaagctagaagcggggcacgacgacgtggaaggtgcctccgtggtcggcgccgacgacggcaaggcgaagggctacacgctgctggagagtagcaagctcggggcaccggcggccgggatcacgagccagagtgtcaacccggccaaccgcaaaactagggtttccgtgcgcgtccgatgccaaggccccactatgaacgacgggtgccagtggagaaagtacgggcagaaggtcgccaagggcaacccgtgcccgagagcctactaccggtgcaccgtcgcgccgggctgcccggtgcgcaagcaggtgcaacgatgcctagaggacatgtcgatcctggtgacgacgtacgagggtacgcacaaccacccgctccccgtcggcgccaccgccatggcctccaccacctccgccgcggccacattcatgctgctctccagcacgacctcttcctcctccatctccgaggccggcggcggctcagcggcgcctccctacctcagcactccatacctgctcaactccacctcccaccactccgccgcttcgccgctgctcagcgcaccaccgtcgtcgtcaatgcccagcagtacccctggcgcggccagtggcgtgcagcatctcaacatgttcgggcattcgtcgtccatgctagctcagcaggcgccacatttcggcagcaacagcaagtacccatggtcatcggatcctttgcagggcatgggtggtggtggtggtctgccagcagggagcaagaggccgttttggagcaccggcggcgacgagaagacggcgacattgccggacaatgtcggcgcagtcatggcagacccaagtaagttctccgtggcgatcgcggccgcgatcaacagctatatggggaaggacgggcaggtggtgggcggcaaggacggggagagtagcagcagcaagagtagtaacaagtggggggtggtcgaatcacttccacctccatga

SEQ ID NO: 2294 - protein, 578 aa, Sorghum bicolor
MSSKKKRAAIDLSLEVERSDEDHGSGGRGKGDRRRGKDDGEVDKKEEQFKEQGEEPKEETGEEEKVVVEVVVDQGGDGTKEIKYRTQQGEEMEDDKQSPADAHGDGESDGAEARAQDKHVVEAAGNGDGGDDSYTTMVQDEVSAMQEEMEKMKEENRMLRRVVDRTVRDYYELQKKVEACYQQQQADEPKEPEVFLSLGATAAGTGGAFPEPKRKERQAARRPSVGSDDTDDDDAKEDLGLSLSLRASSYEEEKLEAGHDDVEGASVVGADDGKAKGYTLLESSKLGAPAAGITSQSVNPANRKTRVSVRVRCQGPTMNDGCQWRKYGQKVAKGNPCPRAYYRCTVAPGCPVRKQVQRCLEDMSILVTTYEGTHNHPLPVGATAMASTTSAAATFMLLSSTTSSSSISEAGGGSAAPPYLSTPYLLNSTSHHSAASPLLSAPPSSSMPSSTPGAASGVQHLNMFGHSSSMLAQQAPHFGSNSKYPWSSDPLQGMGGGGGLPAGSKRPFWSTGGDEKTATLPDNVGAVMADPSKFSVAIAAAINSYMGKDGQVVGGKDGESSSSKSSNKWGVVESLPPP

SEQ ID NO: 2295 - DNA, 1530 bp, Sorghum bicolor
atgaagagatgggaatttgatagtgttaatcaagcttcaacattgatcacttcttggttctcaggaaatccctctgaatgtcagctactacaggactatttgaacagcatctcttctaatggtaaaatcactgatagtaaccctttcccttttctcttcattactggtagtacagagcacttatacgcttgctgtacaggtggtatattttatgatgctcagaatgatttcttaacacctgaatgggacagtgagaatttaccaagtgacagtgatgattctagccatgttcaaatcattagagagtcatcaggtttcacagactcatcttacactgcacctccttcctctggaccttacaagagaagaaaaataacaaaatcagatgatggaagtagttcgactgaagaatcatacacagaaattgtggcctcgccaacacatttgtcatcttcatgttcatcgtgtgacagtgataatgagaatgttaagccgctattggagcctagcacatataaggatgtactgatctgcttccgctttgatgatcatgaccttccattcagactgaaagaagtcatactatctgatgtcagactgttaacactacttgaatatggccttccttcatgggttatatttcttcagtcatatccagtgttttgcaagatatatcgcccatggatgtgccctcttgccagagcattgtatgtcttgatgtcattaatcactgttcttataggattttatgacctctacaagaatgtgcccatgttgaaggcaactgcctcaagattatttggccctttctttgattggatagaaacgtgggaaatgatatcaagacttaagtatcttggaactatgcttttcctgcataactttcagcaggcttttacatggtctcttaagattgtgggtgctgctaagtctgttcttagtgttttgacaaagccaattgcgggaccaattgtggaggttttggaacttaccatgccaatgtggaacctttgtgctgagacagcaggacatctgagttcagttgtcatggtagcactggagacgtcttggagtgtagttatcggtacagtggagatgattatctggccattttggtttgtcttcagtactatgattagcgttggtatggttgctataacctcttacatcatctatttcgttttctttccatgttttaattcttatgccatgctaattttgtttctgtcaccagtaaattcaattctgtacccaatcatttggctacttggagagatactagctgcacctttccgactagtcattgggctatcaagttttgctgtggacctttttgttgatattgtcagtgttctaagggagagctggtcaacactaactgccttatatcaagttggatctgttcccagctcacctttgcttacatctgataatagcatctggggctcactctggaaagatcttctgtatcagattttccgagcactacggagcattttgtggttttattgccttcttttcaacatgtaa

SEQ ID NO: 2296 - protein, 509 aa, Sorghum bicolor
MKRWEFDSVNQASTLITSWFSGNPSECQLLQDYLNSISSNGKITDSNPFPFLFITGSTEHLYACCTGGIFYDAQNDFLTPEWDSENLPSDSDDSSHVQIIRESSGFTDSSYTAPPSSGPYKRRKITKSDDGSSSTEESYTEIVASPTHLSSSCSSCDSDNENVKPLLEPSTYKDVLICFRFDDHDLPFRLKEVILSDVRLLTLLEYGLPSWVIFLQSYPVFCKIYRPWMCPLARALYVLMSLITVLIGFYDLYKNVPMLKATASRLFGPFFDWIETWEMISRLKYLGTMLFLHNFQQAFTWSLKIVGAAKSVLSVLTKPIAGPIVEVLELTMPMWNLCAETAGHLSSVVMVALETSWSVVIGTVEMIIWPFWFVFSTMISVGMVAITSYIIYFVFFPCFNSYAMLILFLSPVNSILYPIIWLLGEILAAPFRLVIGLSSFAVDLFVDIVSVLRESWSTLTALYQVGSVPSSPLLTSDNSIWGSLWKDLLYQIFRALRSILWFYCLLFNM

SEQ ID NO: 2297 - DNA, 3450 bp, Sorghum bicolor
atggagccctcgccggagccttcgccgccggtcaccacggccaccttccccgctgccggcgaaggacacgagacgtacccgcccacggtgtcatcctctctattcccacttttccccctctctgcctccagctcctccgctcccacagccgaatcccagtggctttcaaaccctagcttctccttcgatgcctcctccctgaacgtcccggctaccacctcctcgtcgctcccgccaccgctaagcccctcgtccgatgaggacacgccgctgcagcgcgcccctgcgaaatacgagctggtgccttcgtcgccgtcctccgacgaggagagggggtcgcggaggaaggagagtgggaggaggaaacggaggcgcgagaaggagcgctatgatggggcagcggcgtcgcggaaggctgtggttcgcacctgggctgggtcgcagacgaagccagctaaggattactatgtcgacgcgaagggcgaccatgataacctggcttttggatcactttacagaatggatgttgcacgctacagatcccagaacatgctggaggcacttggtttaaatcgtttgaggtttggttcatcacatattgattttgattcagacttggatggaatagataacaaagtaagagctggaggccgttactattcagcaaaaaatgcagtttttgaaagaaataggggtttcaagcatctgaaactatttaagggaaacacctctgtaatgcttgctgaagattttgtcccctttgatacacaatcacttcctgtgaaaagcacagctgcggaacaggagctagaggaatcttgggaagatgaaatacttcgtcggactagggaattcaataagatgtctcgtgaacgtcctcacgatgaaaaagtttggctggcctttgctcaatttcaggacaaagttgctagtactcagccacaaaaggctgctcgtttacaaactactgaaaggaaaattagcatattggagaaggctgtggagcttaatccagatagtgaggaattattgctttgccttctgaagtcatatggcaagagggacagcactgagactctattggctaaatgggagcaagtacttacgaagcatccatgtagctgtaagttgtggaaacagtatctgcttctgtgccaaggggaattctccagattcaaagtttctgaaattcggaagtcctacgtgtatgctgtacaggctctatctgcagcttgcaccaagctatgtaggcaggataatgaaagcatggattccaaatcttcttccttagttcagctagaagtggggttagtggatatatttgttaatctgtgccgatttgagtggcagacaggacatcgggaattagcaactgggctatttcaggcgcaaatggagtttagcttatttgcccctcctctgtatctgacgacaagcagtaagcaaaggctctttgaacacttctggaacagtggcggcgccagaataggggaagatggagctcttggatggtctgaatggttagcaaaagatgaggagagtagacagaagttgtctatgcaagaaaattcacaagagactgaaacaggaggctggagtggttggtttgatccttctgtgggtaatactgacgcaaatgatttgtcaaacaaatcactggaaccatcattgagcgatggaaatgatgccgaagatcttgatgctgaggactcacctgcacaagatgatgttgaatccttgctaaaaaagcttggtatcgatgtagatgcagagtccaatagtgaagttaaagatgcagaaacctggaatagatgggccttgatggagttgtctcgggacaatgagcaatggatgcctcttcatgaaaattctggtgatgctccatctggggaagacaatgaccagctttccagagtaattttgtttgaggatgtatctgagttcctgttttcgctatcttcagaggaggcccgcttttctttgatgtgccaatttattgatttttatggtggcaaaatctcaagatggacatccacaaacagtccgagttggcttgatagaattttgagcttagagatgattacaaatgacatcctggaagatctaagtgctgtatctgacgttgtaaacaagaaccaaagttcatatagttacaaattggaatcattactgggaagcatgcatgacctttcacaaaggccaggccttatgaagtttctcagaaatgcgatactgcttctgcttggtgttttccctcgtaatcatgtcttggaggaagctgttcttgttactacccaaatgtttgctcctcaagagaactcctcctctactcaagctaacgcatcacgggctttggccaaaagtatgttgaagaaagacagacaggattttttgctttgtgggatatatggacgaactgaggcaatgaatgggaacattgaacaagcaaggaagatatttgacacagcactattatcaactgaagcaactactgaggatcttaggaagaaggttcctatcctttatctttggtattctgagatggagataacagtgtccgcttcaagaaacaactctgactcaatgcatcgtgcagtttacatcctatcctgcttagggagcaatctaaaatattccccttttgttagccctatttcaaggcttcaggtcttgaaggctcgccaagggtttaaagagcagattagaagcttacaatctgcattttcctgtggtcatataaaagaagaatcagttgctctgatctgctcagcttctttgtttgaaagcatgacaacaggctgttcctcggggcttgaagtgatagaggagaccttcccaatggcactttcagagagcagtcataacttggagtgtgaggatttgtgggtgtactacatcaaactgcttcagaaaaatcttaaccggttgagtctatcaagggtctggccaagcatattgcaaggagtgcacaaatatccctacaatccaaaatcatattcagccatgttaaccctgagctatctttacagtgtatccaacaatctccgtctcacactcgacaaatgtagtcaaagggatccttctgtaatcaccttgctctttgctttgtcctttgaatggagtaaagccggatctgacaatagaatacacagcctctttgagagagctctagctgatgataagttgcagaagtctgttctgttgtggcgctgttatctagcctatgaggcagaaatagcctgcaactcttctgcagcacggcgtgtgttcttcagagctatacatgcctgtccatggtctaaaagattatggcttgatggtttccaaaagttgggctcggttctgacattgaaggagctatcagatctccaggaagtgatgcgtgacaaggaactaaacatccgcactgacatctacgagatactcctagaagacgaaacagatacatga

SEQ ID NO: 2298 - protein, 1149 aa, Sorghum bicolor
MEPSPEPSPPVTTATFPAAGEGHETYPPTVSSSLFPLFPLSASSSSAPTAESQWLSNPSFSFDASSLNVPATTSSSLPPPLSPSSDEDTPLQRAPAKYELVPSSPSSDEERGSRRKESGRRKRRREKERYDGAAASRKAVVRTWAGSQTKPAKDYYVDAKGDHDNLAFGSLYRMDVARYRSQNMLEALGLNRLRFGSSHIDFDSDLDGIDNKVRAGGRYYSAKNAVFERNRGFKHLKLFKGNTSVMLAEDFVPFDTQSLPVKSTAAEQELEESWEDEILRRTREFNKMSRERPHDEKVWLAFAQFQDKVASTQPQKAARLQTTERKISILEKAVELNPDSEELLLCLLKSYGKRDSTETLLAKWEQVLTKHPCSCKLWKQYLLLCQGEFSRFKVSEIRKSYVYAVQALSAACTKLCRQDNESMDSKSSSLVQLEVGLVDIFVNLCRFEWQTGHRELATGLFQAQMEFSLFAPPLYLTTSSKQRLFEHFWNSGGARIGEDGALGWSEWLAKDEESRQKLSMQENSQETETGGWSGWFDPSVGNTDANDLSNKSLEPSLSDGNDAEDLDAEDSPAQDDVESLLKKLGIDVDAESNSEVKDAETWNRWALMELSRDNEQWMPLHENSGDAPSGEDNDQLSRVILFEDVSEFLFSLSSEEARFSLMCQFIDFYGGKISRWTSTNSPSWLDRILSLEMITNDILEDLSAVSDVVNKNQSSYSYKLESLLGSMHDLSQRPGLMKFLRNAILLLLGVFPRNHVLEEAVLVTTQMFAPQENSSSTQANASRALAKSMLKKDRQDFLLCGIYGRTEAMNGNIEQARKIFDTALLSTEATTEDLRKKVPILYLWYSEMEITVSASRNNSDSMHRAVYILSCLGSNLKYSPFVSPISRLQVLKARQGFKEQIRSLQSAFSCGHIKEESVALICSASLFESMTTGCSSGLEVIEETFPMALSESSHNLECEDLWVYYIKLLQKNLNRLSLSRVWPSILQGVHKYPYNPKSYSAMLTLSYLYSVSNNLRLTLDKCSQRDPSVITLLFALSFEWSKAGSDNRIHSLFERALADDKLQKSVLLWRCYLAYEAEIACNSSAARRVFFRAIHACPWSKRLWLDGFQKLGSVLTLKELSDLQEVMRDKELNIRTDIYEILLEDETDT

SEQ ID NO: 2299 - DNA, 2295 bp, Sorghum bicolor
atgactgaccaggagcgagatgacattcccatgttgctaagaaatgttgagctaccaagatttcctctaagaagtacttcaatgtgtataccagtcagggatgatgaatatgaagaagacacctttgtaccccatactggtcctctattcgttcagacgccaactcagacggcaccgggaatttcatttacaagtagagacacacctgataggcttcctagaccttcacagggaaaacaagtcagcaagccacatgcaatcatgcctgaagaaattagaggaaataggtggtcttacagtggacaggttccaaagaatgaacatttgatgatgtctggacctttggggcaatgtgataatcctgattgtgtgaattgccctcctgcttgtaaaaataaaagacatttccagagaggttcgaatgctttagacaataagattcataacattctttatggtcacagtggtggatggaagaagaaaattgagcagatcatggcatacattccgattatgaacccacatgcaaagccggttcagcagtggaatcaattctttgtcatatcatgcctgattgccattttcattgatcccctgttcttcttcttactatcagtacgccaggatggcaactgcatagtgttaaattggaactttgctacaggacttgctgttgtgagaagtgtgactgatgctatttatttcctgcacatgctgcttcagttcagactggcttatgttgcgccagagtcacgagtggtgggagctggagacttggttgatgagccaaagaaagttgctatacattatctttgtggttactttttccttgatttctttgtggtgctcccactccctcaggtgatgatactgctagttgttcctaaagttgggttatctgctgcaaactatgctaagaatttattgcgtgccactgttcttcttcaatatgtgccccgtatcatcagatttgtgccacttcttgatggtcagtccgccaatggattcatatttgagtcagcatgggctaattttgtgatcaatcttctgatgtttgttttggcgggacatgtggttggttcatgttggtatctctttggcttacagagggttaaccaatgtctacgagatgcttgttctgcatcaaccattccatattgtgactcctttatagactgtggacgtggcattgggagtggactgtacagacagcagtggttcaatgacttgggtgcagaagcttgttttaacactggaaataatgctactttccaatatggaatttatgagcaagctgttttgctaactacagaagacagtgctgtaaaacgatatatatattcattattttgggggtttcagcaaataagtaccttagcaggaaaccttgtcccgagttactttgtatgggaagttctgttcacgatggctattattggtctgggactgttgctttttgcattgcttattggaaacatgcaaaattttctccaagctcttggaagacggagattggaaatgcaacttaggcgacgtgatgttgaaaagtggatgagccatagacgattgcctgaagatttgagaaggagggttagacgagctgaaaggttcacctgggcagctactcaaggagtgaatgaagaggagcttttgagtaatttacctgaagatatccaaagggatatacgtcgccacttctttagattccttaataaggtccgattattcaccttgatggattggcctatcttggatgcaatatgtgacaaattaagacaaaacttatatattagtggaagtgacattctttatcaaggtggcactgttgaaaagatggtcttcatagtgagagggaagcttgaaagcatcagtgcagatggtagcaaggctccattacatgatggagatgtatgtggagaggagctcctcacctggtacttggaacactcttcagcgaatagagatggtgggaaaattaaattccaaggtatgcggttggttgctatacgcacagtaagatgtttaacaaacgttgaagctttcgtactcagagcaagtgatctggaagaagtcacctcacagtttgctcgattcttgcgtaatccacgagtgcagggagcgatcagatatgaatccccctactggcgaaccattgctgcaactcgtattcaagttgcatggaggtatcgaaaaaggcggctgaagcgagctgagaagtcgaggttgagcgaagaaacctatacctcacatgggatcttgacacctgattcttttcagcgtggacagaggggatga

SEQ ID NO: 2300 - protein, 764 aa, Sorghum bicolor
MTDQERDDIPMLLRNVELPRFPLRSTSMCIPVRDDEYEEDTFVPHTGPLFVQTPTQTAPGISFTSRDTPDRLPRPSQGKQVSKPHAIMPEEIRGNRWSYSGQVPKNEHLMMSGPLGQCDNPDCVNCPPACKNKRHFQRGSNALDNKIHNILYGHSGGWKKKIEQIMAYIPIMNPHAKPVQQWNQFFVISCLIAIFIDPLFFFLLSVRQDGNCIVLNWNFATGLAVVRSVTDAIYFLHMLLQFRLAYVAPESRVVGAGDLVDEPKKVAIHYLCGYFFLDFFVVLPLPQVMILLVVPKVGLSAANYAKNLLRATVLLQYVPRIIRFVPLLDGQSANGFIFESAWANFVINLLMFVLAGHVVGSCWYLFGLQRVNQCLRDACSASTIPYCDSFIDCGRGIGSGLYRQQWFNDLGAEACFNTGNNATFQYGIYEQAVLLTTEDSAVKRYIYSLFWGFQQISTLAGNLVPSYFVWEVLFTMAIIGLGLLLFALLIGNMQNFLQALGRRRLEMQLRRRDVEKWMSHRRLPEDLRRRVRRAERFTWAATQGVNEEELLSNLPEDIQRDIRRHFFRFLNKVRLFTLMDWPILDAICDKLRQNLYISGSDILYQGGTVEKMVFIVRGKLESISADGSKAPLHDGDVCGEELLTWYLEHSSANRDGGKIKFQGMRLVAIRTVRCLTNVEAFVLRASDLEEVTSQFARFLRNPRVQGAIRYESPYWRTIAATRIQVAWRYRKRRLKRAEKSRLSEETYTSHGILTPDSFQRGQRG

SEQ ID NO: 2301 - DNA, 792 bp, Sorghum bicolor
atgaccacctctggcgcgcccaagcccccaggcttcaagcgctcctcgcccaggaagaagtcgcggctcagaagccgccgcgtcgccgccggagacggagagggcaaggccgaggccgaggcggcggggaccccggcgttggcgagggcattgcttccccacgcatcggtggagttggacgcggtgccgcctgttgggtgcacattgccgcgagacttcttcgaggtggatgcgctcgacctcggcccccgcctcctcggcaagctcctgcgccgcgacgaggtcgtcctccgcatcaccgaggtggaggcctacaggccaaatgattccgcatgccatggccggttcggcatcacagcaaggactgctccagtgtttggaccgggaggccatgcatatgtatatctgtgctatggactccacatgatgctcaatgttgttgccgatatagagggtgttggtgctgctgttttgatccggtcatgttctccagttagcggtcttgcaactattcagcagcgcagaggtcaacaaacagagaaaccaatcctacttacaggaccaggaaaggttggacaggctctgggcctatccactgattggtcgaaccatcctctctacacacctggtggtttggaggtattggacgggccagagcctgagagcattttggttggtccccgcgtcggcatcgattatgcatcccccgagcatgtcgctgcgccgtggaggttcgccattgccggcacgccgtggatcagcgccccaaaaaatacactccgggcacgctga

SEQ ID NO: 2302 - protein, 263 aa, Sorghum bicolor
MTTSGAPKPPGFKRSSPRKKSRLRSRRVAAGDGEGKAEAEAAGTPALARALLPHASVELDAVPPVGCTLPRDFFEVDALDLGPRLLGKLLRRDEVVLRITEVEAYRPNDSACHGRFGITARTAPVFGPGGHAYVYLCYGLHMMLNVVADIEGVGAAVLIRSCSPVSGLATIQQRRGQQTEKPILLTGPGKVGQALGLSTDWSNHPLYTPGGLEVLDGPEPESILVGPRVGIDYASPEHVAAPWRFAIAGTPWISAPKNTLRAR

SEQ ID NO: 2303 - DNA, 303 bp, Sorghum bicolor
atgagaactagtcgcctggtgttcctattcgccatcgccctcctgctactgctagcatcttcagatttgacgacgacaaaggcgtcggccggatgcccacatccccgttcgacaatcctgtacccaaacttgccgtgtgatcccgacgtctgtgcgaagagttgcgccaagggactgaacaacggcaacggcacctgcatgggtcccattggatgtgattgcgagtactgcgtgccagcaaccgtcccaaaacgcccgcctttctctacgcgaaagtccaaactgcacgtactagctgtgtaa

SEQ ID NO: 2304 - protein, 100 aa, Sorghum bicolor
MRTSRLVFLFAIALLLLLASSDLTTTKASAGCPHPRSTILYPNLPCDPDVCAKSCAKGLNNGNGTCMGPIGCDCEYCVPATVPKRPPFSTRKSKLHVLAV

SEQ ID NO: 2305 - DNA, 336 bp, Sorghum bicolor
atgaagatgggtctcatgacactactgctactcgccatgtttgttgtgttgtcattgcctgcagatagcacgacggacagggttgggccaaactacttccaggacacctgctcggcgacgatttccccagggacacagtgccaaccccggaagtgctccgacgactgcaccagccgattcaggggcggggtgggcgactgcgaccattccgtatgtagcctgcgccacagcgcgcgccaggcgggcggctcccacgactggaactctctcgttgggagggaacggacatctgctgagcatgcaagagaggcagccgatcgaccagagcttcattag

SEQ ID NO: 2306 - protein, 111 aa, Sorghum bicolor
MKMGLMTLLLLAMFVVLSLPADSTTDRVGPNYFQDTCSATISPGTQCQPRKCSDDCTSRFRGGVGDCDHSVCSLRHSARQAGGSHDWNSLVGRERTSAEHAREAADRPELH

SEQ ID NO: 2307 - DNA, 3879 bp, Sorghum bicolor
atggcgcgcggcggcggggggcggtcgaagaaggaggaggaggagctgcagggggcgatgcgcgggtaccatgaggcggtagcggtagggaaccgggaggaggaggcgcgctgggccaacgtcatcggcgacatccacaagcgccgcggcgagtacgtcgaggcgctcgggtggctccggacggactacgacgtctccgtcaagcacctcccgcagaggcacatcctcccttcctgccagtcgctcggcgaggtacacctccgcctcggccaattctcggaggcgctcaaataccagaagaagcatctacatcttgcaacggattctgatgaccttgttgagcagcagcgagctaccacgcagcttgggagaacataccatgagatccttctaagatctgaaaatgaccatagtgccataaggaatgcaaagaagtattttagtatttcgatgaatctggcaaatattctgaaggagaaatctcctcaaaagtcggactttctaaaagaacttattgatgcatacaataatatgggcatgcttgagctggaacttgataattttgaagaagctgagaaactacttgtccagggtctgaagatatgtgacgacgaagaggtagattcatatgatgacgctcgcacaaggctccatcataatctaggaaatgtgtatactgaactacagaattggaaagaagccagtgggcacatccagaaggatatacagatatgtaaaaaaataggccatcttcaaggtgaggcaaaaggatacataaatctgggggagttgcattatcgagttcagaagtatgatgaggcacaacaatgttacaataaagcttttcaagtagcaaaatccttgggagatgaggatgctctaattaaacaaattaaacagaatattaaaactgttgcaaaagcagttgaagtatttgagcagttgaaggaggatgaacagaagctaaaaaaacttgtccgagacacttctaatgctcgtggaacgtctaaagagaggaaactcctccttgatcagcatgcatggctggataatcttattgagaaggccagtatgatatgtgcatggaaaaaaggacaagcattagcgaaagtgcacattggcaatgttcttgattcttgtgctgactatcctggtgcattgcaagcttacaaagaaggctacaggattgctttggaaggagacctacctaatgtgcaactttctgcccttgagaatatgcattacagttatatggtcagatttgataatattgaagaagccaagaaaatgcaggaaaaaatagacaatctgaagcaaacactgaatcaatgtgtagcaagggctactgtcagtgactattgctcagaaactgatactgaaggtggttgcgcatcagataatatgcttgatgctgagaatgactatgggcaggctgcaaataactactctgaggaacctgatgatgatgttacgcttgcttcacttgttcataggagtggaagctcatccaagattaaggcacccaagatatggagttcttctaagaaggttgacgaactatgtgatgtggctgaagacatacgtaattcttctaagaaggttgatgaactaggtgatatggctgaaggcactaggacagttttaagtaaatcacgtgctgatcactctgttcgccgaaaacgtgtccgtgtgatcttatcagatgatgaatccgatgagaatcctgaaatcattcaatttaaaaggacatcaactagtccagtagatagtatgtcaatctcagatcatggagcaaacagcagcaaaaaccaggatactttacaacctaatcaaacaagggatgcaccctgtcctgctgaggagagtatttgttcattcaaatcaagtagtcctattggtcatgcttttgaaggcataggattaggtgcttccagtataggaaagggatcaacctccaaatcagcagcaagtggttccaagttcagtactcctggctcaaacagtctgcatgagagccaaaatgttgttggtcttcaatccacagatgctaataatcacttttgggccttcagaatcggtggccatctggtttacttggatggacgcgcttgtgtacatgaaggtgcttttagcattgactctctcaaagttgaagtagcatgtgtatattatcttcagatttctgatgaaaaaagggccaaaggtctattgcctatcattggggaactcaagttttgtggaaaggtattggaagatgcggcatccatatattatgatgatcagcttatttctgaacagaagtgtgttgatgttgttattgatgattgggtgccaaagcggcttatgaaattgtatgttgatttctgcatgaagtcctcagatgcacccaataagaagctgctgacgaaactatataatcttgaggtatctgaagatgaaataattgtttctgattgcggactgcaggatatgtcaattgtgtcctttcttgatgccctaagatctcataaaacaatagcagttttggacctttctcataatttactaggaaaccaaacagttgaaagacttcagcatatatttgcttcatcgagtcacacatatggtggcttgactctggatttgcattgtaatcgattgggtccaactgctttatttcagatatgtgagtgctctattttgaccaatcgattggaagtacttaatctatctgggaatcgcctcactgatgcatgcagttcttatcttttcacaatcctgcaaaagtgcaaagcactttatagcttgaatgtcgagcagtgttctatcacgtcaagaaccgttcagaagatgacagatgcacttcatgaagggtctgtcctttcacatctctcattaggaaagaaccacccaatttctagcaatacaatgcttaaccttctatccaaacttgcgtctctcacaaggttttcagaactaagcctgactggtataaaactgaacaagttaatggttgataagctgtgcctccttgcacaatcctcgtgcctatcaggacttctgctgggtggaacttccattggaccggtggagacaattaagcttactgaggcattgtcttgtacatctcaagaattactaaggttggagttgtctaattgtgggcttacaacacctgatttgacacaaatctgtacaaatctctctcggatcaatattcttgagttaaaccttggaggaaatccaattaatctggagggctgtgatgctatacagggaatgcttgtaaatccccaatgcagcattagatctctcacccttgacaaatgcaatcttggacttgctggaattgttcgtgttattcaatcattatcagaaaatagccaattagaggagctgcgcatgtctaagaacacgaatttggagtcagagagaacaataaagtatgatgaagacatgcaggaagtatcaacaactgctgagcaaaaacaatgcaataaccctgaaacaaagaatgatatagctccaggggacatagattttgcgaacatgcaggttccagatagtgaagatgaagcagataatgatgcccaccatgccatatctggtccacataggagctgtgcaagttcatcgcagaaaaactcttactcttcttgtcagattattgaagaactggcggaggccctaatttcagcaaagcagttgaaggtgcttgatcttagttgtaacggtttgtcggaagaggccatacagtcactgtattctgcttgggcttctgttccaagaggcgatggaatggcacgaaaacatgtgaataaggaagtggtccacttttcagtggatggtatgaggtgctgcggcctaaaaccctgctgcagaagagacctgcaaatgtga

SEQ ID NO: 2308 - protein, 1292 aa, Sorghum bicolor
MARGGGGRSKKEEEELQGAMRGYHEAVAVGNREEEARWANVIGDIHKRRGEYVEALGWLRTDYDVSVKHLPQRHILPSCQSLGEVHLRLGQFSEALKYQKKHLHLATDSDDLVEQQRATTQLGRTYHEILLRSENDHSAIRNAKKYFSISMNLANILKEKSPQKSDFLKELIDAYNNMGMLELELDNFEEAEKLLVQGLKICDDEEVDSYDDARTRLHHNLGNVYTELQNWKEASGHIQKDIQICKKIGHLQGEAKGYINLGELHYRVQKYDEAQQCYNKAFQVAKSLGDEDALIKQIKQNIKTVAKAVEVFEQLKEDEQKLKKLVRDTSNARGTSKERKLLLDQHAWLDNLIEKASMICAWKKGQALAKVHIGNVLDSCADYPGALQAYKEGYRIALEGDLPNVQLSALENMHYSYMVRFDNIEEAKKMQEKIDNLKQTLNQCVARATVSDYCSETDTEGGCASDNMLDAENDYGQAANNYSEEPDDDVTLASLVHRSGSSSKIKAPKIWSSSKKVDELCDVAEDIRNSSKKVDELGDMAEGTRTVLSKSRADHSVRRKRVRVILSDDESDENPEIIQFKRTSTSPVDSMSISDHGANSSKNQDTLQPNQTRDAPCPAEESICSFKSSSPIGHAFEGIGLGASSIGKGSTSKSAASGSKFSTPGSNSLHESQNVVGLQSTDANNHFWAFRIGGHLVYLDGRACVHEGAFSIDSLKVEVACVYYLQISDEKRAKGLLPIIGELKFCGKVLEDAASIYYDDQLISEQKCVDVVIDDWVPKRLMKLYVDFCMKSSDAPNKKLLTKLYNLEVSEDEIIVSDCGLQDMSIVSFLDALRSHKTIAVLDLSHNLLGNQTVERLQHIFASSSHTYGGLTLDLHCNRLGPTALFQICECSILTNRLEVLNLSGNRLTDACSSYLFTILQKCKALYSLNVEQCSITSRTVQKMTDALHEGSVLSHLSLGKNHPISSNTMLNLLSKLASLTRFSELSLTGIKLNKLMVDKLCLLAQSSCLSGLLLGGTSIGPVETIKLTEALSCTSQELLRLELSNCGLTTPDLTQICTNLSRINILELNLGGNPINLEGCDAIQGMLVNPQCSIRSLTLDKCNLGLAGIVRVIQSLSENSQLEELRMSKNTNLESERTIKYDEDMQEVSTTAEQKQCNNPETKNDIAPGDIDFANMQVPDSEDEADNDAHHAISGPHRSCASSSQKNSYSSCQIIEELAEALISAKQLKVLDLSCNGLSEEAIQSLYSAWASVPRGDGMARKHVNKEVVHFSVDGMRCCGLKPCCRRDLQM

SEQ ID NO: 2309 - DNA, 3324 bp, Sorghum bicolor
atggcgccctctgctgcagtcccgggcggttctgaggctgagggggcaccacgcatggccaagttcctctgcagctttggaggcagtatccttccccgaccactcgatggctgtcttcgatatgttggtggtgagacaaggattgtcatgttgccgcgtgacatatcatatgccgacctagctgcacggatgagagagctctataaggatgctgatatcatcaagtaccagcaacctgatgaggatctggatgcgctggtctcggttgtgaacgacgatgatgtggtgaacatgatggaggagtatgacaaggtcattgccactggggaggccttcactcggctcaggatcttcttattttctcagcatttggatgatgatgctgcatcagtggctgtgcattacaatgtagacgagcgggaaacagagaggaggtatgtagatgcgctcaacagccttggtgatgttaagtcaccttcctcccctgtatctgtggagcagctttttggcattggaggcaatgattcaggaattccagattttgctggcttgagacatttgaatgtccctcgtccatcacatagtcagaggtatggagagatggattccccttggagccctgcatatgtctcgcctggccagtacggagtgcatgacccaagggattttccaatttcaccatcatctgcaaggttccaagtaggagcggaggattttgatgagaggattcctgacgactttgtaaggcagtcaccaaaatatcggcattatgaggcccagtcaccatcacatgtggataatttagtctggcttccacctggtgctataattcagcaaaatgcaggctttcccggtaatttgagccggtccaacaatttcttggatgggaacagcggatgtgatcactgccgttcaccattccagaagggtcaaggttcagtgagtgatcctatctatatgaaccctcgttggactcggccagtccaacaacattttgaccaagcaagcatgattagtgattatccaagtcaccatgctagttcttgttcagattactgccgccctggtgagcattatgtgggaggtcaagatgttagattggaaaatggtgtttatgttaaagagcaaaatggtggccatcctcccatgttttataatgagtcacatcctcatgatagagtctggcatgcacataccaaccaaagtcatcagcggtatgaggatccaaggctgcatcatcctgctaatggtagagtgattgaaccatacattgtcgatggcaactctgtcaattcagcatttgcaccaaacaaagtatatgaaatgcattcagcatctcttggtcgttctagtcatgaaagtcctcaccattttcatggtaccagtgagctcataaatgacacgtaccacaaccaacaagttggaggcagtgggtcgtatgtgcaaccagcagggtttgaagaatcctctgggcagcattacaaccactcttcggcctatggtgcagattccttttaccaaatgcagcagaatttgccaccgattcagtccctgaggaggagagcgaacagccctgttcacactgcctcaccatatgattccccacacctgccaatgccaaatgggagcattagcacaaactttgttagaaatacaggtgatgttagtcccaggataccaggtctacctggatatgatcggatgccaaacccatggactcctcccaatggcaacataccatatagagttgttggacatgatgttccttctgccatggaaaacactagtgcttttgcacctaggtctaatccaactgctgctcagtatgttcagccttttattgctcctgaatcaatccagcatcaacctggaggtccattgattcatcctgaaagagcataccctgaacccatgccggcatcatatgctgatagcaaagtagctgtttctgcattgcccctcactgatcaattatccaggttggatgcaaacacaatgaagaaacttgaaggtccagatgataactctactcgaaatgtgaatgaaacaactcctttgcatgctgtgaatgaaccaagtaccttaccccaccatgttggagctgtgcatgaagtcagtcctaagcagaagccaaccgaacatgaaagcaggcaaaagcaacatgaagctggggctacagcactgcaggaatgtggggatatttcagaggataggttgaatttccttcctgaattaattgcctctgttaaaaaggcagcactggaagatgctgctgagacacaaatagtccaatcagatgctaatgctgctgtttcacctgttcctgatgatgacgataatggaaagaagttggatgaggcaactgctgttaatacagatgcaaatcaggaccctgatttgcaaggaagccttgatcggcagaagagctccaagattgagtccacaactgctgaagctgaagctttgtcaaaaggactacagactatacaaaatgatgatttggaggaaattagagagctgggttcaggtacttatggtgcggtctatcatggtaaatggaggggatgtgatgttgctattaaaagaataaaagcaagttgctttgatggaagaccatctgagagagagcgtttgattgcggatttctggaaagaagctctgatcctaagctcacttcatcatccaaatgtggtttcattttatggtgtagttcgtgatggtccggatggaagcttagcaactgttactgagtttatggtcaatgggtctctcaaacagttcctgaggaaaaaagacaggacaatagatcgccggaagagagtaatattagccatggatgctgcatttggcatggagtatttgcacgggaagaatatagtccattttgacctgaagtgtgagaatctactagtgaacatgagggatccgcagcgaccaatctgcaagatcggtgatctcggactatcaaaggttaaacaacatactttggtatctggtggtgtcagaggaaccttaccatggatggcaccagagcttctgagtgggaaaagtaatatggtgtcagagaagatcgacgtctattcgtttggaattgtcatgtgggagctgcttactggggatgagccatactctgatatgcgtgctgctgaaattattgggggcattgtaaacgattccctacgtcctcaaatcccttcgtggtgtgatcctgagtggaaggggttgatggaaagctgttggtccagtgatccagctgagagaccgtccttcactgatatatctcaaaggttgaggaaaatggccgctgcaatgaatgtgaagtaa

SEQ ID NO: 2310 - protein, 1107 aa, Sorghum bicolor
MAPSAAVPGGSEAEGAPRMAKFLCSFGGSILPRPLDGCLRYVGGETRIVMLPRDISYADLAARMRELYKDADIIKYQQPDEDLDALVSVVNDDDVVNMMEEYDKVIATGEAFTRLRIFLFSQHLDDDAASVAVHYNVDERETERRYVDALNSLGDVKSPSSPVSVEQLFGIGGNDSGIPDFAGLRHLNVPRPSHSQRYGEMDSPWSPAYVSPGQYGVHDPRDFPISPSSARFQVGAEDFDERIPDDFVRQSPKYRHYEAQSPSHVDNLVWLPPGAIIQQNAGFPGNLSRSNNFLDGNSGCDHCRSPFQKGQGSVSDPIYMNPRWTRPVQQHFDQASMISDYPSHHASSCSDYCRPGEHYVGGQDVRLENGVYVKEQNGGHPPMFYNESHPHDRVWHAHTNQSHQRYEDPRLHHPANGRVIEPYIVDGNSVNSAFAPNKVYEMHSASLGRSSHESPHHFHGTSELINDTYHNQQVGGSGSYVQPAGFEESSGQHYNHSSAYGADSFYQMQQNLPPIQSLRRRANSPVHTASPYDSPHLPMPNGSISTNFVRNTGDVSPRIPGLPGYDRMPNPWTPPNGNIPYRVVGHDVPSAMENTSAFAPRSNPTAAQYVQPFIAPESIQHQPGGPLIHPERAYPEPMPASYADSKVAVSALPLTDQLSRLDANTMKKLEGPDDNSTRNVNETTPLHAVNEPSTLPHHVGAVHEVSPKQKPTEHESRQKQHEAGATALQECGDISEDRLNFLPELIASVKKAALEDAAETQIVQSDANAAVSPVPDDDDNGKKLDEATAVNTDANQDPDLQGSLDRQKSSKIESTTAEAEALSKGLQTIQNDDLEEIRELGSGTYGAVYHGKWRGCDVAIKRIKASCFDGRPSERERLIADFWKEALILSSLHHPNVVSFYGVVRDGPDGSLATVTEFMVNGSLKQFLRKKDRTIDRRKRVILAMDAAFGMEYLHGKNIVHFDLKCENLLVNMRDPQRPICKIGDLGLSKVKQHTLVSGGVRGTLPWMAPELLSGKSNMVSEKIDVYSFGIVMWELLTGDEPYSDMRAAEIIGGIVNDSLRPQIPSWCDPEWKGLMESCWSSDPAERPSFTDISQRLRKMAAAMNVK

SEQ ID NO: 2311 - DNA, 900 bp, Sorghum bicolor
atgcataagcagcagcagcagcagcatacggagcggtggggcgatctcctcgacgacgatggcggcgacttcgacctcggcgtgctcctcccgccgccggtcgtcgtcgggcccgacgccaacggcttgaagaaggtgatcgagtaccacatcgacgacgagggcaacaaggtcaaggtcaccaccaccacgcgggtccgcaaggtgcgccgctctaggagggccatcgagcgccgctcgtggcccaagttcggcgacgccgccaaggaggccgccggatctcggctcaccatggtctccactgaggagatcttcttcgatcgcacacgtgcagcatcaggaaacacaggcgacggagcagggccatctacttccgctgattcactggccaagggaaacgataaaccaggaggaggcctcctcatggtttgcagaacctgcgggaagaagggtgaccactggacctcaaagtgcccctacaaggatcttgctccacagcagggcgaaagctctggcgacaggcctcctagcgccgacggctctggcggcgcagccggcggcaagggtgggagtggagcatatgttcctgtgttcaagaggctgggtggcgacagaagtggagcggatgtgatgaggcgcaggaacgacgagaactcggtccgcgtgagcaacctctcggaggacgctagggatcctgacctcgcagagctgttcggccagtttgggcagcttagccgcgtctatgtagcaatagacagggtgactggagagagcagggggtttggcttcgtcaactttgttcacagggaggatggcgagagggctatcaacaagctcaatgggtacggttacgacaaccttatcctgcacgtcgaatgggcagcgccaaggcccaactag

SEQ ID NO: 2312 - protein, 299 aa, Sorghum bicolor
MHKQQQQQHTERWGDLLDDDGGDFDLGVLLPPPVVVGPDANGLKKVIEYHIDDEGNKVKVTTTTRVRKVRRSRRAIERRSWPKFGDAAKEAAGSRLTMVSTEEIFFDRTRAASGNTGDGAGPSTSADSLAKGNDKPGGGLLMVCRTCGKKGDHWTSKCPYKDLAPQQGESSGDRPPSADGSGGAAGGKGGSGAYVPVFKRLGGDRSGADVMRRRNDENSVRVSNLSEDARDPDLAELFGQFGQLSRVYVAIDRVTGESRGFGFVNFVHREDGERAINKLNGYGYDNLILHVEWAAPRPN

SEQ ID NO: 2313 - DNA, 1638 bp, Sorghum bicolor
atggcgatcacagcgacgacccccgacatcctcggcgagcgccagtccggtcaggacgtccgcacgcagaacgtgatggcgtgtggggcggtggccaacatcgtgaaatcctcgctcggccccgtcggactcgacaagatgctagtggacgatattggtgatgttacaatcactaatgatggagcaaccatacttaagatgttggaagttgagcacccagctgccaaggttcttgttgagttggctgagctccaagaccgtgaggtaggagatggaacaacttctgttgttatcatagcagcggagttgctcaagagaggcaacgatcttgtgaagaataagatccatccaacctctataatcagtggctacaggcttgctatgcgtgaagcctgcaaatatgttgaggaaaagttggcagtcaaggttgacaaacttggaaaagactcccttatcaactctgcaaaaactagcatgtcttcgaaattgattaatagtgacagtgatttctttgcaactctggttgttgaagctgtccaggctgtgaagactacaaatgccaagggagaagtgaaatatccaatcaagagcatcaatattttgaaagctcatggtaaaagcgccaaggatagttacctgctaaatggctacgcactaaacacaggccgtgcagctcaaggaatgcctacaagagtaactcctgctagaattgcttgtcttgattttaatcttcagaagacaaaaatgcaacttggtgtccaagttctcgtaactgatccaagggagcttgagaagattcgtcagagagaatctgacataatgaaggagcgaattgagaaaattctcaaggctggagctaatgttgtgttgaccaccaagggaattgatgatatgtccttgaagtactttgttgaggctggagcgattgcagtaaggcgtgtgcgcaaggaagatttgcgccatgttgccaaagccactggtgcaactatggtgagtacatttgcagacatggagggtgaagaaacatttgatgcatcattccttggacatgctgatgaagttgtggaggaaagaattgctgatgatgatgttattctggtgaaaggcacaaagaacactagcgcggtctctataatacttagaggtgcaaatgacttcatgcttgatgagattgaccggtccttgcatgatgccctgtgcattgtgaagagaaccctggaatcaaatatggttgttgctggtggtggtgcagttgaggctgcgttgtcagtttacctggagaaccttgcaacgaccctaggttctcgggaacaactggcaattgctgaatttgctgaatctttgttaatcataccaaaggtactatctgttaatgctgcaaaagatgcaactgagcttgtagcaaagcttagggcatatcatcatactgctcaaacaaaggccgataagcaacattattcaagtatgggtcttgacctctccaaaggtatcattcgcaacaaccttgagtatggcgtgatagagccatcaatgagtaaagtgaagattattcagtttgctacggaggctgccattacaatcctgaggattgacgacatgatcaagcttaccaaggaagagggtaacgaagaagagtaa

SEQ ID NO: 2314 - protein, 545 aa, Sorghum bicolor
MAITATTPDILGERQSGQDVRTQNVMACGAVANIVKSSLGPVGLDKMLVDDIGDVTITNDGATILKMLEVEHPAAKVLVELAELQDREVGDGTTSVVIIAAELLKRGNDLVKNKIHPTSIISGYRLAMREACKYVEEKLAVKVDKLGKDSLINSAKTSMSSKLINSDSDFFATLVVEAVQAVKTTNAKGEVKYPIKSINILKAHGKSAKDSYLLNGYALNTGRAAQGMPTRVTPARIACLDFNLQKTKMQLGVQVLVTDPRELEKIRQRESDIMKERIEKILKAGANVVLTTKGIDDMSLKYFVEAGAIAVRRVRKEDLRHVAKATGATMVSTFADMEGEETFDASFLGHADEVVEERIADDDVILVKGTKNTSAVSIILRGANDFMLDEIDRSLHDALCIVKRTLESNMVVAGGGAVEAALSVYLENLATTLGSREQLAIAEFAESLLIIPKVLSVNAAKDATELVAKLRAYHHTAQTKADKQHYSSMGLDLSKGIIRNNLEYGVIEPSMSKVKIIQFATEAAITILRIDDMIKLTKEEGNEEE

SEQ ID NO: 2315 - DNA, 477 bp, Sorghum bicolor
atggcggcggatccgagcaggcggcggccggtgcaccatccggcggtgagcgacgtcctgtcgacgctctccgaagccagcgccaccctcgccgacgtgcagcgccgcctcgaccttgagttcagcgccgcctaccctgaccatgcgaatccggcgaagctggtggcgcgggtgaagcgggtggtggaagaggtggccgtgctcaaggagatgagccgcgacctcctcaccgagaagcagaggctgatcgaccaaatccgcgtgagcttgatggcgcagcgcggcatgacgcagcggctgctcgccgcgtccgggctgcctcccttgtccgatgatgacgaggccgtcctcaacagcctcaacgaggtgatccaagaatgggctgctcatgtcagtcccatcccaagtggaagggagatcgaggacctggacaagaacgatgccaaccagatcctcttctcgactactatcatttag

SEQ ID NO: 2316 - protein, 158 aa, Sorghum bicolor
MAADPSRRRPVHHPAVSDVLSTLSEASATLADVQRRLDLEFSAAYPDHANPAKLVARVKRVVEEVAVLKEMSRDLLTEKQRLIDQIRVSLMAQRGMTQRLLAASGLPPLSDDDEAVLNSLNEVIQEWAAHVSPIPSGREIEDLDKNDANQILFSTTII

SEQ ID NO: 2317 - DNA, 2028 bp, Sorghum bicolor
atgaggccagaggagagaaatgctgccgtggggagggtcagggaccagttccccgtcggcatgcgggttctcgccgtggacgacgaccccgtgtgcctcaaggtgcttgagaacctcctgcgccgctgtcagtatcgtgttacaacgacgaatcaggctgttgtcgccttgaggatgctgaggcaaaacagggacttgtttgatcttgttatcagtgatgtgcacatgccagacatggatggctttaagcttctggagcttgtggggctcgaaatggacctccctgtcattatgttatcggtgaatggagagacaaaaactgtaatgaaggggataactcatggcgcctgtgactatctcttaaaacctgttcggctggaagagcttaggaatatctggcagcatgttgttaggaggaaattcagtaactgtgagcgtgctaacattgatggctatgaggagtgcaccaggccatcaaatgcagattttgatcatgtacacagccaaattacaggtgggacacctgaccaaagtgggaggtccagcaagaagaggaaggaatatcatagtgaagaggaagatgaaggagaagagagtaatggccaagagaacgatgatccttcagctccaaagaaaccaagggttgtttggtcagttgaactacaccgaaaatttgttgctgctgtcaatcagctaggaattgacaaagctgtgccaaaaagaatacttgagctcatgaatgttgagagactcaccagggaaaatgttgcaagtcacctgcagaagtatagactctatcttaaacggctaagtgctgtggcatcgcaacaggctagcattgttgctgctttcggaggcaatgacccctttatgcggatgggtgcatttgaaggactccagggttatcaatcttttgcctcttcagcagctctgccatcttttactccacaggggttgttaaatagaaatagcccaacatcatttgcgctccaagggatgtctgcttccaggccaattcagattgcaagcaattccacaataagtcattccattagcgatccaaataaatatcaccttagcttaccaggtactagtagccgacaaggaaatctggcacaaggtttgactacttcagttgggcaggtccagctgccacaaaagtggatacatgaagaaactgatgatctatctactatcctttctgtgagtggccaggctaataatggtgtgcccggcacactccaaagtgtcacaaacagtcatttgctgcagcaaggcctcgttgaatgtagacaagacaaagttgttatccagccttgttcatctgcaagttcagatcgtcttgaaggcactgttggagtttcctccagtttgatggattcttgtgcatcccagcagaatgttgttccattgtctgccttttctatcagtgcatcgccaatgaatggctcgctttgcagtaacggcgtagctgagttgggtgctacatcctctgtaggtacaaatatttgcccctccaatgatctcagggtagcaagagacaacaatgtgggagctagctcttttggtagtgtgatacttttgtctccagacactgtgccaaaccaaaaatacttgaattttggtggtggaagcaatttgagacaaagcatggatggagggaacacagacaatctgttaaattccaagctaatatggagttgtttgccgacctctcaaccatcgaatcttgttggaagtcatcatcccatgagccaaagactgaataacggaaaccttggtggcacaatggttggacagactacagcagctgctccacagacgaggatcgacatgtttacctccggagacacaccaactccaaagagcgcgtcagatttgagcttccctaaggtccacagtgagcttagctctagcagctgcagcttcgatggcctcctaaactctataatcaaagtggagaaggacgatgcttccttcagcgatgaccttggatgcgacttctactccctgggtgcctgcatatga

SEQ ID NO: 2318 - protein, 675 aa, Sorghum bicolor
MRPEERNAAVGRVRDQFPVGMRVLAVDDDPVCLKVLENLLRRCQYRVTTTNQAVVALRMLRQNRDLFDLVISDVHMPDMDGFKLLELVGLEMDLPVIMLSVNGETKTVMKGITHGACDYLLKPVRLEELRNIWQHVVRRKFSNCERANIDGYEECTRPSNADFDHVHSQITGGTPDQSGRSSKKRKEYHSEEEDEGEESNGQENDDPSAPKKPRVVWSVELHRKFVAAVNQLGIDKAVPKRILELMNVERLTRENVASHLQKYRLYLKRLSAVASQQASIVAAFGGNDPFMRMGAFEGLQGYQSFASSAALPSFTPQGLLNRNSPTSFALQGMSASRPIQIASNSTISHSISDPNKYHLSLPGTSSRQGNLAQGLTTSVGQVQLPQKWIHEETDDLSTILSVSGQANNGVPGTLQSVTNSHLLQQGLVECRQDKVVIQPCSSASSDRLEGTVGVSSSLMDSCASQQNVVPLSAFSISASPMNGSLCSNGVAELGATSSVGTNICPSNDLRVARDNNVGASSFGSVILLSPDTVPNQKYLNFGGGSNLRQSMDGGNTDNLLNSKLIWSCLPTSQPSNLVGSHHPMSQRLNNGNLGGTMVGQTTAAAPQTRIDMFTSGDTPTPKSASDLSFPKVHSELSSSSCSFDGLLNSIIKVEKDDASFSDDLGCDFYSLGACI

SEQ ID NO: 2319 - DNA, 888 bp, Sorghum bicolor
atgggcaacgtcacgtcgtcggtggcggcgcggctggccttcttcccgccggagccggcgacgtacggcatcgaggcccaggacggcgccggctccctgctgcggatgacgggggtgtcgccggacaccggcgtcgaggtgcgcgcgctgcccaccagggccggcacgcgcgtcgtctccgccttctggcgccaccccgccgcgcggctcacgctgctctactcccatggcaacgccgccgacctcggccagatgttcggcctcttcctcgagctccgcgcgcacctccgcgtcaacatcatgagctatgattattcaggctatggtgcctctacaggaaaaccatcagagtacaacacatacaatgacatagaggctgtttatgattgcttgaaaaaggagtatgggatagaagaagaggatttaatcctgtatgggcaatcagttggaagtggaccaacattgcatttagcctcgcgtttggagaagttaagaggggttgtccttcacagtggtatactctctggcatacgggttctgtatccagtgaaagtgacactttggttcgacatcttcaagaacatcgacaaaataaagcaggttgcctgtcctgtgttagtcatacatggaacagcggatgacatcgtggacttcactcacggcaagcgcctgtgggagctagccaaggagaagtacgagccgctgtggatcaaaggcggtgggcactgcaacctggagacgtacccggagtacatcaggcacctgcgcaagttcataaacgctatggagaagctggccaaggacagcaaggcggcccaggcgccgccatcgtcgagcttggcggcggaagcaagacactccaagtgcttgagattcgggaagaggtga

SEQ ID NO: 2320 - protein, 295 aa, Sorghum bicolor
MGNVTSSVAARLAFFPPEPATYGIEAQDGAGSLLRMTGVSPDTGVEVRALPTRAGTRVVSAFWRHPAARLTLLYSHGNAADLGQMFGLFLELRAHLRVNIMSYDYSGYGASTGKPSEYNTYNDIEAVYDCLKKEYGIEEEDLILYGQSVGSGPTLHLASRLEKLRGVVLHSGILSGIRVLYPVKVTLWFDIFKNIDKIKQVACPVLVIHGTADDIVDFTHGKRLWELAKEKYEPLWIKGGGHCNLETYPEYIRHLRKFINAMEKLAKDSKAAQAPPSSSLAAEARHSKCLRFGKR

SEQ ID NO: 2321 - DNA, 2190 bp, Sorghum bicolor
atgtcgggctgggacgagggcgccgtgttctatagcgaccaggcgcagttcccccgcggcggccccggcggcgacccagccgccgacctcacccgccactccgccctccgcaagttcaaggagttcctcagaggcttcaccggccccaccggcgacttcccctaccgtgagagcctagtacacaaccgcgaccatgtcaccgtcgccatcgaggacctcgacgccttcgatgccgagctctctgacaggatccgcaagtcgccggccgattatcttccgctgtttgagacggctgcggccgaggttctcgcaagcctccgttcgaaggtcgccggcgagaccggggagatggaggagcccgtcacgggagatgtccagatcttcctctcctccaaggagaactgcctgtccatgagatctgttggggctgattacatgtcgaagctggttaagattgcgggaatcacaattgctgcatcgagagtaaaagccaaggccactcatgtaactcttatctgcaagaattgccggagtgtgaggacagtgccttgcaggccaggcctcggcggggctattgttccacgttcttgtgaccatgttcctcagcctggagaagagccctgccccctggacccttggattgccgtcccggataagagcaagtatgtggatctccagaccctcaaactgcaggagaatcctgaggatgttccaactggtgagcttccaaggaatgtgcttctttctgtagataggcacctagttcagactattgttccagggactagattaactgttgttggcatctacagcgtctaccaagcatccgcaacccagaagggcgctgttggtgttaaacagccttacattagagttgtgggtttggagcaatctcgagacaataactcaaatggcccctcaaacttcactctcgatgaggaaatggaattcaaagaatttgcacagagaccagatgcatatgccaagctttgctcaatgattggtccttcaatttatggtcattctgatgtcaagaaagctattgcatgcttgttatttgggggatctaagaagaggctacctgatggtgtacgtttgagaggggatattcatgtcttgcttctgggtgatccatccacagcaaaatcacagttcctcaaatttgtagagaagactgcacctattgcagtctatacatctggcaaaggatcatctgcagctggtcttacagcatctgtaactcgggatggtagctcgcgtgagttttatttggaaggaggagccatggtactggctgatggtggagtagtctgtatcgatgaatttgacaagatgagacctgaagacagagttgcaattcatgaggccatggagcagcagacaatatctattgccaaagctggcattacaacagttctcaattcaaggacttcagttcttgcagctgccaatccaattgcaggacgctatgatgatcttaagactgcacaagataatattgatctgcagacgaccattctttctagatttgatctaatctttatcgtcaaagatatcagaatgtatgatcaagataagcgaatagcaagccacattatcaaggtgcatgccagtggtgctgcagcttcttccacaggcacagaggcaagtgatggagagaattggctgaaaaggtacattgagtactgccgtgccacatgcagaccacggctttcagaaaaagcagctgagatgctgcagaacaaatatattgagattagacagaaaatgaggcagcaagctcatgagacagggagggcagcagcgatacccatcactgtgaggcagcttgaagccatcatacgtttgagtgaatctcttgcaaagatgagattgacaagtgtggctacaccagaacatgtcgaagaggcattcagactgtttaatgtctccaccgttgatgctgcaagatccggaatcaacgagcatttgaacctgtcaccggagattgctaatgaaatcaagcaagcggaagcacaaataaagagaagaatgggcattggaagccacatatctgagcgacggctgattgatgaactaaataggatgggaatgaatgaatccattgtcagaagagcccttctgatcatgcatcaaagagatgaggtggagtacaagcgagagcgccacgtgattgtccgaaaggcttga

SEQ ID NO: 2322 - protein, 729 aa, Sorghum bicolor
MSGWDEGAVFYSDQAQFPRGGPGGDPAADLTRHSALRKFKEFLRGFTGPTGDFPYRESLVHNRDHVTVAIEDLDAFDAELSDRIRKSPADYLPLFETAAAEVLASLRSKVAGETGEMEEPVTGDVQIFLSSKENCLSMRSVGADYMSKLVKIAGITIAASRVKAKATHVTLICKNCRSVRTVPCRPGLGGAIVPRSCDHVPQPGEEPCPLDPWIAVPDKSKYVDLQTLKLQENPEDVPTGELPRNVLLSVDRHLVQTIVPGTRLTVVGIYSVYQASATQKGAVGVKQPYIRVVGLEQSRDNNSNGPSNFTLDEEMEFKEFAQRPDAYAKLCSMIGPSIYGHSDVKKAIACLLFGGSKKRLPDGVRLRGDIHVLLLGDPSTAKSQFLKFVEKTAPIAVYTSGKGSSAAGLTASVTRDGSSREFYLEGGAMVLADGGVVCIDEFDKMRPEDRVAIHEAMEQQTISIAKAGITTVLNSRTSVLAAANPIAGRYDDLKTAQDNIDLQTTILSRFDLIFIVKDIRMYDQDKRIASHIIKVHASGAAASSTGTEASDGENWLKRYIEYCRATCRPRLSEKAAEMLQNKYIEIRQKMRQQAHETGRAAAIPITVRQLEAIIRLSESLAKMRLTSVATPEHVEEAFRLFNVSTVDAARSGINEHLNLSPEIANEIKQAEAQIKRRMGIGSHISERRLIDELNRMGMNESIVRRALLIMHQRDEVEYKRERHVIVRKA

SEQ ID NO: 2323 - DNA, 522 bp, Sorghum bicolor
atggacgacggtggcgactggatcacggcgaggtacctcctctcgtcgattcttgggcggaacccgctggtggtggactacgtcgacgaggagtccttccccgtcgacgaccctcctagtcctagtccctcctccccctcttgcgcccgccgcgcggagccgccgccgccgccggtgcgggcgcccgcgggggtggccgggacggtctgcgcggtgtgcacggaggagatcgccgcggcggacgccgtcgtgcgcctgccctgcgcgcactggtaccaccacggctgcatcgcgccctggctcgggatccggcccacctgccccatgtgccgcgccgagctgccgccgagcgaacccgaggccggcggggaaggcgcggggcgtgccaagccggcggcgcccgctcggggtgttgccgccgcggggaccagcaccggtgcgaccgcgaccgcggccgcgcgcgtgcggcgggaagcgtcgcacgagtacctcgccgtcgccggcggcgtgttgtccggctga

SEQ ID NO: 2324 - protein, 173 aa, Sorghum bicolor
MDDGGDWITARYLLSSILGRNPLVVDYVDEESFPVDDPPSPSPSSPSCARRAEPPPPPVRAPAGVAGTVCAVCTEEIAAADAVVRLPCAHWYHHGCIAPWLGIRPTCPMCRAELPPSEPEAGGEGAGRAKPAAPARGVAAAGTSTGATATAAARVRREASHEYLAVAGGVLSG

SEQ ID NO: 2325 - DNA, 912 bp, Sorghum bicolor
atggggctgagggacatcgagctgacgctgccgccggggttccggttctaccccagcgacgaggagctggtgtgccactacctgcacggcaaggtggccaacgagcggctcgccggcgccggtgcagccatggtggaggtggatctgcacacccacgagccgtgggaactccctgacgttgcgaagctgagcacgaacgagtggtacttcttcagcttccgcgaccgcaagtacgcgacggggctgcgcaccaaccgcgccaccaagtccggctactggaaggccaccggtaaggaccgcgtcatccacaaccccagggccggcggccaccaccaccaccgcgccatcgtcggcatgcgcaagaccctcgtcttctaccgcggccgcgcacccaacggcatcaagaccagctgggtgatgcatgaattccggatggagaatccccacaccccgcccaaggaggactgggttctgtgcagggttttctataagaagaaggccgacgccatggactacgccatggccgacagcgagcaggacgtcggcatgcatatgcctcgcggcggcgctgactcgagcagctattcgcctcctccgttccccgcgctcggcggcagccacttccaccaccatcatctgacaccgctgacagaccaccacggcggcggctgcctgaacaacgaattccccggcatggcggcgctgctgcagcacaacaacggcatgttcgaccctcacgtcgtccagcctcaccttcacgacagtgtcgtccttgctgggccgccggctgctgcagcggcggcggggtcaacaagggacggcggcgagcagtgtggcagcggggtgctcatggacctaggactcgacgagcactacacctacaacagctacaacagcctgctgcagatgtga

SEQ ID NO: 2326 - protein, 303 aa, Sorghum bicolor
MGLRDIELTLPPGFRFYPSDEELVCHYLHGKVANERLAGAGAAMVEVDLHTHEPWELPDVAKLSTNEWYFFSFRDRKYATGLRTNRATKSGYWKATGKDRVIHNPRAGGHHHHRAIVGMRKTLVFYRGRAPNGIKTSWVMHEFRMENPHTPPKEDWVLCRVFYKKKADAMDYAMADSEQDVGMHMPRGGADSSSYSPPPFPALGGSHFHHHHLTPLTDHHGGGCLNNEFPGMAALLQHNNGMFDPHVVQPHLHDSVVLAGPPAAAAAAGSTRDGGEQCGSGVLMDLGLDEHYTYNSYNSLLQM

SEQ ID NO: 2327 - DNA, 189 bp, Sorghum bicolor
atgagtaatgttaaccaacctgtatgggatgtgcttatgagtttgaaggtccctatatttcttcgcaagtccatagtctattatatatacctgccacaaaagccagtaagatcaacaataattagaccaagagatctcatttccatagggaggtgttttctggaatataacatattggcagctacatag

SEQ ID NO: 2328 - protein, 62 aa, Sorghum bicolor
MSNVNQPVWDVLMSLKVPIFLRKSIVYYIYLPQKPVRSTIIRPRDLISIGRCFLEYNILAAT

SEQ ID NO: 2329 - DNA, 2676 bp, Sorghum bicolor
atggcgccgcagcccactccgcctccgcgtccggcgccggcgccgacgccgacgcctcaggccgcggccgcgacgaaccccaggacgcccgcggccaagcaccgcctccacttccccgccgccaccccgaggaacgccaacaacggcggcggcggcggcgccacggagcatccggtcgaggtgatcggccgcatccggaacctcgcctcggggaccgcgtccgcgctggagattgcgagcggcgggacggccgtgcgcgtgcgcggcgacgcgggcggttgccgcgacttcacccttgacggcgtctccgtgtccgaggaggaggacctcgaggggttctaccgccgcttcgtgcgctccaggatccagggcgtccgggtcggggccaagtgcaccgtcatggtctacgggcccacggggtccgggaagagccacaccatgttcggctgcaccaaccccaagcagcccgggatcgtgtaccgcgcgctcagggacatccttgagggaggaggcggcggcgaaggcgattccgctgaggatgacgccgggtttgacgccggcctcttcgtccaggtcgcggtgctggagatctacaacgaggagatctacgatttgctcgcgggaagcggggccactgctaaaggaaacgcccccaaggcgagactggaagtaatggggaaaaaggcaaagaacgcaacttatatatctggaaatgaagctgggaagatatcaagagaagttgctaagattatcctggatgtcccatctgtgggaggaaggttaatgcttgtggacatggctggatcggaaaacatagaagcagcaggacaaacaggatttgaagccaaaatgcagacggcaaaaattaaccaagggaacactgctttgaagcgagtggttgaatccattgctaatggtgattcccatgttccatttagggatagcaagctcacaatgctactacaggactcattcgaggatgacaaatccaaaatcctgatgattctgtgcgccagtcctgacccaaaggaattgcacaagacagtttctactttggaatatggtgccaaggcaaagtgtattatccgtgctgctcatgccgcaacacctagggacaaaatgagctctgaggagtcatctgcaatgctcaattctagaattgttgcgatgaaccagttcatccacaagcttcaaaaggagaacaaacttagggagaaagagcgcaatgaggcccagaatgtgctaaagctgaaggaagaggagctagcacaactgagagcaaagctcaagctgatagaagggcaagaaatggaggaaatctggtcattgaggagtgaactcgcgaagatggaagaagcgatgcgtaagcagcagcaagagctcactgcactaagacatcaactgcatgaggttgagcgtgaaaaggctgatggttctcagctagtgcagcaggattcttttggaggtagattgctggcacggctatcagagatgcctgcaggccttgatcaatcaatggcaatgtccatgtctatggacttggatacaggagatcagccagccatgcaagacgtcaaggtaataaaggaggatcctcaccagcagggccacatacggaatcaaacagccacagcagcaagtgcttgcacagggtctgcggtgcaagaagatgatgtcaggctgtccgggtatcctgaaaagactgtcctcagcactgtgtttgaggagggagacgaagatgatgcagagaaggaatgtggtcttcaagaggaggtacgcaaggaggttgtagaggagaactttaagatggacacaacacaacatacactttctgagccagacgatcctgcaacaaggaagcatcggattgagaacatattcaggctatgtggcaattatcgtgaaatagctaagaaaccaaaggtccagtcaccagcaaaggaaatgttctggaatgagaacaagtctccagcgaagcaagtgtttggggatcagaacaaatcattggcaaaccaaacttttggagatgaaaacaaggagccgtcggcatggggagctatagagaaccccatgtgcgacgtcagagtgactgacagcccagtgtcttctcaactttctccaatcgtatgccaagttgtggatgcaccattatcggatcaactgaatacatgcagtgcagcggaagagagtgatccgaagaaggagaacagccttgctggacagaaggatggcggcctcttggaagtttacataaaatgggagtctggcagcctgatcaaagggctgaaggtactgcacaactcatgcctttcagatctgaggaagctcatagaggctcactttgaagaagtaggcagcaaacagcagcagcatcagttcaccttccttctcctcggggacccgtccggtgctcccgtgtccagggacaaggaagcttcggtgcagataagcaggctgcctcactggaacaaccagccggacagctacctggcgtgcctgcgcgcggccaagaagccggctgtggacaacatgcccttcagcccactggacagcaagctgaacacggttttgaaggacgcccacctcgccggtgcgatgtcacccaaggtcaaccagatgagctcgcccaaggtcaaccagatgagtcccaactacatccgggagctgagagcttga

SEQ ID NO: 2330 - protein, 891 aa, Sorghum bicolor
MAPQPTPPPRPAPAPTPTPQAAAATNPRTPAAKHRLHFPAATPRNANNGGGGGATEHPVEVIGRIRNLASGTASALEIASGGTAVRVRGDAGGCRDFTLDGVSVSEEEDLEGFYRRFVRSRIQGVRVGAKCTVMVYGPTGSGKSHTMFGCTNPKQPGIVYRALRDILEGGGGGEGDSAEDDAGFDAGLFVQVAVLEIYNEEIYDLLAGSGATAKGNAPKARLEVMGKKAKNATYISGNEAGKISREVAKIILDVPSVGGRLMLVDMAGSENIEAAGQTGFEAKMQTAKINQGNTALKRVVESIANGDSHVPFRDSKLTMLLQDSFEDDKSKILMILCASPDPKELHKTVSTLEYGAKAKCIIRAAHAATPRDKMSSEESSAMLNSRIVAMNQFIHKLQKENKLREKERNEAQNVLKLKEEELAQLRAKLKLIEGQEMEEIWSLRSELAKMEEAMRKQQQELTALRHQLHEVEREKADGSQLVQQDSFGGRLLARLSEMPAGLDQSMAMSMSMDLDTGDQPAMQDVKVIKEDPHQQGHIRNQTATAASACTGSAVQEDDVRLSGYPEKTVLSTVFEEGDEDDAEKECGLQEEVRKEVVEENFKMDTTQHTLSEPDDPATRKHRIENIFRLCGNYREIAKKPKVQSPAKEMFWNENKSPAKQVFGDQNKSLANQTFGDENKEPSAWGAIENPMCDVRVTDSPVSSQLSPIVCQVVDAPLSDQLNTCSAAEESDPKKENSLAGQKDGGLLEVYIKWESGSLIKGLKVLHNSCLSDLRKLIEAHFEEVGSKQQQHQFTFLLLGDPSGAPVSRDKEASVQISRLPHWNNQPDSYLACLRAAKKPAVDNMPFSPLDSKLNTVLKDAHLAGAMSPKVNQMSSPKVNQMSPNYIRELRA

SEQ ID NO: 2331 - DNA, 1479 bp, Sorghum bicolor
atggagacgacagtggcggcaccgggcgcctccgccagctgcgagagcgagatcacgcgactgccggaggacctcctgttggcgtcgctcgcgcgcgccgggccggtggccgcctgccgcgccgccgctgtctgccaagccttccacgcagcggccgacaccgacgcgctctgggcctgcttcctgccccacgacctccctccgttcgctgacaaggagctctccccaccaccgccgtccaagaaggagctgttcatgcggctctccgacggccccgtcctcctcgccgacggcctcacgagcatgtgcctgcacagggagacaggtgccctgtgctacatgctgtccgcaaggaagctgagcatcgctttggctgacagttttcgtactccggcccactgtcgctggatccccatcaccggttcctgcagattctcagaagctgttgaactccgacattaccggtggttggaaataggtgccaagattgacagcatgatgctctcccaacacacaacatatgctgcttatattgtgtacaaagtagaagagaataggtggcatgaacggtttactagcatttttggggcatcaaagtttcctaaagaaagacatgatggttggatggagggggagatgggcgggttccataatgatgaaggtgaagacggtgaggtttccatcagctttaggacgttgccatatgcgaagattggtcttgttgctctgggtattgagattagacctaagggcctcctctccacatcgatcgccggcaagcgtgtggctatttggccagccttccgcgccccatgtcatctcccattgcttgctgatggggaggtccttcaacccctggcgtccatgaaggcgttgttcttgcggctcttggacggccccgtcctcctagccgatggcctcacgagctcgtggcttgacaaggagaccggtggcatatgctacatgttgtccgcgaggaagctcagcattgcgtggggtgataatccgacctattggcactggattcctatcaccggcttcagattctcagaagcggctgaactccagaaggctaagtggttggaaatacgtggcaacattgacagcaagatgctctcccaacacacaacatacagtgcttacattgtgtacatgatatctatcgactactacgggcttcgagccttaaagacattcgttagcctcggaggaaggaataagtcaacgggccacgtttgtcttgttgatggctataactactcggaacattggcaagtgatgcgagagtatcttcctgaagacacacactttcctcaagacagaggtggtggcgggatgatggaggcggagctaggtgagttccacattagtgaaggcgacaatggtgaggtttccatcagtcttatggatacgttcagctctaagtgtggtcttgttgtcatgggcattgagattagacccaagaaacaaggggtttga

SEQ ID NO: 2332 - protein, 492 aa, Sorghum bicolor
METTVAAPGASASCESEITRLPEDLLLASLARAGPVAACRAAAVCQAFHAAADTDALWACFLPHDLPPFADKELSPPPPSKKELFMRLSDGPVLLADGLTSMCLHRETGALCYMLSARKLSIALADSFRTPAHCRWIPITGSCRFSEAVELRHYRWLEIGAKIDSMMLSQHTTYAAYIVYKVEENRWHERFTSIFGASKFPKERHDGWMEGEMGGFHNDEGEDGEVSISFRTLPYAKIGLVALGIEIRPKGLLSTSIAGKRVAIWPAFRAPCHLPLLADGEVLQPLASMKALFLRLLDGPVLLADGLTSSWLDKETGGICYMLSARKLSIAWGDNPTYWHWIPITGFRFSEAAELQKAKWLEIRGNIDSKMLSQHTTYSAYIVYMISIDYYGLRALKTFVSLGGRNKSTGHVCLVDGYNYSEHWQVMREYLPEDTHFPQDRGGGGMMEAELGEFHISEGDNGEVSISLMDTFSSKCGLVVMGIEIRPKKQGV

SEQ ID NO: 2333 - DNA, 435 bp, Sorghum bicolor
atgccgtcgcggcagcgccgacgcggcgacctcgccgtcgcggctgcgctgctggcgacggtggcgctggcggccggggccgacggcggcgcggagttcgattaccggaagctctcggggatcatcatcccggggttcgcgtccacgcagctgcgcgcgtggtcggtcctcgactgcccctactcgcccttcgacttcaacccccttgattccgtctggctcgacaccgccaagcttttctctgcagtgaattgctggcttaaatgcatgctgcttgaaccctataatcagacagaccatccggaatgcaagtcaaggcctgatagtggtctttctgcaattacagagttggaccctggttatattacaggtttcaggtcctctctcttcagtatggaaagaatgggtcaaatggtgtgtagagtttggcattga

SEQ ID NO: 2334 - protein, 144 aa, Sorghum bicolor
MPSRQRRRGDLAVAAALLATVALAAGADGGAEFDYRKLSGIIIPGFASTQLRAWSVLDCPYSPFDFNPLDSVWLDTAKLFSAVNCWLKCMLLEPYNQTDHPECKSRPDSGLSAITELDPGYITGFRSSLFSMERMGQMVCRVWH

SEQ ID NO: 2335 - DNA, 603 bp, Sorghum bicolor
atggcggccaccgcgatggaccacgacggcggtgggggcgacgtggtcacaccaggggagctcctcggcaactccttaactctcgcggccggacgcggcgcctacgccgacggccgctccgtgcgcgcgtcggtcaccgggcgccgccgcatcgtgccgcccgcacctggctccgacgaccagagatccacggtggaggtggtggggcacaaggcccatggagctgtgccgcagccgggaagtgtcgtcatcgcccgagtaacaaaggttatggctagaatggcctctgcagatatcatgtgtgttgactcaaaggctatcaaagaaaagttcactggcatgataaggcagcaagatgttcgtgcaactgaaattgacaaggttgatatgtaccagtcatatcggcctggggacattgttaaagctatggttctttcccttggtgatgcaagggcatattacctttccacggcgaagaatgaacttggagtcgtttcagcacaaagtatagctggtggcacattggtcccaatcagttggactgagatgcaatgtgacttgactggtcaaattgagcaaaggaaagttgcgaaggtggaatag

SEQ ID NO: 2336 - protein, 200 aa, Sorghum bicolor
MAATAMDHDGGGGDVVTPGELLGNSLTLAAGRGAYADGRSVRASVTGRRRIVPPAPGSDDQRSTVEVVGHKAHGAVPQPGSVVIARVTKVMARMASADIMCVDSKAIKEKFTGMIRQQDVRATEIDKVDMYQSYRPGDIVKAMVLSLGDARAYYLSTAKNELGVVSAQSIAGGTLVPISWTEMQCDLTGQIEQRKVAKVE

SEQ ID NO: 2337 - DNA, 3771 bp, Sorghum bicolor
atgccggcgggtgagatggcaatgcccgccgcggtggcgcggttgcgggagctggcgccggcgccaggggcggaggtggagctggagctcgacgccgccggcgcggccgcgctagccgagtgctgcgcggggctcctccgcgctgctggcggcggcggcggagacaccgacgccggggccacacgcgtggcgctcgaggcgctctgcgctgcaggcgtagggggagcgatgcgtcgccatgccgacgggctcgcgccgctagtcgtcgcgcgcctcggcgacggacacgcggctgtgcgggaggccgcaaggaggtacctcgtgctgctcatggagatgaaggagatgaatgcaagaacggaaaacacagagccaaattcctgcatgccagatgaccaacacgttcactatacgacaatcgaaatggaatcttctagtagcagtcaagcaagaaaaaattccaaagagaagatcagcacaagagatatctcacttcttgcaggagaaagagatattacaagaaaagtagtcgaacctataaaggttttctctgagaaggacctactaagggagatagaaaaagtagtatctactttgcagccagataatgagtggtcaatccggataactgcaatgcaaagagtggagggtttagtgcttggaggtgctgcagactattcagccttccccatgctcctaaaacagctggtgacccctctaataactcagcttctggataggagatcgagcattgtaaaacaggcatgccatttactaaacttcctatcgaaagagttactacgcgactttgaaccatatgcagagctgcttattccggtccttcttaagaatgtcgtgatcaccatccttgtaattgctcactctgctgataactgtataaaagagaatgatagaagtgctattcttcgtgccaggtgttgtgaatacgcaatactaatgttagagtgctgggttgatactccagaaatacagagatcagctgacctgtacgaagaccttataaaatgctgtatagcagatgcaactactgagatgataaatgatgaagatgctgagacacctcaaaggcatcttcctccagttaaattagggcagcctcaacctagttctttcattccagctgtaatagataaagttgttaaggtcgattctgggacatcattttcttctggagatgtgcaaccatcagacagactttacctccagtgtgatgatatgacctcaaaagacccagatgaaggcaataaggatgacactttgactactggaagttcttttgaggataagatcacactaagaaaagtagaaactacagacagagatactgagaaatatgattcaggcaacagtgcaggtgtcaattcatcagcttgtgacccaccaactgccactcccattacaacagaagcaccttcagaaatgtcactgaatgatgcagctgttgtaacaattgttcaagataaggctgaatgcaggctgaatgttgaaccaataactcagcaagttcaaggacgagaagatccttctgaattgacgtgcctgccacctgcagttaactcgaaaggtccagggaacctgctaaaggaaaatcctgttgaagtaagttctggtgctggatcaagtggaaaagtaggaactcataagaagagtgctgtttctaaggagccacgtggtagttacacccctaacttccggcgacctctcttgagtaagcagatgacaaattggttttatgccagtacaaaaagtgatatacatgagaagcaactcattttgggagaaatggtcaacaacatggatgtgccctcatctcttacagaggcactttctttaggtctaaacccaatatcagattggatgatgaaggtatatgcattcagtttcttaaggcagtgtttgctagaacgtggatcaaaaagcactcaggaagttgcacaaaattttgagaaggttatgaggcttgtttgtcgatatctggatgatccccatcacaaagtggcacaggccgctctctcatcattagctgagatcatgccagctttcaagaagccttttgaacattatctcgacaagacactgccccatattttctctcgattaaatgatccaaaggaatcaatcaagcagcagtgcttgggaattttgaaacatgcaaatgaaagttatcccattgattctcttttacccgccttacttcgttcgctagacgaacagaaatctcccaagtcaaaactggcagttcttgagtttgcaaatgcctcttttgttaaatgcacagtcaattctgaaagctattctagcagcagtttccttaagccatggttggggaagcttgcccttttgtttaatgataaaaacaaaaaactgaaggaggtcacagtggttggtttctcatctatttactctcattatgaccctgaatccatgttaagctttttggtcacattgtcaatggaagaacaaaagcggctaagacgggcaatgatgcaactaatacctacaatagaaagtgacttcgaagagttcttgcaacaaaagagacataagcaaaaggcatcttttgatggtttcactgctaaatcaccacttcatcctgcatctcaatctgcaaaatcacccctgcatcctgcttatcgatcttccaaatcacctgcccatcctcgatctgctaaatcaccacttcattctgcatataaatatgctaagtcaccgctgcatccctcatatcaacctgctaaatcaccgctgcatcaagcataccaatctaattctgttaagactgatgattgtttcagttctgcactccagtgtctcccaaatatatctttggaagtcaaggggtaccgtactgaaaggattgagtttgaatctcctaatgaatcttatggtcacaaagctgaaatgatggacaagaagtcttgtaccttgaggtcaaggaatgatctccggagaagaattgactttagtgtgatatcagataacatagttcagagtgcaagcagggacagttggagtgcgaaggtatttgatgaaccaaatgataatgaactgcacataaatacccgaaaaagcaaagttatgaggatgaggaatgacagccaggatcatgagttatatggtaaggcagtgagtcaattggaagaagattctgagacgaatggacacccagtgcccaccaagaatttacaccagatgtcttcttcccttcttgagatgcttgatgatccagatgtgcccacaagagagcttgcgctttctctgttggttgaaattcttgaaaagcaccgaaaggcgatagagaactgcattgaacttcttatagttaagctgctgcatgcaaccaaagacggtgccttgaaggttgtaaatcaggcccatatctgcttgacaactgtggtcactcaatttgacccactgagatgccttggggccatagcttctcagttggccagccaggatgagaaaattcttattataagcatcaatagtttgagcaagcttgtgatccgattatcagaggacaacctgatggctcatttgtcaacgtttcttcctgcacttctggatgctttcgaaaaccacagtccatacgtccgcaaggctgcgatggtgtgcgtggtggacgcatacctgaagctgggttcgacgctgctgccgtacctggaaggcctggacaccgcgcagctgcagctggtaaccacctacgccagccgtctgtcccaggcaagattgattgcggcggacggctga

SEQ ID NO: 2338 - protein, 1256 aa, Sorghum bicolor
MPAGEMAMPAAVARLRELAPAPGAEVELELDAAGAAALAECCAGLLRAAGGGGGDTDAGATRVALEALCAAGVGGAMRRHADGLAPLVVARLGDGHAAVREAARRYLVLLMEMKEMNARTENTEPNSCMPDDQHVHYTTIEMESSSSSQARKNSKEKISTRDISLLAGERDITRKVVEPIKVFSEKDLLREIEKVVSTLQPDNEWSIRITAMQRVEGLVLGGAADYSAFPMLLKQLVTPLITQLLDRRSSIVKQACHLLNFLSKELLRDFEPYAELLIPVLLKNVVITILVIAHSADNCIKENDRSAILRARCCEYAILMLECWVDTPEIQRSADLYEDLIKCCIADATTEMINDEDAETPQRHLPPVKLGQPQPSSFIPAVIDKVVKVDSGTSFSSGDVQPSDRLYLQCDDMTSKDPDEGNKDDTLTTGSSFEDKITLRKVETTDRDTEKYDSGNSAGVNSSACDPPTATPITTEAPSEMSLNDAAVVTIVQDKAECRLNVEPITQQVQGREDPSELTCLPPAVNSKGPGNLLKENPVEVSSGAGSSGKVGTHKKSAVSKEPRGSYTPNFRRPLLSKQMTNWFYASTKSDIHEKQLILGEMVNNMDVPSSLTEALSLGLNPISDWMMKVYAFSFLRQCLLERGSKSTQEVAQNFEKVMRLVCRYLDDPHHKVAQAALSSLAEIMPAFKKPFEHYLDKTLPHIFSRLNDPKESIKQQCLGILKHANESYPIDSLLPALLRSLDEQKSPKSKLAVLEFANASFVKCTVNSESYSSSSFLKPWLGKLALLFNDKNKKLKEVTVVGFSSIYSHYDPESMLSFLVTLSMEEQKRLRRAMMQLIPTIESDFEEFLQQKRHKQKASFDGFTAKSPLHPASQSAKSPLHPAYRSSKSPAHPRSAKSPLHSAYKYAKSPLHPSYQPAKSPLHQAYQSNSVKTDDCFSSALQCLPNISLEVKGYRTERIEFESPNESYGHKAEMMDKKSCTLRSRNDLRRRIDFSVISDNIVQSASRDSWSAKVFDEPNDNELHINTRKSKVMRMRNDSQDHELYGKAVSQLEEDSETNGHPVPTKNLHQMSSSLLEMLDDPDVPTRELALSLLVEILEKHRKAIENCIELLIVKLLHATKDGALKVVNQAHICLTTVVTQFDPLRCLGAIASQLASQDEKILIISINSLSKLVIRLSEDNLMAHLSTFLPALLDAFENHSPYVRKAAMVCVVDAYLKLGSTLLPYLEGLDTAQLQLVTTYASRLSQARLIAADG

SEQ ID NO: 2339 - DNA, 2706 bp, Sorghum bicolor
atgatcaacatgttcgacctcagcaacggcgtggttgccaccaagatgctcaccgagaaggcacatagagatgtttctccagctggaaaagaccggagtaatactttcaagatggcaattaaccccccagctcagactgaagataaacaaagagatagtcagacaagaaggaattcccctactaaaagatcaaactcgcctactaaaagatctggtgggacacctgttaagatgctcatggagcaggacatgtggaaagaaggtgtgcctgatgacgagccactgaatgttgttgcaagattaatgggtctacatgaccctccagttcagcaatccaatttccctttaggaagacaattggataaggaatatcagtttggtggttttgaagagaactaccggaatctcaagccaaagaaggaaagcagatgccatcaaaaccaaaaggcagggccacgccatcagcacacttggaatggttttggtgaccaaccatcaagaatcaatagcagccagagcaagcaccaaggaaatgagccttgttgtgagaagaggatgtcacttgttcgtgagaagtttgctgaagcgaagcgtctagccacggatgagaagcttcttcattcgaaggagttccaagatgcactgcagtttttaagctcaaatagagagctcttcttggagttccttgatgagccaaatcctctgttatcaagcaaccgttatgagttccaacctgttgcaccacattctgaagtgaagcaaataaccatactgaagccatcagaaccaacaaagagaaaaggcagcatccttatagggagacaactgttttcagatggagatgaaagtgaacgtaacagatacaggcgccatcagagtttagatgtttccccagcaaattcaaatttgtctgagccaacaaaaattgtagtactaaagccaggactctccaattctcatgattccaggattgcgaggtcttcattatcatctgcagaagacagtgaagatgaaagtatgatgacggttgatgaaaccgtgtgctcaagaagattggcaaaggagatcacttggcagatgaggatgcggctaaaagacaagcaagacgaagagagcatgctctcacgtgaataccctgacttttatatcggagatgactccttcggtaaatcagaagttgagattgcaaaagagatgtctggtgaaacaagtgaggaattggagtttggcactccaacttctgggcgttcttgggattttctgagtagaagcggaagtccttactctgcatcatgctctagtcaggcatcccatagaagggaaccatcagtagttagggaaggaaagaagaagattttagagagatggtctatggtatcatccacagtcagtggtgaagaagaaatggaaggtcgcagaagtacaggcacacttggtgacatgctcacaataccgaaagtcaaggaccaggaagaaattggagctgaaacactggggagcccagcacttgagctggaacctgaagagtctttctcatgtttgccaagatctcgatctcttccactttctttgtcctatggagtcgctgagtcaaatggattagcctctggcactcaggaagctgaaaaggaaagaatcaggaagtcatcatcatttagggaaaaagtttctagcctgttttctaaaaataagaaatcaactagggagaaagtagatccatctgcgagcaatagactcaagcatggaggggctgtgactactggtgatgtgaaggaaggctggaaccatcttgccctagagaatcttcagaaacaaagtacttgtctaaacacagatgagaagaacaatgtgcaaggactcgtgactagttcttgtgatactaatgatacagctaatatccctgccaaggatatttcctccatttcaagtcttggcaccccaggaatctttggtgaccctcaggaccaacctagtcctgtatctgtactagatggaccgtttatatgtgataacaggaggctactgtactcatctgaaaatttcataacttcatccccacaagctttgtcgaggtctcccctgatcggatcattttcacggtcactgtcatgggaggatcccccgctggaagtcatgtcaccaaattctttgagactctcaaggcttttctcaaaggctgatgaagatctagattcactgacgtttatccaaaagctggtccactcttgtggcatggatcgagaaagttgcgtattagctgaccctttgaacccaaatttgcttgataagatttcagattatgaagaagatggaattaagtttgggaaaaggcggtcaaaacaaaggcttctttttgacgctgtaaacgaagcactcactgagattgcttcgatggcggaactggctgcatacccctggggtagatcatgctcttgggagcacagggattgcaagaatggttccagtaattcagcggctgaggaaatttggcgggtcattaggaactggtcgatacttgagaagtatcctcccggcgaagctattgaaagaaatctcttgctggagatgatactcaagagggaggtggctgagccagccagcgctgacacaactcggttagagatgtttgatctcaacgccacggtctgcgccatggtcttggaggacctggttgaagagacagctgtagatctgactaactgctag

SEQ ID NO: 2340 - protein, 901 aa, Sorghum bicolor
MINMFDLSNGVVATKMLTEKAHRDVSPAGKDRSNTFKMAINPPAQTEDKQRDSQTRRNSPTKRSNSPTKRSGGTPVKMLMEQDMWKEGVPDDEPLNVVARLMGLHDPPVQQSNFPLGRQLDKEYQFGGFEENYRNLKPKKESRCHQNQKAGPRHQHTWNGFGDQPSRINSSQSKHQGNEPCCEKRMSLVREKFAEAKRLATDEKLLHSKEFQDALQFLSSNRELFLEFLDEPNPLLSSNRYEFQPVAPHSEVKQITILKPSEPTKRKGSILIGRQLFSDGDESERNRYRRHQSLDVSPANSNLSEPTKIVVLKPGLSNSHDSRIARSSLSSAEDSEDESMMTVDETVCSRRLAKEITWQMRMRLKDKQDEESMLSREYPDFYIGDDSFGKSEVEIAKEMSGETSEELEFGTPTSGRSWDFLSRSGSPYSASCSSQASHRREPSVVREGKKKILERWSMVSSTVSGEEEMEGRRSTGTLGDMLTIPKVKDQEEIGAETLGSPALELEPEESFSCLPRSRSLPLSLSYGVAESNGLASGTQEAEKERIRKSSSFREKVSSLFSKNKKSTREKVDPSASNRLKHGGAVTTGDVKEGWNHLALENLQKQSTCLNTDEKNNVQGLVTSSCDTNDTANIPAKDISSISSLGTPGIFGDPQDQPSPVSVLDGPFICDNRRLLYSSENFITSSPQALSRSPLIGSFSRSLSWEDPPLEVMSPNSLRLSRLFSKADEDLDSLTFIQKLVHSCGMDRESCVLADPLNPNLLDKISDYEEDGIKFGKRRSKQRLLFDAVNEALTEIASMAELAAYPWGRSCSWEHRDCKNGSSNSAAEEIWRVIRNWSILEKYPPGEAIERNLLLEMILKREVAEPASADTTRLEMFDLNATVCAMVLEDLVEETAVDLTNC

SEQ ID NO: 2341 - DNA, 1392 bp, Sorghum bicolor
atggagaaggcgatcgatcggcagcgggtcctcctggcgcacctcctcccctccgcctccgcctccgcctcctccgcgcagcctcagcttgcggcgtcggcgtgcgcggccggggacagcgccgcctaccagaggacctcctccttcggggacgatgtcgtcgtcgtcgctgcgtaccggacgcccatatgcaaggccaagcgaggaggcttcaaggacacctacccagaggacctcctcactgttgttctcaaggctgttctggacaacactagaatcaatccagctgacattggtgacattgtggttggtacggtgcttggtcctggttcccagcgtgcaatcgagtgcaggacggctgcgttgtttgctggattccctgaaaccgttcctgttagaactgtcaaccgacaatgttcatctgggcttcaggcagtagccgacgtcgcggctgctataaaggctggttactatgacatagggattggtgctggtttggaatccatgtccataaattccatgggttgggaagggcaagttaacccaagaataactgaactccagaaagcacaggattgtcttctgcccatgggaattacttctgaaaatgtcgcccatcgatatggtgtaaccaggcaagagcaagaccaggctgctgctgagtctcataggagagctgctgcagccacggcctctggaaaattcaaggatgagatcgtccccgtgccaacaaagattgttgatcctaaaactggagaggagaagaaagttgtgatatcagttgatgatggggttaggccagggaccacagcatctggattggcaaaacttaaaccagtttttaaaaaggatgggactacaactgcaggcaattctagtcaagtgagtgatggtgctggagctgttcttctcatgaaaagatctgtggctctgaagaaaggacttcctattcttggtgttttcaggagctttgccgctgttggagtggatccagctgttatgggtgttggtcctgctgtggccattcctgctgcagtgaaatctgctggccttgagattggagacattgatctgtttgaactgaatgaggcctttgcctctcaatttgtttattgctgcaacaagttgggcctggaccgttccaaagtaaatgtaaacggaggcgcgattgcccttggacacccactgggtgcaacaggtgcccggtgtgtggctactcttctaaatgaaatgaagcgccggggcagagactgcagatttggcgttgtcaccatgtgtatcggatctggaatgggggcagcagctgtgttcgagcggggagatgctgtggatggactctccaacgtgagggacacccagacacaaaattttctgtcaagggatgcaaagtag

SEQ ID NO: 2342 - protein, 463 aa, Sorghum bicolor
MEKAIDRQRVLLAHLLPSASASASSAQPQLAASACAAGDSAAYQRTSSFGDDVVVVAAYRTPICKAKRGGFKDTYPEDLLTVVLKAVLDNTRINPADIGDIVVGTVLGPGSQRAIECRTAALFAGFPETVPVRTVNRQCSSGLQAVADVAAAIKAGYYDIGIGAGLESMSINSMGWEGQVNPRITELQKAQDCLLPMGITSENVAHRYGVTRQEQDQAAAESHRRAAAATASGKFKDEIVPVPTKIVDPKTGEEKKVVISVDDGVRPGTTASGLAKLKPVFKKDGTTTAGNSSQVSDGAGAVLLMKRSVALKKGLPILGVFRSFAAVGVDPAVMGVGPAVAIPAAVKSAGLEIGDIDLFELNEAFASQFVYCCNKLGLDRSKVNVNGGAIALGHPLGATGARCVATLLNEMKRRGRDCRFGVVTMCIGSGMGAAAVFERGDAVDGLSNVRDTQTQNFLSRDAK

SEQ ID NO: 2343 - DNA, 1245 bp, Sorghum bicolor
atggtgcaactactagtattaccatcgtcgtccttgatcctcctcctggtgctgctgatgatggcgccgtcgtcatcatgcgcgcaggagcaggagcaggagcagcagcagctgaagcagcagatgcaggagcatcagcagcagcataccatgttgcaggggtggataaaggagcaggttgccaaagatgcagcagcggggtgcacgtgcggcaagaaggacgctgcactctccgcagccgaggctaacagggtggtcctccacgtcgaacccgccgacgatagtagtacctcagatcctgctatctacctcaacagcatcggcgaggccatcgccaagatccccgacggcaacaccaaacggtacatcatcagtatccagcccggcgccgtgtaccgtgagaagttgttcctgggaaagaacaagccgttcgtcaccttggcctccaccagtcccgaggcccctgccatcatcgcctggaacgacaccgccgccaccctcggcaaggacggcaagcccctgggagctgaaggaagcagcagcgtgaccatcgagtcggacttcttcattgccagcggcatcttgttcaggaacgacgcgccggagccggagctgaagagggataatcaagggaagatcggcgaggtgactagcgcaaccatggcgccagcgctgcgagtggcaggatccaaggccaccttctacaaatgcaccgtcgacggcgggcatggcgccctgtatgaccataagggactgcactactataaatcgtgcacaatcaacggcaccttcgacttcatcttcggcaatgcaaggtccttttacgaggactgcaacattgtctccaaatccgccactgattacctcggggacctgccggtggcaaagccgcccttgaccttgtcgcctgcggcggccgacggcggtttctctttcaagacatgcaccatcacagggcaaagttttatcttcctaggaagggcgggctggcctgtcgtctactcctacaccaacataggatacgacctttttcctctaatcgtctctggctctgacgatagccaagcaggggctaaatttcagttcaaccgggagtttgccccgttcctctttatatcatacaagaactacggtgttccgagtggtgcggtggggataaacaaaaccgatgtcgcaccctttcttggaacccaatttgtctccggagacaattggatcctgtccataccacctgcaacagagtag

SEQ ID NO: 2344 - protein, 414 aa, Sorghum bicolor
MVQLLVLPSSSLILLLVLLMMAPSSSCAQEQEQEQQQLKQQMQEHQQQHTMLQGWIKEQVAKDAAAGCTCGKKDAALSAAEANRVVLHVEPADDSSTSDPAIYLNSIGEAIAKIPDGNTKRYIISIQPGAVYREKLFLGKNKPFVTLASTSPEAPAIIAWNDTAATLGKDGKPLGAEGSSSVTIESDFFIASGILFRNDAPEPELKRDNQGKIGEVTSATMAPALRVAGSKATFYKCTVDGGHGALYDHKGLHYYKSCTINGTFDFIFGNARSFYEDCNIVSKSATDYLGDLPVAKPPLTLSPAAADGGFSFKTCTITGQSFIFLGRAGWPVVYSYTNIGYDLFPLIVSGSDDSQAGAKFQFNREFAPFLFISYKNYGVPSGAVGINKTDVAPFLGTQFVSGDNWILSIPPATE

SEQ ID NO: 2345 - DNA, 1143 bp, Sorghum bicolor
atggctgctggcggcagatggtcgctggcggcgttggccttagttgccatggcggtggtttctgctgctgagacctggccgccggctccacacgcagtggtggcaaggaaacggccgggtgattgccggggtgttgcggacgcgcactgccacggcaccatcggagaggctctcaaggacgaagctgcggcgctccgtgtgacgacgggagcgaagaaggggcacgtgccgcggcttgtcatcctcatcacagccggcgagtacaaggagcaggtgcacatcacccgacggaacgtcgtcctgctcggcgagggcagaggcaagactatcatctccggcaatctcagcaacaggacggggacggagatgtacatgacggccacagtcaatgctctggggcacggcttcgtcgcccagaatcttacaatcctcaacagcgccgggcccgatggaaagcaagctgtggcgctgaggtccaactcccatagatcggtggtatatggttgcagcattgaagggtatgaggatacactgtacgcagaaaacggcgcgcaggtatacctggacacggatatctacggtaccgtagatttcgtgtttgggaacgcgagagcggtgttccagcgctgccgcatccgggtgcgggagcccctcagcggcaagcataatgtaataactgcccaaggctgcaacaataagacgtaccaagactcggggttcgtgttccaccgatgcacggtggaagcggacccgaacccgattcgggatccagtcagcggtgaacccatcgggttccagaacctcactggcgtcgaaacctaccttggccggccacaccggaacttttcacatgtggttttcatgcagtcggagctgggcgccatcgtccacaccgatggatgggtggcgtgggacaagaaccacgtcatcaaggagacgacggagagtgtcaaatatttggaatttaacaacactggtgctggagcggacacggccagacgcgtcaactggactggcgtacaggtcatccacgacgcggcccaggtgacaaagtactgcatcgacaacttcgtcgcgggcaaggaatggattccccagcagatcccatacgaccacgagatcccccgcgggatcgtcgtctag

SEQ ID NO: 2346 - protein, 380 aa, Sorghum bicolor
MAAGGRWSLAALALVAMAVVSAAETWPPAPHAVVARKRPGDCRGVADAHCHGTIGEALKDEAAALRVTTGAKKGHVPRLVILITAGEYKEQVHITRRNVVLLGEGRGKTIISGNLSNRTGTEMYMTATVNALGHGFVAQNLTILNSAGPDGKQAVALRSNSHRSVVYGCSIEGYEDTLYAENGAQVYLDTDIYGTVDFVFGNARAVFQRCRIRVREPLSGKHNVITAQGCNNKTYQDSGFVFHRCTVEADPNPIRDPVSGEPIGFQNLTGVETYLGRPHRNFSHVVFMQSELGAIVHTDGWVAWDKNHVIKETTESVKYLEFNNTGAGADTARRVNWTGVQVIHDAAQVTKYCIDNFVAGKEWIPQQIPYDHEIPRGIVV

SEQ ID NO: 2347 - DNA, 861 bp, Sorghum bicolor
atgtcacggctactcccgcctgctaaaaccctcctgctctctcccttcccaatgttctcgccgccagcgcctcatcttcttcttcatctacctcgcatccacatccgcacatccgctgggagaggcggggcgtcggagaacgcggcggcgtccgggacgacggcgagggaccggcggctggtcaaggtgcgggaggagcgccgccgccgcgagtacgaccgggagcacacctaccccggatgggccaaagttctggagaacgcctgcagggatgatgaggagctccgcgccattctcggtgatagcatcggcaacccggagctcatgaagcaaaggatccaagaaagggtgcgcaagaaaggcagggctcaattcaacaaatccaagacaggctccattgttgcttttaaagtcagcttccgagacttcaacccgttgaattcgttcatttggtttgagttctttggagaaccaacggatcgagatgttgacctgcttggcggtgtaattcaggcttggtacgtcatgggaaggctaggagcttataattcttcaaatttgcagctggccaactcaatgatggactatgacccttcatatgattctgaagaagcttccacagtaatgccatcatctttccatgatatcagtgatgtcgagttccaagacaattgggccagggtttgggtggaccttggaacctcagattaccttggtttggatgtattactaaactgcttaacacagttgagctcagagcacttgggtatcaaacaagtggtttttggaggcaagaaaatgggtgactgggaagagggcatgacgagctcagattatggatacaagcacttcaagatatga

SEQ ID NO: 2348 - protein, 286 aa, Sorghum bicolor
MSRLLPPAKTLLLSPFPMFSPPAPHLLLHLPRIHIRTSAGRGGASENAAASGTTARDRRLVKVREERRRREYDREHTYPGWAKVLENACRDDEELRAILGDSIGNPELMKQRIQERVRKKGRAQFNKSKTGSIVAFKVSFRDFNPLNSFIWFEFFGEPTDRDVDLLGGVIQAWYVMGRLGAYNSSNLQLANSMMDYDPSYDSEEASTVMPSSFHDISDVEFQDNWARVWVDLGTSDYLGLDVLLNCLTQLSSEHLGIKQVVFGGKKMGDWEEGMTSSDYGYKHFKI

SEQ ID NO: 2349 - DNA, 837 bp, Sorghum bicolor
atgatgccattgagccaacccgacttctcgccgtcgcagttcaccgcctcccagaatgccgccgccgactccaccacgccttccaagatgcgcggggcgtccagcaccatgccgctcaccgtcaagcaggtcgtcgacgctcagcagtctggcaccggcgagaagggcgctccgttcgtcgtggatggcgtcgagatggctaacattcgacttgtggggatggtcaacggcaaggtggagcggacgaccgatgtcacattcacgctcgatgacggcaccggccgcctcgatttcatcagatgggtgaatgatgcttcagattcttctgaaactgctgctgttcaaaatggtatgtacgtcgcggtcattggaagcctcaagggacttcaagagaggaagcgtgctactgctttctcaatcaggcctataactgatttcaatgaggttacgctgcatttcattcagtgtgttcggatgcatatagagaacacgaaattaaaggctggcagtcctgcacgaaccagttcttctatgggagtgtcagtctcaaatggattcagtgaatcaagcacaccaacatctttgaaatcaaatccagcaccattgaccggtggaggaagtggatctgatactgatttgaacaagcaggtgctgcatttttttagtgaaccagcgaaccttgagagtgagcacggggtgcatgttgatgaagtatacaagcagttcaaacaactgccaaaggataagatcaaggaggctattgctttccatgtggacgccgggcatctttactcaacaattgatgacttccacttcaagtcagctttaaccgattga

SEQ ID NO: 2350 - protein, 278 aa, Sorghum bicolor
MMPLSQPDFSPSQFTASQNAAADSTTPSKMRGASSTMPLTVKQVVDAQQSGTGEKGAPFVVDGVEMANIRLVGMVNGKVERTTDVTFTLDDGTGRLDFIRWVNDASDSSETAAVQNGMYVAVIGSLKGLQERKRATAFSIRPITDFNEVTLHFIQCVRMHIENTKLKAGSPARTSSSMGVSVSNGFSESSTPTSLKSNPAPLTGGGSGSDTDLNKQVLHFFSEPANLESEHGVHVDEVYKQFKQLPKDKIKEAIAFHVDAGHLYSTIDDFHFKSALTD

SEQ ID NO: 2351 - DNA, 675 bp, Sorghum bicolor
atgaactcccagaaccttcagctgcagctgcccgttcaggatctgagtctcagagggagatcattcatcagcaagcccaccaataacaaggtgatgcaccaccaccaccagtgccctgcagcttcgtcgtcttcaccaccagctgctgctagaggaggcctgcaggttgcccatcccagcaccagcaggaggcgtcctcgtgccctcgtcgccgtcagagcggccggcggcagtgacgacgcatcaggaggtgagtcgtcgtcaagcggcggaggggaagaagatgacgatggcggtaggtcgtcgtggtcgtcgggcggcggcggcggcttgtcccgagacgatttggagcgcctggttgggaccgacgacgacgccaagttcaatgggttggatcttgcaaacctcatcaggaagaagtacggcagatcgaatctgctggccatgaatgtgatgtggaagtacagggagcaaagatcgttcccgctgagcgaggaggagtacctactgcggctggacgacgtggccaacacgctcaagtgctggggagccgtggcgcacgtgcgcaacacgctggagaagctcaaggagaggccgcgcatcggcaaggccgtcagcatcttcatcgacatggaccagaccggaggacgctccaacgagtggatctacaagtag

SEQ ID NO: 2352 - protein, 224 aa, Sorghum bicolor
MNSQNLQLQLPVQDLSLRGRSFISKPTNNKVMHHHHQCPAASSSSPPAAARGGLQVAHPSTSRRRPRALVAVRAAGGSDDASGGESSSSGGGEEDDDGGRSSWSSGGGGGLSRDDLERLVGTDDDAKFNGLDLANLIRKKYGRSNLLAMNVMWKYREQRSFPLSEEEYLLRLDDVANTLKCWGAVAHVRNTLEKLKERPRIGKAVSIFIDMDQTGGRSNEWIYK

SEQ ID NO: 2353 - DNA, 741 bp, Sorghum bicolor
atgcggcgaatctgcatctccaagcttgtgtttctcctgctgctctgcgccaggatgctgcttcttccggcgggcgtatcctctgcaaagatccatgggaacccagccaacgaccttgtggccctcatcaacggcaagagggcggcgagcaagctgcctgcgctgcgcaacagcagaggcctcgggtgcatggccctgcagtacatctccgagtgcatggccacgggcgccgcctgcagcagcggcaacacggtggcgtgccagcctcccgaggcccacatcacggaggtctacgctgccaactgcggcgtggagctccccacggtggacgtcatctccggccgcctcgtcggctgccaccgggaccgcgacggaccggaggacgcgctgcaggccgtgctggcatcacccaccggcaacggcaacggcaacagcaccaccaccaatgcgctggcggtgatccgcggcaaggagcacacccaggtgggcgccggcttcgaccgcgcgcaccgccgcgggcccttcttctggtgcctcctcttcagcagcggcagcgccaactccaccttcctgctggaggccggcggcaagggcatcgaccagacccatggctgcttcagcgctccagatcgaccttcgtgcaacgccgcgccgccgcgccacggacagcagctcatgttcactaccattgccgcagcggctggaatgctactcttcctctgtggccttgtcgtcgagtag

SEQ ID NO: 2354 - protein, 246 aa, Sorghum bicolor
MRRICISKLVFLLLLCARMLLLPAGVSSAKIHGNPANDLVALINGKRAASKLPALRNSRGLGCMALQYISECMATGAACSSGNTVACQPPEAHITEVYAANCGVELPTVDVISGRLVGCHRDRDGPEDALQAVLASPTGNGNGNSTTTNALAVIRGKEHTQVGAGFDRAHRRGPFFWCLLFSSGSANSTFLLEAGGKGIDQTHGCFSAPDRPSCNAAPPRHGQQLMFTTIAAAAGMLLFLCGLVVE

SEQ ID NO: 2355 - DNA, 1116 bp, Sorghum bicolor
atgggaggagattggagtgggggccagctaacgacggatcggagttggagttggagtcctgtgcttctcctgctggtgccgctgggcactgccgctgccgctgccgctgccatgggtttctccagcacccccaacctcaagctgcagctgctgctggagcctcgccctcgcatcggaacaacggccacgacgccaaggctggtgcgcctgcgctgcgccctcagctctgagccgcctgtgcctcccatgaccgtttccatcactggagccacaggtttcattggccgcagattggttcacaagcttctatcggtttttcctgcttccacctatcctggactcacaatagccgagcaaggggattgggaggcatgcatcagaggctcctctgctgttgtcaacctggcaggcatgcccataagcacacgatggtcacccgagattaagcaggaaattaaacagagccggatcaatgttacatcaaaggtggtgaagtacatcaaccatgctggaaacactgatactcgaccctcagtgtttgtgagtgcgacagccattggctattatggtaccagcgaaatccatagctttgatgaatcaagtccctcgggcaatgactacctagcagaggtgtgccgagaatgggaggccacggcatgccaagtaaaccaggaggatgttaggcttgtgcttctccggattggggttgttcttggcaaggacggcggtgctctagcaaagatgatccccctttttatgatgtttgccggtggtcctctggggacgggacgccaatggttttcctggatccatctggatgacctggtcaacctcatctacgaatctctaacgaaccctacatacaaaggtgtaatcaatggaactgcacctaatcctgtgcgtttgtcggagctatgcgaacggctggggcgaatcgtcgggcggccctcctggttgcccgtgccggaattcgcgctcaaagcggtgcttggagaaggcgcttctgtggtgttggaaggacaaaaggttcttccggcgaaggcaaagcatctgggcttctcctacagatacccctatgttgaagacgctctcaaggccattgctcgagacttgtag

SEQ ID NO: 2356 - protein, 371 aa, Sorghum bicolor
MGGDWSGGQLTTDRSWSWSPVLLLLVPLGTAAAAAAAMGFSSTPNLKLQLLLEPRPRIGTTATTPRLVRLRCALSSEPPVPPMTVSITGATGFIGRRLVHKLLSVFPASTYPGLTIAEQGDWEACIRGSSAVVNLAGMPISTRWSPEIKQEIKQSRINVTSKVVKYINHAGNTDTRPSVFVSATAIGYYGTSEIHSFDESSPSGNDYLAEVCREWEATACQVNQEDVRLVLLRIGVVLGKDGGALAKMIPLFMMFAGGPLGTGRQWFSWIHLDDLVNLIYESLTNPTYKGVINGTAPNPVRLSELCERLGRIVGRPSWLPVPEFALKAVLGEGASVVLEGQKVLPAKAKHLGFSYRYPYVEDALKAIARDL

SEQ ID NO: 2357 - DNA, 475 bp, Sorghum bicolor
atgctttggaagaagcttgtacagtttgggaaggggttttttgataaaaaagaagaatctacttcaaccgatatgcccttaggcacggccatacataacatagaaatcacacgtggaaggggtgggcaattagctagagcagcaggtgctgtagcgaaactgattgcaaaagagggtaaattggccactttaagattaccatctggggaggtccgtttggtatcccaaaactgcttagcaacagtcggacaagtgggtaatgttggggtgaaccaaaaaagtttgggtagagccggatctaagtgttggttagtaagaggggtagttatgaaccctgtggaccacccccatgggggtggtgaagggaaagcccccattggtagaaaaaaacccacaaccccttggggttatcctgcgcttggaagaagaactaggaaaaggaaaaaatatagtgatagttttattcttcgtcgcc

SEQ ID NO: 2358 - protein, 159 aa, Sorghum bicolor
  misc_feature (159)..(159): Xaa can be any naturally occurring amino acid
MLWKKLVQFGKGFFDKKEESTSTDMPLGTAIHNIEITRGRGGQLARAAGAVAKLIAKEGKLATLRLPSGEVRLVSQNCLATVGQVGNVGVNQKSLGRAGSKCWLVRGVVMNPVDHPHGGGEGKAPIGRKKPTTPWGYPALGRRTRKRKKYSDSFILRRX

SEQ ID NO: 2359 - DNA, 960 bp, Sorghum bicolor
atggataatggtgatatcaagtatgatgaggaatatgtattgaatgcacgaggaattaatctattcacatgccagtggagacctttgaactttgaaccaaaagccgtgatctttctatgccatggatatgccatggaatgcagtatttcaatgagaggcacaggtacaaggttggcgcaggctggatttgtagtgcatggaatggactatgaaggccatggaaagtcttctggacttcaaggatatattagtagttttgatgacattgtggtcgattgctctaagtactttgcaagtgtctgtgagaaagaagagtataagaaacaaaagagattcttacttggagaatccatggggggagcaatcgtgcttatgcttcatagaaaggaacctagcttttgggatggggccattttggttgctccaatgtgcaagatagtagaagatatgaagcctcatcccattgtgatttcaattttaagtaagctcagcaatgtgatccctacgtggagaataattcctaatgaagatatcatagatagggcaattaaaagcgaggagtggcgtgaagaggtaagaaataatcattattgctacaaaggaaagcctagggtaaagactggttatgaaattttcatggcaagcttggatattgaaagcaatcttgataagtgtccactgattaaaaataaacgctttttcataattgtatatattgggaaaattcaaggtttgatggttactctaccattcatcatagtccatggcggtgacgatgctgtaactgaccccacagtaagtgaggctctatatacattagcgaagagcaaggacaagacattgaagttgtaccctgggatgtgccatgctttgacttcaggagaacccaaggagaacattgatattgtgtttgcagacatcatcaaatggttgaatgagagggtaccgtcaatttcctag

SEQ ID NO: 2360 - protein, 319 aa, Sorghum bicolor
MDNGDIKYDEEYVLNARGINLFTCQWRPLNFEPKAVIFLCHGYAMECSISMRGTGTRLAQAGFVVHGMDYEGHGKSSGLQGYISSFDDIVVDCSKYFASVCEKEEYKKQKRFLLGESMGGAIVLMLHRKEPSFWDGAILVAPMCKIVEDMKPHPIVISILSKLSNVIPTWRIIPNEDIIDRAIKSEEWREEVRNNHYCYKGKPRVKTGYEIFMASLDIESNLDKCPLIKNKRFFIIVYIGKIQGLMVTLPFIIVHGGDDAVTDPTVSEALYTLAKSKDKTLKLYPGMCHALTSGEPKENIDIVFADIIKWLNERVPSIS

SEQ ID NO: 2361 - DNA, 1170 bp, Sorghum bicolor
atggcggcgacggatcatgaggttgaggaggcggtggcgaaggcgagagaggacgacaagagccggcggcaggtggacggcttcgacgctgggaaggcgccgccgttccgcattggcgacgtgcgggcggcggtgccggagcactgctggcgcaagagcccctggcggtcgctgtggtacgtggtgcgggacgtggcggtggtggtggcgctgggagcggcggcggcggccatggatagctgggcggtgtggccgctctactgggcggtgcaggggaccatgttctgggcgttcttcgtcttgggacacgactgtggtcatgggagcttctcggacaacgcgacgcttaacagcgtggttggtcatctcctccactccttcatcctcatcccctaccatggatggaggatcagccacagaacacatcatcagaaccacggccacgtcgacagggacgagtcatggcacccgctgacggagcggcggtaccggcgattgcctcctcgcgcaaagaagctaagattcacgccccccttcccgctgctcttattccccctctacctgttctacaggagccctggcaagaggggctctcactttcttcccagcagcccactgttcagccccaaggacaagggcgacgtcatactctcgaccacctgctggtgcatcatgctcgccttcctcctcgccatgtcgtgcgcgttcggcccactccaggtgctcaagatgtacggcgttccatacctggtgtctgtgatgtggcttgacttggtgacttacctgcaccaccatgggcaccaggagcgcctcccctggtaccgcggcgaggaatggagctacctccgcggcgggctgacgacggtggacagagactacggctggatcaacagcatccaccacgacatcggcacccatgtcatccaccacctcttcccgcagatcccgcactaccatctcgtcgaagctaccaaggcagccaagccggtgctggggcgatactaccgggagccacacaagtcagggccgctgccacttcacctccttggcgtgctcctcaggagcctcagagtcgaccacttcgtcagcgaccatggcgatgttgtctactaccaaactgaccatcacctcaacgacactactactgatgatgctcataagcaaaaatga

SEQ ID NO: 2362 - protein, 389 aa, Sorghum bicolor
MAATDHEVEEAVAKAREDDKSRRQVDGFDAGKAPPFRIGDVRAAVPEHCWRKSPWRSLWYVVRDVAVVVALGAAAAAMDSWAVWPLYWAVQGTMFWAFFVLGHDCGHGSFSDNATLNSVVGHLLHSFILIPYHGWRISHRTHHQNHGHVDRDESWHPLTERRYRRLPPRAKKLRFTPPFPLLLFPLYLFYRSPGKRGSHFLPSSPLFSPKDKGDVILSTTCWCIMLAFLLAMSCAFGPLQVLKMYGVPYLVSVMWLDLVTYLHHHGHQERLPWYRGEEWSYLRGGLTTVDRDYGWINSIHHDIGTHVIHHLFPQIPHYHLVEATKAAKPVLGRYYREPHKSGPLPLHLLGVLLRSLRVDHFVSDHGDVVYYQTDHHLNDTTTDDAHKQK

SEQ ID NO: 2363 - DNA, 1092 bp, Sorghum bicolor
atggcgggaggtagcaaaggctgcgatgagagctctgcagatcatcagctgctgctatccagcggccaggccggggacgacggggaggatgatgctggtggcgccgacgacgtgcctcccgccggtcgtcatgacgggagctcaagcaatagcagcacggtggagctggatgaagccggcggggacagcggtaggaaggtcgccggcgcctcgccgtcctcggtgcgcccctacgtccgctccaagaacccccgcctccgctggacgccggagctccacctctgcttcctccgcgccgtcgacaggctcggcggccaagaccgtgcaactccaaagctcgttcttcaattgatggacgtgaaagggctgagcataggccatgtcaagagccatctccaaatgtataggagcaagaagatcgacgactcggaccagggtgctactggttcatggagagatcttcatcatcagttgcaggatgggggacaagcgtacaacctcggtcatctctccttccatcacggccagactggtgctagtaccatattgtcagcaaggtttggtgcatggccccattggagcaattttcatgatccatcatatttgcttcacagtcaccatcttcttggatcaaaacactactactcatcaacagctgaagccgatgtattccttagaaaccgagctcagtatactgctagagctactagcaacactccagcgtctactactcttcagaggtgtttaaatgatcaattcatgaatcatcatcaacgacgactgtcgcaaaatgaggataatatccaccatgatccccttgatcttgaactcgcattggatattggcccaagccaagacaagagaataaagagatcatcaggttgtagctggagaagacatcaagaagaggagaatgtcgggaatcaagaagtcgagagtgctactgatgatactcggctatctctttctttgttcccatctcctccttatgtgaggaccagtagtggtggtcatcataaagtcctaggtctcaatatggaaaaaggcacagcgcatccgacaaggacaagtactcttgatctcaccatatga

SEQ ID NO: 2364 - protein, 363 aa, Sorghum bicolor
MAGGSKGCDESSADHQLLLSSGQAGDDGEDDAGGADDVPPAGRHDGSSSNSSTVELDEAGGDSGRKVAGASPSSVRPYVRSKNPRLRWTPELHLCFLRAVDRLGGQDRATPKLVLQLMDVKGLSIGHVKSHLQMYRSKKIDDSDQGATGSWRDLHHQLQDGGQAYNLGHLSFHHGQTGASTILSARFGAWPHWSNFHDPSYLLHSHHLLGSKHYYSSTAEADVFLRNRAQYTARATSNTPASTTLQRCLNDQFMNHHQRRLSQNEDNIHHDPLDLELALDIGPSQDKRIKRSSGCSWRRHQEEENVGNQEVESATDDTRLSLSLFPSPPYVRTSSGGHHKVLGLNMEKGTAHPTRTSTLDLTI

SEQ ID NO: 2365 - DNA, 1464 bp, Sorghum bicolor
atggtgacctcgccgctggtgacggtgagggcggctgccttcgctctcaccctgaccccgtcatcacggctcagccgcgcctcctttcgcgcctgcctcgcacagcgtcgccgccgccgttggccccctcgatgtagcgggaagcaagctgccgtggtcgaggaggaaacaccatctccgcaggaggccaagaacggcgagggggaacaggggcgcgggccgcagggatggtttgctctggatacgatcgggctggacattctcagcatcgccctgcccgccgccctcgcgctcgccgccgaccccatcgcggcgctcgtcgacaccgccttcgtcggtcacataggttctgccgaacttgctgctgttggtgtatcaatttcagtgttcaatttggtgtcaaagctgtttaatgtgcccttgcttaacgtgaccacatcctttgttgctgagcagcaggcagtggatgatgattctgctgggtcaagagaaggatacgactttccaaggtctcctgaggagttgacccagaaaaggaagtttcttccagcagtatcaacatcactggctttagctgctggtattgggctgatggaaactgtggcactgaattttggatcaggaacactaatggacatgatcggcatacctattgattctccaatgcgaataccagctgagcaatttcttacatttagggcatatggtgctccaccgattgtgatagcacttgctgcacagggtgcatttcgtgggctcatggatacgaaaacacctttatatgctgtgggtgttggcaacctcataaacgtcatacttgacgccatacttgtttttccacttggtttaggagttagaggtgctgccttggcaacagtgacctcagagactattgcagtactcctgaccatgacactgtcgacatcgctggctgcaagacaagggcctgttccaatggccggccatcagttgtgcttgcaagtgtggctgacaatttctctgctcaatgatgcgctagctctggctgggcaggctctacttgcgagtgaatatgcaaaagggaattacaagcaggctcgtttggttttatacagagttctgcagattggaggtgtaactggaattgcactggctgtggttctgttctttgggtttgggtctttctctgtgctgttcacaaatgatcgggcagttttagacattgccaaatctggagtctggtttgtcactgtttctcagccaataaatgctattgcattcgtgatcgacgggctgtactatggcgtgtctgacttcgcctatgctgcatactctatgttctttgttggggctgtttcatcagcattcctacttgctgctgctcctaagcttggtcttggtggtgtttggtctggtctagttctttttatgagcttgagagcagcggctggattttggagcattttgctgttgtgtgcaggttag

SEQ ID NO: 2366 - protein, 487 aa, Sorghum bicolor
MVTSPLVTVRAAAFALTLTPSSRLSRASFRACLAQRRRRRWPPRCSGKQAAVVEEETPSPQEAKNGEGEQGRGPQGWFALDTIGLDILSIALPAALALAADPIAALVDTAFVGHIGSAELAAVGVSISVFNLVSKLFNVPLLNVTTSFVAEQQAVDDDSAGSREGYDFPRSPEELTQKRKFLPAVSTSLALAAGIGLMETVALNFGSGTLMDMIGIPIDSPMRIPAEQFLTFRAYGAPPIVIALAAQGAFRGLMDTKTPLYAVGVGNLINVILDAILVFPLGLGVRGAALATVTSETIAVLLTMTLSTSLAARQGPVPMAGHQLCLQVWLTISLLNDALALAGQALLASEYAKGNYKQARLVLYRVLQIGGVTGIALAVVLFFGFGSFSVLFTNDRAVLDIAKSGVWFVTVSQPINAIAFVIDGLYYGVSDFAYAAYSMFFVGAVSSAFLLAAAPKLGLGGVWSGLVLFMSLRAAAGFWSILLLCAG

SEQ ID NO: 2367 - DNA, 2508 bp, Sorghum bicolor
atggtggacatcagcgagtgctcgccggtgccggagtccgtaccggcgcacccggacccggcgtccgtgtccccggacgcgtggcggcgcttcgagaccgccgcgctcgccgtggtcaacaagatccagcccaccgccgcctccgagcaactccgcgccgccgtcatcgagtacgtccagcgcctcttctggttccaagctcggtatcaggtctttccatttggatctgttccattgaaaacatatcttcctgatggagatattgacttgacattattcggccctgcgatttctgatgagaatctagcaaatgaagtatgtgctattctaaaatcggaagagcgaaggaaagattctgaatttgaagtcaaggatgtccattatgtccctgctgaggtcaagctggttaaatgtttggtacaaaacattgtcgtagacatctcagttaatcagattggtgggctgtgcacactatgttttcttgagaaggtcgatcaaaactttggtaagaatcacctgtttaagagaagcataatgcttgtcaaagactggtgctattacgaaagccgtattcttggtgcccatcatggtctaatatcaacatatgccttggagactttagttttatacattttccatatcttccacaagtctttggatggtccattggctgtcctctatagatttcttgactattatagtaaattcgattgggacaataaggggatcagcttgtttggacctgtttccttatcttcactacctgagctagttactgacccaccagatacccaagatgatgattttcttcaacgagaggagtttctaaaagaatgcacagagtcttttagtgttctccctagaaactccgagacaaatcctagagtattctcacgaagatttcttaatatagttgatccactaaagcagagtaataaccttggacgcagtgtcagtaaaggaaacttttaccggatacgcagcgcatttgattttggtgctcgtaagcttggcaagattcttcaagtgccttcttgtctcactgtcagtgaagtcaatcagtttttcaggaacactctaaagagaaaccgtactggtttaaggccagatgtttgggtgagctcttctgatcttgttacaaatgatcctgtatcatcagtcttagatgtggaaagagtcaacaaggttacgcccagcaattcctgcgatgttctgtctaatcagctcagtaacatcaacatttcagattccaacaatcatggcccagtaaagcaaaaagaatgtaactctatggctgaccacaaggagataaaatctgtttcttggggtttgctagatagtgatgccacgagtcacacagctactgattcagtaagtgtgaggggtggtgacgacttctctgaagcttcaccaacacctagtgaaacctggaccttgcaatcagaagccggcaagaaggttgatgttagaaatgacacaatcccatcataccatggggtttcagcaaagcagtttacaggcagatctcaccactatattgacggtgctaagcataatgcttactcctattctactggcttaattgatggtctaggcacatctaattccgttttaacatcagatacacaacctggaggtaccatcaatgacacagtgccaaatctcactggagatttcgatacaaatttgcataatcttctgtatgcacggggtttccatcaggacaatcctacgactcagttatactatccgatgcctatgccaccacccctgcaatatcagaacatgcacccatcaaatggccatggcagaaaaaatccgtatggatatgctggtaggaatggagttgtccctggtcctgtttatccacctggctattttgtgtataggccattgtatcaagcagatgatcatatggctatgagggctcgtggaacaggcacctactttcctgacccaaacttgcgcaaggaaagaccacctactggacgtggggagagaggaaggaatcattcccatcagaataattatcaaaagtttcaccaccatgcccgaccggatatgcctgtagatatgataccttttgatgaattgaggcatgagtcaccactgcagatatacgctcctagtgcaaatgatcatggaatcccatctccaatgaatataccaataccatcaccatcttcccagtctccaagggatcctttgaacgtaccaatgcattctccatcttcccaggttagaaaggataattttcatggcaatggttttatgctctcgcaagacagtaaacttgagtttgggaccttgggggcgttgccaagggaagttgcctccaaagaccatgctagcagaccaagttctgcctccaacaatcaaggttctgggcctgtgactgtgagccccatgtctgtggtgaaaaacactggaatgggttccaacggaatgaggaatgttcaagcataccgtctcaaggacagtggtgacttcccgccactatccagttga

SEQ ID NO: 2368 - protein, 835 aa, Sorghum bicolor
MVDISECSPVPESVPAHPDPASVSPDAWRRFETAALAVVNKIQPTAASEQLRAAVIEYVQRLFWFQARYQVFPFGSVPLKTYLPDGDIDLTLFGPAISDENLANEVCAILKSEERRKDSEFEVKDVHYVPAEVKLVKCLVQNIVVDISVNQIGGLCTLCFLEKVDQNFGKNHLFKRSIMLVKDWCYYESRILGAHHGLISTYALETLVLYIFHIFHKSLDGPLAVLYRFLDYYSKFDWDNKGISLFGPVSLSSLPELVTDPPDTQDDDFLQREEFLKECTESFSVLPRNSETNPRVFSRRFLNIVDPLKQSNNLGRSVSKGNFYRIRSAFDFGARKLGKILQVPSCLTVSEVNQFFRNTLKRNRTGLRPDVWVSSSDLVTNDPVSSVLDVERVNKVTPSNSCDVLSNQLSNINISDSNNHGPVKQKECNSMADHKEIKSVSWGLLDSDATSHTATDSVSVRGGDDFSEASPTPSETWTLQSEAGKKVDVRNDTIPSYHGVSAKQFTGRSHHYIDGAKHNAYSYSTGLIDGLGTSNSVLTSDTQPGGTINDTVPNLTGDFDTNLHNLLYARGFHQDNPTTQLYYPMPMPPPLQYQNMHPSNGHGRKNPYGYAGRNGVVPGPVYPPGYFVYRPLYQADDHMAMRARGTGTYFPDPNLRKERPPTGRGERGRNHSHQNNYQKFHHHARPDMPVDMIPFDELRHESPLQIYAPSANDHGIPSPMNIPIPSPSSQSPRDPLNVPMHSPSSQVRKDNFHGNGFMLSQDSKLEFGTLGALPREVASKDHASRPSSASNNQGSGPVTVSPMSVVKNTGMGSNGMRNVQAYRLKDSGDFPPLSS

SEQ ID NO: 2369 - DNA, 1086 bp, Sorghum bicolor
atggcttgcgtgggggagcgtgaggccgcggtgagggaggtggcgcaggtgtacgagctcatcaagctccagcagcctctcctcctcctccactcgccgcagcacccgccgccgccgtcgacggccaagctggcgcagagcctcctcgccaaggcgctgcgagccctcaacgtcgccctctccgtcatgaagcagcagcagcctgttgtcgtcgtcaaagctgagcctcatcagctctcgccgcccagcccggcgtctgccaactcccaagtcgccatagtacccagcacggcaacaagaggcgccaaaagaagaagatcatccgtagcaataatggaagggaagaagaagacctcgtcgtcgtcctgggcgacggtaaccgccgtgccctacgacgacggctacgagtggaggaagtacggcgagaagaagatcaacgggacgctcttcaccaggagctacttccggtgcacctacaaggacgacgccggctgcctcgccaccaagcacgtccagcagagggacgacaacagcgacctgcccatgttccatgtcacctacaacaacgaccacacctgcaacagagccaaagctgcaggcatagccaacaacggcagcagcagcaacaacctcgctgcattgctagcaggctgctgcagcaatggcagtggcagcggcagcggcaagggactgacgacgatgacgacgaccaatgctcggccaaccgagcatgctgctgctgctgctgccatgaacatgatgaagcaagaaccaccgctgctgttgcctgctctgatcgacctccagcagccttctgcctgttttcctaatgaacaaattccacagtgccagaaagagccgctgtttcctacaagtatggagcagcagttcgtctgtggtgctttaagagaccatgactctcctgtcgatggcgacatcccgtcggccactggttcgtgcaactccggcgagaccagctggtgggatgggtattctggggacatggcagcgcagatggcagctgaagacgaccctctccacgacctcgaccggttcctccagtgcgatagcttcatggactactag

SEQ ID NO: 2370 - protein, 361 aa, Sorghum bicolor
MACVGEREAAVREVAQVYELIKLQQPLLLLHSPQHPPPPSTAKLAQSLLAKALRALNVALSVMKQQQPVVVVKAEPHQLSPPSPASANSQVAIVPSTATRGAKRRRSSVAIMEGKKKTSSSSWATVTAVPYDDGYEWRKYGEKKINGTLFTRSYFRCTYKDDAGCLATKHVQQRDDNSDLPMFHVTYNNDHTCNRAKAAGIANNGSSSNNLAALLAGCCSNGSGSGSGKGLTTMTTTNARPTEHAAAAAAMNMMKQEPPLLLPALIDLQQPSACFPNEQIPQCQKEPLFPTSMEQQFVCGALRDHDSPVDGDIPSATGSCNSGETSWWDGYSGDMAAQMAAEDDPLHDLDRFLQCDSFMDY

SEQ ID NO: 2371 - DNA, 861 bp, Sorghum bicolor
atgcacccggtgccaccgcgatcgtcgacgtcgagccccagcagcatcgccgccagcgccacgcgggtacacccatccgacgccgccgacgccgacgccgtcgccgtcgctcatcatcgtcacgacggcagcagcggcggccgccgtggccgtgccaccaacgccaccaccagccgccgcggcgccgtggggcagggtcagccggcggtgtacacggtgtggaagcggtcgagcatgggcttccagggcacggacggcttctccgtctacgacgccgccggcagtctggcgttccgcgtcgacaactactcccgccgccggaagctcttcgccggcgagctcctcctcatggacggccgcggcgcgccgctcctggctctccgcccgcagattctcagcatgcacgaccagtggaactgctacagagcagcttcatcatcagaagaatccgccggcgacaagacgagcttccccagacggcaacatctcttctcaatgagaaaatgctcacttgtcaaaggcactgacgaagcggaagtgtacatggcatcaggatcagcagcagcagctcacggcgtccagcaggtcccgagctttacggtgcagggcagcttctggaggagaagctgcaagatccggaaaggcggcgacggcgaggaggtggcgaggatcaccagaaagaaggtcggcgcagcggcgtcgcagccggtcacgctcggcgaagacgtgttcagcctcaccgtcatgccggacgctgattgcgccatggtcatggctttcgttgttgtcatggaccgcatctgccagaggccgtacaagcccttgatgtgttcttcttcgtcagggtcctgtgcttcgtag

SEQ ID NO: 2372 - protein, 286 aa, Sorghum bicolor
MHPVPPRSSTSSPSSIAASATRVHPSDAADADAVAVAHHRHDGSSGGRRGRATNATTSRRGAVGQGQPAVYTVWKRSSMGFQGTDGFSVYDAAGSLAFRVDNYSRRRKLFAGELLLMDGRGAPLLALRPQILSMHDQWNCYRAASSSEESAGDKTSFPRRQHLFSMRKCSLVKGTDEAEVYMASGSAAAAHGVQQVPSFTVQGSFWRRSCKIRKGGDGEEVARITRKKVGAAASQPVTLGEDVFSLTVMPDADCAMVMAFVVVMDRICQRPYKPLMCSSSSGSCAS

SEQ ID NO: 2373 - DNA, 1308 bp, Sorghum bicolor
atgggcatcgtcgtgagagcgtgcgcgcctccagctcccgcagcggcggctccctccggctccagggaggctgcccaagcccagcggaggagcaggcagtcgaggaccgcccgcgtgctcgtgctaggcggcaccggacgcgtcgggggatccacggccaccgcgatatccaagctccgccccgacctcggcatcctcgtcggaggcaggaaccgggagaaaggcgagtccgttgcagctaagcttgggagccagtctgagttcgtccaggtcgacacccgcgacgcaggcatgctggaggaagcgctgcagggtgtggatttggttgtccatactgctggccctttccagagggcggaggagtgcaccgtgttgcaggcggcgatatctactaagacaccatatattgatgtctgcgatgacacggactattcttggagagcaaaaggcttccatgagcaagcaaaagctgctggtgttccagctattactactgctggcatatatccaggagttagcaatgtgatggctgctgagcttgtgcatgctgccagaagtgaaaatggcgaacctgaaagactaagattcttctactatactgcaggtactggtggtgctggtccaacaatattggcaacaagttttctgcttcttggggaggatgtaattgcatataacaagggtacttccagcttatgcactagtgctattgcacctatggagttccacactccctatagtggagctctgaacattgatttcggaaagggggtcagaaagaaaaatgtctacttattgaatttgcctgaagtgaagagtgcttttaagatattaggtgtgccaactgttagtgctcgatttggtactgctcctttcttctggaattggggaatgcaggctttcgcaaactttttacctgttgagtttttgagggatagaaataaggttcagaagttggttcagtctgttgatcctttggttcgagccgttgatggtattgcaggagagcgtgtctctatgagagtagacttggactgttcaaatggccggaatactattggattatttactcataaaaagctatctgtgtcggtgggctatgcaacagctgcatttgctttagccgttcttgagggcaacacacaaccaggagtttggtttccagaagagccagagggaataccgatggaagcaaggaagctgcttcttgagcgtgcatctcaaggaacaagtaccttcgtgatgaacaagccttcctggatggtagaaactgacccaaaggaagtcggtctaggaatttatgtttga

SEQ ID NO: 2374 - protein, 435 aa, Sorghum bicolor
MGIVVRACAPPAPAAAAPSGSREAAQAQRRSRQSRTARVLVLGGTGRVGGSTATAISKLRPDLGILVGGRNREKGESVAAKLGSQSEFVQVDTRDAGMLEEALQGVDLVVHTAGPFQRAEECTVLQAAISTKTPYIDVCDDTDYSWRAKGFHEQAKAAGVPAITTAGIYPGVSNVMAAELVHAARSENGEPERLRFFYYTAGTGGAGPTILATSFLLLGEDVIAYNKGTSSLCTSAIAPMEFHTPYSGALNIDFGKGVRKKNVYLLNLPEVKSAFKILGVPTVSARFGTAPFFWNWGMQAFANFLPVEFLRDRNKVQKLVQSVDPLVRAVDGIAGERVSMRVDLDCSNGRNTIGLFTHKKLSVSVGYATAAFALAVLEGNTQPGVWFPEEPEGIPMEARKLLLERASQGTSTFVMNKPSWMVETDPKEVGLGIYV

SEQ ID NO: 2375 - DNA, 510 bp, Sorghum bicolor
atggcgcccaccgtgatggcctcgtccgccaccgccgtcgctccgttccagggtctcaagtccaccgccaccctccccgtcgcccgccgctccaccaccagcctcgccaaagtcagcaacggcggcaggatccggtgcatgcaggtgtggccggcgtacgggaacaagaagttcgagacgctgtcgtacctgccgccgctgacggaggagcagctgctgaagcaggtggactacctgctgcgcaacaactgggtgccctgcctcgagttcagcaaggaaggcttcgtgtaccgcgagaactccacctccccgtgctactacgacggccgctactggaccatgtggaagctgcccatgttcggctgcaccgacgcgtcgcaggtctacaaggagctgcaggaggccatcgcctcctacccggacgcctacgtccggatcctcggcttcgacaacatcaagcagacgcagtgcgtcagcttcatcgcctacaagcccgcgggcagcgagtga

SEQ ID NO: 2376 - protein, 169 aa, Sorghum bicolor
MAPTVMASSATAVAPFQGLKSTATLPVARRSTTSLAKVSNGGRIRCMQVWPAYGNKKFETLSYLPPLTEEQLLKQVDYLLRNNWVPCLEFSKEGFVYRENSTSPCYYDGRYWTMWKLPMFGCTDASQVYKELQEAIASYPDAYVRILGFDNIKQTQCVSFIAYKPAGSE

SEQ ID NO: 2377 - DNA, 2613 bp, Sorghum bicolor
atggcggtcggggacgcgctgcgacggctgtgcgaggagatcggctggtcctacgccgtcttctggaaggccatcggcgccgccgaccccgtgcatttggttcgggaggacggctactgtggccacacgtcatgccctgtcggatctgagccttctgaatctctgcccagcgacgccgccgggtgctctgctcctgctgctgacaccatctgctcgcttgttaacaacgttatggcgtcgcaggttcatgtcgtcggacaagggaccgtaggccgtgccgcgttcagtggcaatcaccaatggatcgtccacggtactgccaatggtcacgggctctcctccgaggttgctgctgagatgaacaatcagttaagagttggcattcagactattgcgatcattcctgtcctgccacggggtgtcctacaattaggatctactggtttggttatggaaaacacaaattttgtgatgtttgcaaagaagttgtgttctcagctaaacaaccgttcaagcatggctgtatctgcttcagctaagaacggttcaagtcagcatggtcagtcgcgtcctgatactgcaactgtgtcaactagcacaccgccacatgcattgctgaatgcatctttgcttaaggttgtgcaacagaatggtcaccctgttagagagcacactgtctatgctaagcctgatcttcggtttctacaacaagcatccttctgcgagagccaatttggaagaaatttatggagtgttggtatgaactcaagtttgacctccccaagcttgacatcagttaaaaatcattcactcttgatgaacaacattgggcagttacagttgaataataatgcacattcatcagcagatttagcaatggcaagagatataatattaaaatcccttgtgcgccaggactcttctgtctgtgaaaatacaaacatgaatatgcaccatggaagatatgtggtatccaatgatataaatggtcctgggaattttgattttctccctgtaggtgccagagcaagcagagccaacttatctaccagtgtatcgagtcaaatattggatcacgcatcaggaacattgcagcaaaaacagtctctagttccgttcaaggttccccaatcttctgaattggctaagaaaatggagagccctgaaagtaggccatttcaaactccttcagttcgaacttctgaatctgatggtcaggtttctaacagtttcaacatggatcaagagaatctattgagtaggtcaaacaatgtccgacaagaccaaaagattaatagatttagtgatccaagtgctaatgtcagcacacagagaatgaagaacagggatggatgtgaggcaggaatgcctgttgagagagcttcctcgttgctcgtggagcctgctgcagataatgacttgtttgatatgtttggttctgaatttcatcagttctcccacaatgttggtgctgatttggtcacctggagcggtacagagtctcagaattcagatagagatgtccctgaatcatcaatatatctcaatagctcaccccttttcagttcactagacaatgagcttcactattctggtatcttatcactaactgatactgatcagctattggatgctgtcatctcaaatgtcaatccaagtggtaaacagtgtactgatgatagtgcttcttgcaagactgcattgacggatgttcctagcacatctcatcttggttcagtagacttgaagagatgtgagtcctccggcatgccttccatgctaattaagcacgaattggcacagtttgttaaacagccatgtctctttgataaatctgaggaggcctgtctttcccaaaataatggaatgcacaaatctcagatacgtctttggattgagagcggtcagaacatgaaatgtgaaagtgcttcagcttctaatagcaaaggtcttgatacaccaagcaaggcaaatcgcaagagatctcgacaaggagaaagtcctaagccacggcctaaggaccggcaactgatacaggaccgtattaaagagctacgtgagcttgtaccgaatggggcaaagtgtagcattgatggtttgttggagaagacagttaagcacatgcttttcttacaaagtgtgacgaagaatgcagacaagctcaaggactctactgagtctaagatacttggtagtgaaaatggccccctttggaaagactactttgaaggtggggcaacctgggcttttgatgtcggctctcagtctatgacatgtccaatcattgttgaggatcttgaccgacctcgtcagatgcttgtggagatgctttgcgaagatagaggaatcttcttggagatagctgatttcatcaaaggacttggattgactatcttgaggggtgtgatggaaatgcgcaaaagtaaaatctgggcaagatttactgttgaggcgaaccgggacgtaaccagaatggaaatctttctatcacttgtgcgcttgttagagccaaattgtgacggcagtggagctgcagagaacgctaacaacatgaacatgcctcttggtttggtgcgccaacctgtcatcccagcaacaggccgcatccaatga

SEQ ID NO: 2378 - protein, 870 aa, Sorghum bicolor
MAVGDALRRLCEEIGWSYAVFWKAIGAADPVHLVREDGYCGHTSCPVGSEPSESLPSDAAGCSAPAADTICSLVNNVMASQVHVVGQGTVGRAAFSGNHQWIVHGTANGHGLSSEVAAEMNNQLRVGIQTIAIIPVLPRGVLQLGSTGLVMENTNFVMFAKKLCSQLNNRSSMAVSASAKNGSSQHGQSRPDTATVSTSTPPHALLNASLLKVVQQNGHPVREHTVYAKPDLRFLQQASFCESQFGRNLWSVGMNSSLTSPSLTSVKNHSLLMNNIGQLQLNNNAHSSADLAMARDIILKSLVRQDSSVCENTNMNMHHGRYVVSNDINGPGNFDFLPVGARASRANLSTSVSSQILDHASGTLQQKQSLVPFKVPQSSELAKKMESPESRPFQTPSVRTSESDGQVSNSFNMDQENLLSRSNNVRQDQKINRFSDPSANVSTQRMKNRDGCEAGMPVERASSLLVEPAADNDLFDMFGSEFHQFSHNVGADLVTWSGTESQNSDRDVPESSIYLNSSPLFSSLDNELHYSGILSLTDTDQLLDAVISNVNPSGKQCTDDSASCKTALTDVPSTSHLGSVDLKRCESSGMPSMLIKHELAQFVKQPCLFDKSEEACLSQNNGMHKSQIRLWIESGQNMKCESASASNSKGLDTPSKANRKRSRQGESPKPRPKDRQLIQDRIKELRELVPNGAKCSIDGLLEKTVKHMLFLQSVTKNADKLKDSTESKILGSENGPLWKDYFEGGATWAFDVGSQSMTCPIIVEDLDRPRQMLVEMLCEDRGIFLEIADFIKGLGLTILRGVMEMRKSKIWARFTVEANRDVTRMEIFLSLVRLLEPNCDGSGAAENANNMNMPLGLVRQPVIPATGRIQ

SEQ ID NO: 2379 - DNA, 1833 bp, Sorghum bicolor
atggctgccgccgccgccgccgctgctggcggcgtgtcggaaccgccgatggtggagcaagtgatcaccgaattcttcgccaagagcctgcacatcatcctggagtcacgctcgccctatgattcgtcgcggaacttcactcggccctccccgccatcgtcgccgctggctggaagccagccgcgggaccggtggttcaaccttgctctccgggactgccctgctgcgctcgagaatttcgacctgtggaggcagagcaacctcgagcttctggtcattgacattgtccttgtgcaacgtgacaataccagaaccgccagtgtcggggccagcaggatcattgagaggtgggtaataaagtatgaaactagcaggtctggcaatgctatcaagaacagtggcaagaaagctagaagcagctcttctcaggatcatagcttgtacaggagggcatacagcggctccacagtgttgttccggtcattgtacctggttgtcaggctcttgccagcataccatctcttccaggggctcaattcgtctggaaggatctgtccgctgagcctctcgcacaagatttcatcatttgttgagccattcacccgcgctgaggatgcagagatgaaacactatgcatttgctccgattgaaactctgtttggttccttaagcttgtctgtttcgtatgtgccagtgctggagttggctgcagtaccagagcaacccacaccggtgccacctgagcttataaaggattatgttggaagccccacaacagattttcttaggaagctcgattccctgccttcagatggcattgcacctgcatgttttccagtgaccaggcggcacagttggagcaccgggcatggagttagaacatcggtatcgccatttccgatgagttcagaaccccatggacgcctagagccacgtatgccgaccgataattctccgacagcatactcacatccacataacacatcatcgtctgggaagaagagaaatacagtaaatgaagagtgctatccatcaccacctctgtcgccatcaccatcccattcgccttctagctacccaagaaatcctttcttccgatatgagagtgctcctttaagtattcccacagcgatggctggtggaggtggtagcaggctgcctccttctccacgtaggaaggataagcaacaatgctcatctcaaaatgagaatctgacacattctccaaatgataaatcaatagtatcaaaggatttggtcaagcttagtgagtttcagaatgagaagtctttgcaaaaggttttatcttttggcaatgatgatttggtgtattttcgtgggctaaagttgactcgtacctccagtaaacttttcatcatggatgaactggatgaacgggagttagtttttgcatgggaagataaagacaccatcattgatcagcttagaaggatcgacatatctgacagggatgaccaaggaccatctcaggaaggaggctcattaacgaggtctccagatgcagcaattggtattcttatgcgcatcctacagaatgcccctggcctcagggaaaggctactactgccaggccctagtgccccggttcctcaagaaccttcactccagagggtagtgaccgaggaacatggcagcagtgcatcaagctctacaggggtgccttccgttcttctgaggtcaaggacagcggcggatgcgctggaggagctgaacaagtacaaagagattagagaatcgatactgaaccgcagcaaagggcattcctgcagcaccaagctgctggaggagaaacccgcggatggagatccatag

SEQ ID NO: 2380 - protein, 610 aa, Sorghum bicolor
MAAAAAAAAGGVSEPPMVEQVITEFFAKSLHIILESRSPYDSSRNFTRPSPPSSPLAGSQPRDRWFNLALRDCPAALENFDLWRQSNLELLVIDIVLVQRDNTRTASVGASRIIERWVIKYETSRSGNAIKNSGKKARSSSSQDHSLYRRAYSGSTVLFRSLYLVVRLLPAYHLFQGLNSSGRICPLSLSHKISSFVEPFTRAEDAEMKHYAFAPIETLFGSLSLSVSYVPVLELAAVPEQPTPVPPELIKDYVGSPTTDFLRKLDSLPSDGIAPACFPVTRRHSWSTGHGVRTSVSPFPMSSEPHGRLEPRMPTDNSPTAYSHPHNTSSSGKKRNTVNEECYPSPPLSPSPSHSPSSYPRNPFFRYESAPLSIPTAMAGGGGSRLPPSPRRKDKQQCSSQNENLTHSPNDKSIVSKDLVKLSEFQNEKSLQKVLSFGNDDLVYFRGLKLTRTSSKLFIMDELDERELVFAWEDKDTIIDQLRRIDISDRDDQGPSQEGGSLTRSPDAAIGILMRILQNAPGLRERLLLPGPSAPVPQEPSLQRVVTEEHGSSASSSTGVPSVLLRSRTAADALEELNKYKEIRESILNRSKGHSCSTKLLEEKPADGDP

SEQ ID NO: 2381 - DNA, 1638 bp, Sorghum bicolor
atggccgccgctcccgcgggcgcccagaaccgctgcgtcttcgttggcaacataccatacgatgcgacggaggagcagctcgtgcagatttgcgaagaagtcggcccagtcgtatccttcagattggtgattgacaaagagactgggaagccaaaaggttatggcttttgcgagtacaaggatgaggaaactgctctaagtgcacgccggaaccttcagggttacgagattaatggtcgtcagttacgtgttgattttgctgaaaatgggaggaacactgacagaaatagagaaaaggtcgacgatcctcaaatttttcctgtagaagagcctttcctaccacttttggagttctctgttaatacgagaagttgtatagtcttcgttcctgtgaatgataatagttgcgccttctccaaccaccttgtgtctcctgtttcagtttcttgcaagcatgtttgtggtcgtggtggaccaggaatggcatctaatgttgatagtcagaaacagttagctgggacttctgttgttggagagacaaaccttcatcagcccgttggtctcccaccagcaatacatgctgcgtctgtgatggctggtgtccttggtggagctcagactgcaaatgttcaaaacggtttacctgtccagtatggacttggaaatgaccctcttactcattatttggccagaatgtcaaggcatcagttgcatgaagtcatggctgaattgaagttcctaactactcaaaataaggaacattccaaaactttgctgcaaggaattccacagctgccaaaggccctatttcaggcacaaataatgcttggaatggtgacaccacagatgatgcagatggcaaagagccaacagccctcgggcgccttagcacaatcttcatctcacctcaatgaaccatacccacagccagatgctatgattccagtagtctcaagaccattaagtttgccaactaacatactaccaaacccaactgaactacatagttttcctcagcatcaacatgcatctcagcccccagtcaaaatgttcccacatggacatcagtctgggattgcagcacaatctccaattctacatcagtcccttggtggttcttccagtgttcctactcaatctcttgcgacctcagtaggcttaatctcacaagttcagcctccatttgtgccacagcaccctggaccacctgtcatgcctacaagtgtacaacagctacctttgactcaccctcatcttgctcaggtagctgctgcacctgatattctaccaaatgaaataagggttgctgatcaagcaagtcatttgacagagtttaaccatccttcaaaattgagaaaattggaggatggaacctcggtgcctggaattgtgaacagcagccatgctgtttacacagctccactgcaatcagttggccctagtggaccatctgggagctatagtgctggtgctgttagtttacagcagccagggaacgaagggcagcttacgcctgatgtggagtcagctcttctgcagcaagtcttgcagctgacacccgagcaactgagttcgttgccaccagagcaacagcagcaggtgattgaactccagaagatgctttcagctggtaaatag

SEQ ID NO: 2382 - protein, 545 aa, Sorghum bicolor
MAAAPAGAQNRCVFVGNIPYDATEEQLVQICEEVGPVVSFRLVIDKETGKPKGYGFCEYKDEETALSARRNLQGYEINGRQLRVDFAENGRNTDRNREKVDDPQIFPVEEPFLPLLEFSVNTRSCIVFVPVNDNSCAFSNHLVSPVSVSCKHVCGRGGPGMASNVDSQKQLAGTSVVGETNLHQPVGLPPAIHAASVMAGVLGGAQTANVQNGLPVQYGLGNDPLTHYLARMSRHQLHEVMAELKFLTTQNKEHSKTLLQGIPQLPKALFQAQIMLGMVTPQMMQMAKSQQPSGALAQSSSHLNEPYPQPDAMIPVVSRPLSLPTNILPNPTELHSFPQHQHASQPPVKMFPHGHQSGIAAQSPILHQSLGGSSSVPTQSLATSVGLISQVQPPFVPQHPGPPVMPTSVQQLPLTHPHLAQVAAAPDILPNEIRVADQASHLTEFNHPSKLRKLEDGTSVPGIVNSSHAVYTAPLQSVGPSGPSGSYSAGAVSLQQPGNEGQLTPDVESALLQQVLQLTPEQLSSLPPEQQQQVIELQKMLSAGK

SEQ ID NO: 2383 - DNA, 840 bp, Sorghum bicolor
gcgcttcgtacctggaaccgcctatggtttacaaggggggcgccagttttgagcctctttctactattgtgccttggcgaagtctggcgactcaaggaagctatacgaccacaggcccgcctccgctcgcgcccgtgccttggcatcgtcccagaggccgcggacgacgacgtcaccgccgccagctcgccatcgcctgctagggctagagttgagctcctgccgcctcgcttccagctccctactccccaccgcctcccggtgccacccggggccgccccactccctccgcttctgctcggcggtccccgtggctatcgatgtcgctgtggctttcgatgtcgccccactccctccacttctatcgaggtggtggtgggcgagccggcgcggcacgcggacctgccatcgttcgcgcgggtggtgaactcgtgcgacgtgctggtgggcatgcatggcgtcaggctagccaacctagtgttcctccccgcaggggccgtggtggtgcaggtggcgccgctgggcgggctggacgccatggccgcggaggactttggcgcgcccgcgcgtgacgcgtggattcggtacgtgcactacggcatcgccgtggaggagagcacgctggcgaggcggtaccgcagagtgggcgacttcctcgataagctacggggcaaggggtacttcgagcaaggcgtgccttcctccagtgtgagttctggcgagggagccgccggagttggggatgctgcggttgcagctgcatctgaggacgcaacagcggctgcttccagtaacactgtggtggctgcgcggatagcgcggtggtcgttgaagaggtag

SEQ ID NO: 2384 - protein, 279 aa, Sorghum bicolor
ALRTWNRLWFTRGAPVLSLFLLLCLGEVWRLKEAIRPQARLRSRPCLGIVPEAADDDVTAASSPSPARARVELLPPRFQLPTPHRLPVPPGAAPLPPLLLGGPRGYRCRCGFRCRPTPSTSIEVVVGEPARHADLPSFARVVNSCDVLVGMHGVRLANLVFLPAGAVVVQVAPLGGLDAMAAEDFGAPARDAWIRYVHYGIAVEESTLARRYRRVGDFLDKLRGKGYFEQGVPSSSVSSGEGAAGVGDAAVAAASEDATAAASSNTVVAARIARWSLKR

SEQ ID NO: 2385 - DNA, 6354 bp, Sorghum bicolor
atggcaaatttcaactcgtcagaacctcgagactctagagaatcaacttcacctgcaccatcaacatcatcttctatatcaagggaaaaaggtgacctggcagatgttgatgatcctgaaagtgcaatgtccactgtggctcgattgttggaagacctccatgctagcatggtatctccatctgggaaggaagctacaaccagaaggttacttgaactggccagagcaaaacaggaggcaaggattttgataggtagccattctcaggcaatgccattacttatatctacccttagagttgggtcatctgcagcaaaagtaaatgctgcagctctacttagtgcactctgcaaggaagaggacctgcgtgtgagggtcctcttaggaggctgtataccacccttaatctctcttttgaagtctgaatctgctgaagcgaagaaggctgctgctgaagctatttatgaagtgtcttctggtgggctttcagatgatcacataggcaggaaaatatttgtgactgaaggtgttgttccaactctgtgggacttgcttaatcctaggtctcgccaagatagagtagttgagggctttgtgactggggctttaaggaatctctgtggggacaaagatggttactggaaggccacacttgaagctggaggtgttgaaataattactggtcttctttcatccaagaatactgcttcacagtcgaatgctgcctccctattggcacggtttatctctgcttttggtgatagcattcccaaagttatagatgctggggctgttaaggctctccttcaccttctaaatcgagataatatcatttctgttcgtgaaagtgcggctgatgctttggaggccctgtcttccaagtctagtattgcaattaaagctgtggtggatgcaggaggccttcctattctgattggagctgttgtagcaccctcaaaagaatgcatgcagggtgagacatgtcattctctacaaagtcatgctgtccgtgctttatcaaatatttgtgggggaacaacttctctgttgctttaccttggtgagctctgccaagcaccccggtcacctgttccccttgctgacattcttggagcacttgcttattcattgatggtttttgatggctctgatggtaaatcgtttgacccagttgagattgaaaatactttggttgtgctcctaaaatctcatgacagcaagcttgatcgtattcttgaggctttagcaagtctatatgggaatggttgtctctctgacaggcttgatcactctaattctaagaaggttcttgttgggctgattaccatggctcctgctgatgttcaagaacatcttgttcgtgccttaactagcttgtgttgtgatggtgttggaatatgggaggctcttggaaagagagaaggggttcagttgctaatatcattacttgggctttccagtgagcagcagcaggaatatgcagtttccttattggctatcttgagtgatgaagtagatgacagcaagtgggcaataacagctgctggaggtatccctccacttgtccagctactagaaacaggatctcaaaaagcaaaggaggatgcagcttacatcatgtggaacatgtgctctgacagtgatgatatcagggcatgtattgagagtgctggagctgttctggcactaatttggcttctaaagagtggtagccctcgtggacaggaggcatcagttaaagcactcaagaagctgatacgatcagcagattctgctacgatcaatcagttactagcattactgctcagtgactcactgagctcaaaggctcatgtcattacagttctcgggcatgtccttgtgctggcgcctcagagagctctaatccagagtggagcctcagctaataaaggtcttaggtcactggttcttgttcttgaatcatcaaatgaagaaacacaagagattgctgcaactgtgttggctgatattttcactatgcgtcaggatatttgtgatgtcttggcaattgatgaaattgtccagccatgcatgaagcttttgacaagtggaaaccaagtgattgccacacaatctgccagagctttaggagcgctttcatgttcagctagttccatgtcaaaaaacaaaatgtcttgcttaactgaaggtgatgtgcgacctcttatcgaaatggcaaagacatcatctattgatgttgctgaaacagcatttgctgcattagcaaatctcctatcagatgcacagattgctaaagaagcgttagatgacaatattgtcttggctttgactagagtgctcaaggaagggagtttagaaggcaagattagtgcgtcgcggtcacttcgtcagttggtcaaccagtttcccctcagtgaagttctcccagattactcgcagtgctgttttataattcatgcattgttggtatgtctatctggcatcaatttggacaatgttacaaatttggaaccccttgatgttcttacattgatggctacaacaaaggagggttcacattatagcccccctctatgcactggttttcttgaagttccagaaagcttagaacctttaattcgttgtgttagtattgggcttccacctgttcaagataagtccgttcaaatacttgcaagtctttgtcagggccgaccttctctacttggtgaatatttaaacagaagtcaaggatgcatcacttcacttgctagtagagttatagagtcaaatgacatggaaataagaatcagcagtgcagtcatcctcatatctgcaatgagggacagcagagaacagtcgatcgatgttcttgaagcatcaaaacttctgaagaatctgatatctgcactcattgatatgctgaagcaacgttcctctttaacatccctagacattgaaatttggaaacctcacatggaaaaaagttcgcttaattatgagcaggatgttttgagtgtgcctgaacttggaaaggtttctgaagaaactgttgcactatggttgctctcactgatttgttctcatcatggaaggagtaaatatactgttatggagctcaatggcgttgatgcagtatctgatagacttgctagctatactgctaaccgacaggaacagtatgaagactcagaaaatatatggacttgcgcccttctgttggctactctgtttcaggattcagtggttgttcagtcttctgaaataacacgaacaataccttctttagcatccttgctaaaatctgatgatatcatcgataaatactttgctgctcaagcactggctagccttgtttccactgggagcagaggtatacagcttgctattgcaaattctggtgcagttttgggtgctgtagcattgatcggacaggtagaatctgatatgccaaaccttgttacaatggctaaagaattcaagttggcagacaatccaagtcaaataatattgaaaaacctttttgagcttgaagatgtctgcactggtgcttccgctcgaaggtccatacccttgctagtggatctacttaaaccaatgccagacaggccaggtgcacctctgattgctttgcaccttctgactcaactagcggaaggtagtgagggaaataaagttgctatggcagaggctggagctttagatgctttgactaagtatctatctttaagccctcaagactcaactgaaactactataaccaatttattagggattttatacagtaatcctgatcttctttaccatgaatcatcacgcagcacttcaaatcaactggtagctgtcttacgtttgggctcgagaagttctaggcttagtgcagtaaggacgttgcagaaactctttgatgcagagaatataagggacacagaagtggcccggcaagctattcaaccactacttgacatgcttgaatcaggaactgaaatagaacagcaggcagcacttggtgcacttatcaagctttctgctgggactatctctaaggattctgctatgtttgatgtagaaggcaacacacttgaaaatctttacaaaattttatccttcagttcgttattggagcttaagaaagatgctgctcaactctgctatattttatttgagaactccactgtacgtgcatcaccaattgcaacagaatgtcttcaacccctgatatcactgatgacatcaggatctagtttggctatcgaaccagcagtttgtgctctaaacagattactggatgaggactacaatgcagaggttgctgcaactagtgaagttattgatcttcttgtcagttttgttcctggtacaaactatcagttgtctgaagcatgtattggtgctctcataaagttgggcaaggaccgtccaaactgcaagcttgacatggttaaagctggtatcattgagcatgcgcttgatatgattcttgatgttcctgtatctgttagttcatccattgctgaattgcttcgcattttgacaaacaacagtggcattgctaaaagttctgctgctgcaaaaatggtggagccacttttcttgcttttacgtcgccctgatgttactatgtgggaccagcacagtgccttgcaagcacttgtaaatattctggagaaacctcagagtctagcagcattgaagttgactcccagtcaaataattgagcctttaatatcatttcttgagtctccctctcaagcaattcagcaacttggcactgaggtgctctcacatcttctagaacaggaacattttcaacaagatatcaccaccaaaaatgcagttgttcctctggtgcagcttgctggtattggaatcctgagcttacaacaaactgcagttaaagcacttgaaaacatctcacagagttggcccaaggcagtagctgatgcaggtggaatttttgaactttcaaaggtaattgtccaggatgatcctcagccaagtcaagcattatgggaatctgcagcacttgtgttatgcaatgttttgcgttataattctgacaattatgtcaaagtctcaatggctgtacttgtgagattgctgaactccaccatggagagtactgtcacgatagctctcagtgctctacttgttcaagagaaaagtagctcacgctgtggtgtggccatggctgaggctggggcagtacgtgcactcttggagctcctgaagagccatcgatgtgaggaatctgcagcaagattgcttgaagctctaataaacaattcaagggttcgtgaaacaaaagttgccaagtatgctattgctcctctctcacagtacctgttagatcctcagtccaagaaccagtcagcaaagtttctggtgactcttgcattaggtgacattttccaacatgaagcacttgcaagggcaagtgactccgtgtctgcctgccgtgctcttgtaagcctacttgaggaccagcctacggatgacatgacaacagttgctatttgtgcactacaaagcttagtgatgcacagcaggacaaataggcgtgctgttgctgaagctgggggcattttggttgtgcaagaattgcttctttcaccaaatgtggatatttcaggacaggctactcttctaatcaagtacctattttcaaatcatacactgcaagaatacgtgtcgaatgagcttatccgatctctcactgaccatatatgtgatattcagcaactcaaaaaggtgcggttttctgaggcggcaaccctgtgcataccacacctgctttgtgctttgaaggatggaaatgaggctgcccaggagagtgtgcttgacacccttcgcttgcttaaagaatcttgtccgcacatgaatgaagacatcgctaaagcccagtccctgctttcagctgaagccatacctgtactacaaatgcttatgaagacatgtcctcccagttttcacgagagagccgatagtttgctccattgcttgcctggttgcttgacagtgaccatcattcgtgggaataatttgaaacagacaatggggggtacaaatgcattttgttgcctgcaaataggaaatggtcctccaaggcaaactaaggtggtaaaccacagcatctgcccagcttggaacgagggtttcacctggttatttgatgtcgctcctaaagggcagaagctctacatcatatgcaaaagcaaaaatacatttggaaagtcaacccttggaagagtgaccatccagattgacaaggttgtcaccgagggtgtatacagcgggttcttcagcctcagccacgacggtggcaaggatggctcaagaacccttgagatagaaattgtatggtcgaataggccatccaacgacagtatgtag

SEQ ID NO: 2386 - protein, 2117 aa, Sorghum bicolor
MANFNSSEPRDSRESTSPAPSTSSSISREKGDLADVDDPESAMSTVARLLEDLHASMVSPSGKEATTRRLLELARAKQEARILIGSHSQAMPLLISTLRVGSSAAKVNAAALLSALCKEEDLRVRVLLGGCIPPLISLLKSESAEAKKAAAEAIYEVSSGGLSDDHIGRKIFVTEGVVPTLWDLLNPRSRQDRVVEGFVTGALRNLCGDKDGYWKATLEAGGVEIITGLLSSKNTASQSNAASLLARFISAFGDSIPKVIDAGAVKALLHLLNRDNIISVRESAADALEALSSKSSIAIKAVVDAGGLPILIGAVVAPSKECMQGETCHSLQSHAVRALSNICGGTTSLLLYLGELCQAPRSPVPLADILGALAYSLMVFDGSDGKSFDPVEIENTLVVLLKSHDSKLDRILEALASLYGNGCLSDRLDHSNSKKVLVGLITMAPADVQEHLVRALTSLCCDGVGIWEALGKREGVQLLISLLGLSSEQQQEYAVSLLAILSDEVDDSKWAITAAGGIPPLVQLLETGSQKAKEDAAYIMWNMCSDSDDIRACIESAGAVLALIWLLKSGSPRGQEASVKALKKLIRSADSATINQLLALLLSDSLSSKAHVITVLGHVLVLAPQRALIQSGASANKGLRSLVLVLESSNEETQEIAATVLADIFTMRQDICDVLAIDEIVQPCMKLLTSGNQVIATQSARALGALSCSASSMSKNKMSCLTEGDVRPLIEMAKTSSIDVAETAFAALANLLSDAQIAKEALDDNIVLALTRVLKEGSLEGKISASRSLRQLVNQFPLSEVLPDYSQCCFIIHALLVCLSGINLDNVTNLEPLDVLTLMATTKEGSHYSPPLCTGFLEVPESLEPLIRCVSIGLPPVQDKSVQILASLCQGRPSLLGEYLNRSQGCITSLASRVIESNDMEIRISSAVILISAMRDSREQSIDVLEASKLLKNLISALIDMLKQRSSLTSLDIEIWKPHMEKSSLNYEQDVLSVPELGKVSEETVALWLLSLICSHHGRSKYTVMELNGVDAVSDRLASYTANRQEQYEDSENIWTCALLLATLFQDSVVVQSSEITRTIPSLASLLKSDDIIDKYFAAQALASLVSTGSRGIQLAIANSGAVLGAVALIGQVESDMPNLVTMAKEFKLADNPSQIILKNLFELEDVCTGASARRSIPLLVDLLKPMPDRPGAPLIALHLLTQLAEGSEGNKVAMAEAGALDALTKYLSLSPQDSTETTITNLLGILYSNPDLLYHESSRSTSNQLVAVLRLGSRSSRLSAVRTLQKLFDAENIRDTEVARQAIQPLLDMLESGTEIEQQAALGALIKLSAGTISKDSAMFDVEGNTLENLYKILSFSSLLELKKDAAQLCYILFENSTVRASPIATECLQPLISLMTSGSSLAIEPAVCALNRLLDEDYNAEVAATSEVIDLLVSFVPGTNYQLSEACIGALIKLGKDRPNCKLDMVKAGIIEHALDMILDVPVSVSSSIAELLRILTNNSGIAKSSAAAKMVEPLFLLLRRPDVTMWDQHSALQALVNILEKPQSLAALKLTPSQIIEPLISFLESPSQAIQQLGTEVLSHLLEQEHFQQDITTKNAVVPLVQLAGIGILSLQQTAVKALENISQSWPKAVADAGGIFELSKVIVQDDPQPSQALWESAALVLCNVLRYNSDNYVKVSMAVLVRLLNSTMESTVTIALSALLVQEKSSSRCGVAMAEAGAVRALLELLKSHRCEESAARLLEALINNSRVRETKVAKYAIAPLSQYLLDPQSKNQSAKFLVTLALGDIFQHEALARASDSVSACRALVSLLEDQPTDDMTTVAICALQSLVMHSRTNRRAVAEAGGILVVQELLLSPNVDISGQATLLIKYLFSNHTLQEYVSNELIRSLTDHICDIQQLKKVRFSEAATLCIPHLLCALKDGNEAAQESVLDTLRLLKESCPHMNEDIAKAQSLLSAEAIPVLQMLMKTCPPSFHERADSLLHCLPGCLTVTIIRGNNLKQTMGGTNAFCCLQIGNGPPRQTKVVNHSICPAWNEGFTWLFDVAPKGQKLYIICKSKNTFGKSTLGRVTIQIDKVVTEGVYSGFFSLSHDGGKDGSRTLEIEIVWSNRPSNDSM

SEQ ID NO: 2387 - DNA, 1437 bp, Sorghum bicolor
atggcggaagaaaacgtgcgggaactgcccccgaacttcccggcggggcggaagcggtccccccaatggcgcgcggaacaactcaggggactcatccggatgatcgacgagaaggaggccgagatcagcgccgcgctccatgaagacctcgccaagccgcacatggagtcctatctccacgagatctcactgacaaagtcgtcgtgcaagtttgcgatcaacgggctcaagaactggatgaagcccgaaaaggtacctgcgtccataactacattcccgtcctccgctcaaatcgtgccggagcccctcggtgtcgtgctcatcatctcagcttggaactaccctttcatactctctattgacccggtcattggagcaatcgccgctggaaatgccgttgttctgaagccatcagaaatagcgccagctacctcgtcagtgttagcaaatctgctacccaagtatgttgataactcctgcattaaagttgtggagggaggcgttccagaaacaaccgcactgttggaacagagatgggataagatcttctacacaggtagtggaactgtagcacgcatagtgatggcagcagccgcaaagcatttaaccccggtggctttggagcttggtgggaaatcccctgttgttgtggattcgaatgttgatcttcatgttgccgttaagaggattgttgttggcaaatggggatgcaacaatggccaagcgtgcattgctccagattacatcataacgacgaaatcattcgcaccagagctggtggcctctttgaaaagagtcttggtaaggttctatggggaggatcctctgcaatcagcagacttgtctcgtattgtgaattcgaagcaattcaagagattgcaagatttgatagaggaaaaaagagttgctgacaagattgtgttcggcggcgaggctgatgaggagcaattaaaaattgctcctacagtattgttagatgttccccaagattcagcaattatgacaggggaaatatttgggcccttgcttccgattgtgacggtcgaaaagattgaggaaagcttcaacctgatcaacgccaagccaaagccactcgctgcctaccttttcaccaagaacaagaagctgcaagaggagtttgtagccaacgtccctgcaggagggatgcttgtgaacgataccgcgctacatctcgccaacccatacttgccctttggcggcgtgggcgacagcgggatggggtgctaccacggcaagttcggcttcgactgcttcagccacaagaaggcggtgctgatccgcggctttggtggcgaggcgaacgccaggtacccgccctacacgacggagaagcagaagatcctgagaggactcatcaacggcagcttcatcgccctcatccttgctctcctcggcttccccagggagaagcgttag

SEQ ID NO: 2388 - protein, 478 aa, Sorghum bicolor
MAEENVRELPPNFPAGRKRSPQWRAEQLRGLIRMIDEKEAEISAALHEDLAKPHMESYLHEISLTKSSCKFAINGLKNWMKPEKVPASITTFPSSAQIVPEPLGVVLIISAWNYPFILSIDPVIGAIAAGNAVVLKPSEIAPATSSVLANLLPKYVDNSCIKVVEGGVPETTALLEQRWDKIFYTGSGTVARIVMAAAAKHLTPVALELGGKSPVVVDSNVDLHVAVKRIVVGKWGCNNGQACIAPDYIITTKSFAPELVASLKRVLVRFYGEDPLQSADLSRIVNSKQFKRLQDLIEEKRVADKIVFGGEADEEQLKIAPTVLLDVPQDSAIMTGEIFGPLLPIVTVEKIEESFNLINAKPKPLAAYLFTKNKKLQEEFVANVPAGGMLVNDTALHLANPYLPFGGVGDSGMGCYHGKFGFDCFSHKKAVLIRGFGGEANARYPPYTTEKQKILRGLINGSFIALILALLGFPREKR

SEQ ID NO: 2389 - DNA, 1464 bp, Sorghum bicolor
atggcgatccgctcctccaaggccgtgctcacactcgacgtcgacagcttcgacgaggccgtcgccaagcaccccttcatggtcgtcgagttctacgccccctggtgtggacactgcaagaagcttgctccagagtatgagactgcggccaaggaacttagcaagcacgacccaccgattgttctcgctaaggttgatgctaatgaggagaagaacaggccgcttgctaccaagtacgagatccaagggttcccaaccctcaagatcttcaggaaccaggggaagaacattcaggaatacaagggccccagggaggctgatggcattgtcgattacttgaagaagcaggttggccctgcgtccaaggagctcaagtcacaggaagatgttgcgacccattatgatgacaagaatatctacattgttggtgtcttcactgaattcagcggcactgaatttacaaacttcatggaggtcgctgagaagctgaggtctgactatgactttggccacactttgcatgccaaccacctcccacgcggtgatgcagcggtggagaggccattggtcagggtgctgaagccatttgatgagcttgttgttgacaccaaggattttgatgttgctgctctgttgaagtttattgacgctaccaccgtccccagagttgtcacttttgacaagaaccctgacaaccacccgtatctcatgaaattcttccaaagctcagcccccaaggctatgctgtttttgaacttctccactggaccttttgattctttcaagtctgtttactatgctgccgcagaggaattccagaacaaggaaatcaagttccttattggtgaccttgaatccagccagggtgccttacagtactttggtctgaaagaggaccaggcaccccttatcctcatccaggatggtgattccaagaagttcttgaaggatcaaattgaggctgaccagattgtctcttggttgaaggagtactttgatggcaaattgacgccgttcaagaagtctgagcctattcctgaggtcaacaatgagcctgttaaggtggttgtggctgacaacatccatgatttcgtcttcaagtctggcaaaaatgttcttattgaattctatgccccctggtgtggacactgcaagaagctggcgcccatcttggaagaggcagccaccactctccagagtgatgaggaagttgtgattgctaagatggacgcgacggccaatgatgtgcccagtgagttcgaggtccaaggctacccaaccatgtacttcgtgacccccagcgggaaggtcaccgcctacgacagcggcaggacagcagacgacatcgtcgacttcatcaagaagagcaaggagaccgccggcgccacccaggcgacgacgacgacatctgagaaggcagctgacgcagccgagaaagctgagcccgtcaaggacgagctgtaa

SEQ ID NO: 2390 - protein, 487 aa, Sorghum bicolor
MAIRSSKAVLTLDVDSFDEAVAKHPFMVVEFYAPWCGHCKKLAPEYETAAKELSKHDPPIVLAKVDANEEKNRPLATKYEIQGFPTLKIFRNQGKNIQEYKGPREADGIVDYLKKQVGPASKELKSQEDVATHYDDKNIYIVGVFTEFSGTEFTNFMEVAEKLRSDYDFGHTLHANHLPRGDAAVERPLVRVLKPFDELVVDTKDFDVAALLKFIDATTVPRVVTFDKNPDNHPYLMKFFQSSAPKAMLFLNFSTGPFDSFKSVYYAAAEEFQNKEIKFLIGDLESSQGALQYFGLKEDQAPLILIQDGDSKKFLKDQIEADQIVSWLKEYFDGKLTPFKKSEPIPEVNNEPVKVVVADNIHDFVFKSGKNVLIEFYAPWCGHCKKLAPILEEAATTLQSDEEVVIAKMDATANDVPSEFEVQGYPTMYFVTPSGKVTAYDSGRTADDIVDFIKKSKETAGATQATTTTSEKAADAAEKAEPVKDEL

SEQ ID NO: 2391 - DNA, 429 bp, Sorghum bicolor
atggaggagcaggtggtgacggagcggatccggcggaagctggaggaggtcaacgccaccgtgcagcagcacctcgccggcgtccaggaccacgtcaacttcaccatgcagcaagcatacttcaagtgcgcgcatgattgctttgatcggcgtcgtactcaggaagggatcaacagctgtgtggagaattgtagtgtgcctgtccttaccgccaacaatgttgttgagaatgagatggccaagtttcaggaacggttgaatcggtcattgatggtctgtcaagacaagtatgaagcagccaagctccagaagttgaaaacagatgcaactcaggaactggaatcctgtgtcaacagatctatcgatgacagcatcagggtgctcccacatgtggtggagcagatcaagtccgccctcagtatcaattag

SEQ ID NO: 2392 - protein, 142 aa, Sorghum bicolor
MEEQVVTERIRRKLEEVNATVQQHLAGVQDHVNFTMQQAYFKCAHDCFDRRRTQEGINSCVENCSVPVLTANNVVENEMAKFQERLNRSLMVCQDKYEAAKLQKLKTDATQELESCVNRSIDDSIRVLPHVVEQIKSALSIN

SEQ ID NO: 2393 - DNA, 399 bp, Sorghum bicolor
atgagcgcgcctcggccgcagcgaccccacctcatgctcacgctgctgccgctgcgaccccgcgacacgttcgcgctaggcgctagtgccatcatctacacggccgccatcctcgagtacctcactgccaaggtcctcgagatggccagcaatgctagaagggacctcaaggcgaagagtttcaccccatggcaccagcatcttgccaaccgcaggaacgaggagctcgacaccctcatcaagggcaccatcgctagtggcgacgtcatcccgcacatccacaagctcgccatccacgggaacacggagctcgaaactgtcatcaagggcaccattgttggtgggggcatcatcccacacatccacaagtcgctcatcaacaagagcgccaaggagtga

SEQ ID NO: 2394 - protein, 132 aa, Sorghum bicolor
MSAPRPQRPHLMLTLLPLRPRDTFALGASAIIYTAAILEYLTAKVLEMASNARRDLKAKSFTPWHQHLANRRNEELDTLIKGTIASGDVIPHIHKLAIHGNTELETVIKGTIVGGGIIPHIHKSLINKSAKE

SEQ ID NO: 2395 - DNA, 1713 bp, Sorghum bicolor
atgatggacagccgcctccttgatgccgccgtatctggtgacacgacaatgatgaaacacttggcccttcatgacccagccgtgctgctgggaacaactccacggggcaacacctgcctccacatctccgccatgcatggccatgctggattctgcatggatgccatggccctgaaccggtccctcctctccgctgtcaacaatgacggggagactccacttgtcgcagcagtgagaggtggacggaccagtactacaagtttagctccatcttttctcaggtgctaccgtgatctccatctgagcgaggcaatcttgaagcaagacaagcaagggaacaatgcactgcaccacgcaatacgaagcggccacagggaacttgcgctggagctgatcgcagccgagcccgctttgtccaaagctgtgaacaaatatgatgagtcacccatgtacatcgcggtgatgagaaattacaaggatgtatccgagaaactgttggagattcctgattctgctcatctgggcggaaccaatggtcacaatgctcttcatgctgccgtgagaaatggcactgcagctatcgctaaaaagattgtggagacacgtcctgcgctcgcactaacagaagacaagattagaaaagccactccactgcaccaggctgtactttgggacaaggttgacgtgctaagagtaatattggaacatgatcggtctttagggtatgtggtctcctcgaagggtacccctcttctggtttctgctgcatatagaggcaatgttggtgtagcccgagagcttcttaaacattgtccagatgcgcccttcgctaagacaaatggctggacatgtctgcaccaagctgtgtggaatggacagctggagttcgtagattttgtcctgggtttgccacaatttggtagattccttattaacatgcgcgatcaggacggcgatactgctctgcacctcgcagtccaaaagtccaatcccaagatggtcgctgctttactgcttcaccgagacatagacgtcagagtgcttaatgacaatggaaacgaagcaatatggaaattgtggaatgtcaccaaagattccaagacattaaactggaatgaaatttccatgcttatgttgaaagctgatcctcaagccgcaacagatatttataatctccgcagggaagcccatgataaagtgacagaaacaacaaggaatgatatcaagtcactgactcaaacatatacaggcaacacttccttggtggcgattctgattgccaccattacatttgctgctgctttcactttgcccggaggatatagcgctgatcctggaaatgagggccttcctatcatggcaaggaagtttgcgtttaaggcattcttgatctctgataccttggcaatgtgctcctcacttgttgtagccttcgtatgcatcatagccaggttggaggatcttgagttcctgcttcactacaggtcttttaccaaaaagcttatgtggtttgcatacatggcaaccaccacagcatttgcaactggtttgtacactgtcctggctcctcgtctcctctggctcgctgttgcgatctgtgttctaacgacttcgctacccattctcactaagcttcttggtgaatggcccatcttgagactaagattacgcttgggtcggactttcaagtcggacctccttgatatggtatag

SEQ ID NO: 2396 - protein, 570 aa, Sorghum bicolor
MMDSRLLDAAVSGDTTMMKHLALHDPAVLLGTTPRGNTCLHISAMHGHAGFCMDAMALNRSLLSAVNNDGETPLVAAVRGGRTSTTSLAPSFLRCYRDLHLSEAILKQDKQGNNALHHAIRSGHRELALELIAAEPALSKAVNKYDESPMYIAVMRNYKDVSEKLLEIPDSAHLGGTNGHNALHAAVRNGTAAIAKKIVETRPALALTEDKIRKATPLHQAVLWDKVDVLRVILEHDRSLGYVVSSKGTPLLVSAAYRGNVGVARELLKHCPDAPFAKTNGWTCLHQAVWNGQLEFVDFVLGLPQFGRFLINMRDQDGDTALHLAVQKSNPKMVAALLLHRDIDVRVLNDNGNEAIWKLWNVTKDSKTLNWNEISMLMLKADPQAATDIYNLRREAHDKVTETTRNDIKSLTQTYTGNTSLVAILIATITFAAAFTLPGGYSADPGNEGLPIMARKFAFKAFLISDTLAMCSSLVVAFVCIIARLEDLEFLLHYRSFTKKLMWFAYMATTTAFATGLYTVLAPRLLWLAVAICVLTTSLPILTKLLGEWPILRLRLRLGRTFKSDLLDMV

SEQ ID NO: 2397 - DNA, 1383 bp, Sorghum bicolor
atggctcgtgtcgccgccatagtggtgctggtgctcctcctgcagctggcctcctcctcgtacctcgtcgcggcccacgccgatgctgtcagcgtgcttggccgcaaggccggcgtcgtcgacgagcctcccttggagaacgcgccggcggttgggccggggaggtacgccgtcatcttcgacgccggcagcacggggagccgagtgtacgttttcaggttcgacaggcagatggaccttctccgcatcggcgatgagatcgaattcttcgccaaggtgaaaccaggcctgagctcgtatgctggacagcctcaagaggccgcaaagtccattctgcctcttcttgacaaggctaagcgcattgtcccttcatggcttatgaaaaggacaccactgaagcttggagcaactgctggattacgcctcatcggaaaccaacaagcagaccaaattcttgatgcggtcagagatcttgtccacaaaaagagcaaattccagtgcaagtccaactgtatcaatgttcttgagggatctcaggaaggatcctacctatgggttgctctgaattatttgttggataaactgggaggggactattcccagacggtaggcgtgattgatatgggtggtggatcggtgcaaatggcctatgctgtttcttcatattctgctgcgagagctcccgctgtgcctgacggcgaggatccctatattaccaaagagtattttaaaggaaaagagtacaatgtatatgttcacagctacttgcactatggttcctttgcatcacgagcggagattttgaagtccaagaatggaccattcagcttctgcatgctgcgcggatttagtggtaaatacacctataatggacagcaatacgatgcaattgctagaccagaaggagcattatatgaaaaatgtagggaagagatcaccaaggcactgaatctgaaggcaccatgcaagacaaagaactgcaccttcggtggtgtgtggaatgggggaggtggagctggacaaaacaatatctacgttgcatcaggcttctactaccttgcctcacatgttgggttcatagatagcaaagctcccagcgcgaaggccgctcctgccgcattcagggctgctgctaagaaggcttgccaattggatgtcaagaaagcaaaagttgcctacccaaatatttctgatagtgatgtgccatacttgtgtatggatcttacttacacgtacacattgctcgttgacggcttcggtctgcagccaatgaaaaagatcacatttgtatccaaggtgaagcatggcgagtactacatggaagccgcctggcctctgggtactgctattgaggctgtgtcaccgatactaaacggtgattaa

SEQ ID NO: 2398 - protein, 460 aa, Sorghum bicolor
MARVAAIVVLVLLLQLASSSYLVAAHADAVSVLGRKAGVVDEPPLENAPAVGPGRYAVIFDAGSTGSRVYVFRFDRQMDLLRIGDEIEFFAKVKPGLSSYAGQPQEAAKSILPLLDKAKRIVPSWLMKRTPLKLGATAGLRLIGNQQADQILDAVRDLVHKKSKFQCKSNCINVLEGSQEGSYLWVALNYLLDKLGGDYSQTVGVIDMGGGSVQMAYAVSSYSAARAPAVPDGEDPYITKEYFKGKEYNVYVHSYLHYGSFASRAEILKSKNGPFSFCMLRGFSGKYTYNGQQYDAIARPEGALYEKCREEITKALNLKAPCKTKNCTFGGVWNGGGGAGQNNIYVASGFYYLASHVGFIDSKAPSAKAAPAAFRAAAKKACQLDVKKAKVAYPNISDSDVPYLCMDLTYTYTLLVDGFGLQPMKKITFVSKVKHGEYYMEAAWPLGTAIEAVSPILNGD

SEQ ID NO: 2399 - DNA, 1794 bp, Sorghum bicolor
atggcgggcggcgggaagaaggagaagggcgaggggctcgggcgcgcgctgatccggcagcggaacaaggcggcggcggccgccaaggaacggggcgaggcgctcgccttcggccgccgccgcgcgatgccgctcgagtccgtcatcgacgtcagcgacatcgacgccgtgctccagcgggccgcggaggcagaccagctcgccgaggccgcgtccgtctcctccgactccgacctcatcatcgacctggatgcgacgggggagacggaagacgagaggcggcggcttcgtaaggagcaggaggccttgcacgccagcagcctcagggttcccaggcgaccaccatggcatagtcagatgacggtggaggagcttgatgtgaatgagcggcgtgccttcctggtgtggcgcaggaatcttgcgagattggaagagaatgataagcttgtcctgactccctttgagaagaatattgatatttggagacaactctggagagtgcttgaacgcagtgatttgttggttatggtggttgatgctcgggatcctttattctaccgctgccctgatcttgaggcatatgcaaaggaaattgatgagcacaagagaacaatgctccttgttaacaaggctgatctgttgccgttaaatatcaggaagagatgggctgattattttaaggcacatgatattctctatgtgttctggtcggctaaggctgccactgccacattagaaggcaagaagttaagtggatactctgaagaagaatctgcttctcttgacttggataccaagatatatggcagagatgaactgttgatgaagctgcaagctgaggcagagtctattgtagctcagagaaggacctcaacttctgtagatgatcaggaagccagttcttcagattctgtttcttcagtggctaagcatgtagttgttggatttgttggctatccaaatgttggaaagagttcaacaataaatgctttggttggggagaagaggactggtgttactcacacacctggcaagacaaaacatttccagacactgataatctccgaagagctcactctgtgtgattgccctggtctggtcttcccatccttttcaagctcaaggcatgagatggtggcatgtggtgtgttgccgattgatagaatgacaaagcaccgggaagctattcaagttgttgcagatcgtgtcccaagggatatccttgagcaaatttacaaaatcaccttgccaaagccaaagccatatgaacctcagtctcggccggcaactgctgctgagctattgcgggcctactgtgcatctcgtgggcatgtcagccatgctgggctgcctgatgagactagggctgctcgacagattctgaaggattatattgatggtaaaatcccacactatgaactcccccctggtgtaacagactctgagatggatcttgaacaaaccactggttcagaaggtccaactacttcagcagctaatgaatcagatgctgatgatcttgatgaagaggatggggatacagttgatcctgctgaaccagacatgagagatgtcctggacgaccttgaatcttttgacttggccaatggagggtccaaaactactgcaaagaagaagaaagaggcatctcacaagcatcacaagaagccccagcggaagaaggatcggtcctggagggttggcaatgatggtggagatggaacagcagttgtaagggtgtaccagaaacctgctgttaatttgtccacggtcagtgcaagcggcagggtctga

SEQ ID NO: 2400 - protein, 597 aa, Sorghum bicolor
MAGGGKKEKGEGLGRALIRQRNKAAAAAKERGEALAFGRRRAMPLESVIDVSDIDAVLQRAAEADQLAEAASVSSDSDLIIDLDATGETEDERRRLRKEQEALHASSLRVPRRPPWHSQMTVEELDVNERRAFLVWRRNLARLEENDKLVLTPFEKNIDIWRQLWRVLERSDLLVMVVDARDPLFYRCPDLEAYAKEIDEHKRTMLLVNKADLLPLNIRKRWADYFKAHDILYVFWSAKAATATLEGKKLSGYSEEESASLDLDTKIYGRDELLMKLQAEAESIVAQRRTSTSVDDQEASSSDSVSSVAKHVVVGFVGYPNVGKSSTINALVGEKRTGVTHTPGKTKHFQTLIISEELTLCDCPGLVFPSFSSSRHEMVACGVLPIDRMTKHREAIQVVADRVPRDILEQIYKITLPKPKPYEPQSRPATAAELLRAYCASRGHVSHAGLPDETRAARQILKDYIDGKIPHYELPPGVTDSEMDLEQTTGSEGPTTSAANESDADDLDEEDGDTVDPAEPDMRDVLDDLESFDLANGGSKTTAKKKKEASHKHHKKPQRKKDRSWRVGNDGGDGTAVVRVYQKPAVNLSTVSASGRV

SEQ ID NO: 2401 - DNA, 1023 bp, Sorghum bicolor
atgctgaatctagtatcatttgagacgccgcctctcggaaggcaggagagatcagctaatactaccactgtcactgcagcagcggccatcaggggaaaaaaggaagaaagctccagcaacacttgcttccatgggcacctggacctcagtcttggcatctccttgtctcatggcagcggcggcggctgtgacgcatccagctgtggcggaaacaagcaggcgagctatggtggtcggcagggcagccgtgacgacaaggacgatgttcgttgcatcaccaccgccgccgccacagctgcaaatgtgattacagcaaggcacgaccatgtcggtgatttgacagcatcatcaggaggaggtggctgggcagcggcgttcatgccgagcccgaccagcttcatgcatccatggagcctcgccgcacggcagcagaaggctgctgcggagcaagaccggacgccgcctaccacttacatgtcaagtaatgatgaccgtgtggccacatcaccgtcggccgtcggctggccgccagtgcacacctcccggcgcaacatcgtcaccgccatgcaagtacccaagcctactggcgccaccgccgccgatggacccgaaagcacgaccacgacgcacgccacagccggcggcggcgaaaagaatgtggcgccggcgccgccgacggacagcacggtggtggccacactaatacggccgccgccggcgaacatgttcgccaaggtgcacatggaaggatacgcgattggcaggaagatcaacctcagggcacaaggcggctacgactcgctctccagggtgcttaccaacatgacaacaaacttcttttgtcccgcagactgttcaggtgcaggcacgggagaaaaagatgtgcctaatagtgacaaattcatatttctgtatgaagactttgagggtgaccgaatgctggttggtgacgtcccatgggaattattcctagcgtctgctaaaagattgtacattgtccgcaatccagtatcaagtgacaaa

SEQ ID NO: 2402 - protein, 341 aa, Sorghum bicolor
MLNLVSFETPPLGRQERSANTTTVTAAAAIRGKKEESSSNTCFHGHLDLSLGISLSHGSGGGCDASSCGGNKQASYGGRQGSRDDKDDVRCITTAAATAANVITARHDHVGDLTASSGGGGWAAAFMPSPTSFMHPWSLAARQQKAAAEQDRTPPTTYMSSNDDRVATSPSAVGWPPVHTSRRNIVTAMQVPKPTGATAADGPESTTTTHATAGGGEKNVAPAPPTDSTVVATLIRPPPANMFAKVHMEGYAIGRKINLRAQGGYDSLSRVLTNMTTNFFCPADCSGAGTGEKDVPNSDKFIFLYEDFEGDRMLVGDVPWELFLASAKRLYIVRNPVSSDK

SEQ ID NO: 2403 - DNA, 2040 bp, Sorghum bicolor
atgaccttctctatggatatggatttgaacgcatcgcctgtgcctgacgatgatgagcagcagccttatgatgagccagtggaggttgattatgctcaggaggggcatgttgaatctgctgtcgcaacattgcgccgggagcgtgaagagagacgcaagaaactaaagagagagcagcaggatgatgggtcaaggctacattcccagcagattaggaatgattatgcccctcaacccaaaaggcatagtcgctttaaagaggcacctcagggctggttggactgtcctgcatttggggagccaatagataaaatcataccatctaaagttcctcttgatgaaacattcaatgagtcagtgcctcctgggaagcgatactcctcaaagcaactagttaacaaacaaagaaaagctggccgcgaaataggtctggtgattgatttgacaaataccacccggtattattcaccagcagaatggacgaggcaaggtactaagtatgcgaagattgcatgcaaggggagagatgctgtacctgacaatgaatctgttaataagtttgtctatgaggcaatgatgttccttgatcgacaaaaacaatcaaagaatcctaaatatattctggttcactgtacccatggccataatcgtacgggtttcatgattattcattaccttatgcgcacacacgtctcttgtgttgctgaggcgataaatatatttgctcaaaggcggccacctggcatatacaagagggactatattgaagcactgtattcattttaccatgaggtccctgagaatatgatgctagcatgccctccaacaccagaatggaagagaccagatgatctcgatttaaatggtgaagctaagcaggatgatgatgatgacaatggtgatcctgaaccactgcgtaatgaatcagaggataaaataatcaccaacgacgatgtgttaggggacgaagtgccatatgaccagcaagaagctttgcgtgtcctatgttatcggttgcttgaaatgccccttgtaagggggcattcacaatttcctggatcacatccagtttctcttaacagtgaaaatctacaactacttaggcagcgatactactttgctacatggaaagctgatggaacacgatatatgatgcttataatgagagatggttgtttcttgattgatcggaatttttgcttcagaagggttcagatgcgctttccccataagagccttgaaggtctgcatgatatgaccttgattgatggagagatgattatagacacggtaccagattcaggcttgaagagaaggtacttggcatatgatcttatggcacttggtgcagtgtccaaaactaagttgccattttctgaaaggtggaaaatgctggaagatgaaataatacggccacgttatcatgagaaaaagcaatttgagagtggtgctaagagcaatccgttgtacaaatatgacatggaattattttcggttaggagaaaggatttttggctgctctcaacagtaaaaaaggttcttaaggagttcattccatcgctttgccatgatgctgatggccttatatttcagggctgggatgatccatatgtaactcgtactcatgaaggtcttctgaagtggaagtaccctgagatgaattctgtggacttcctttttgagcttacaaatgataatcgtcaattggttttcctttatgagagaggaaaaaagaaacttatggatggtgctcggatagcatttactgatgatgtagatccatcctctgtcgctgggaggattgttgagtgctcctggaataaggaagaacagtgttgggcctgtatgcgtattagatctgataaatcgactccaaatgacatcaacacataccggaaggtgatgaggagtattacagataacattaccgaggaaaagcttctcgaagagattgatgagataaggcgcctcccaatgtatgccgataggatgcatgctcatacgaagatggcacaacagcggcgaagattgccaccatag

SEQ ID NO: 2404 - protein, 679 aa, Sorghum bicolor
MTFSMDMDLNASPVPDDDEQQPYDEPVEVDYAQEGHVESAVATLRREREERRKKLKREQQDDGSRLHSQQIRNDYAPQPKRHSRFKEAPQGWLDCPAFGEPIDKIIPSKVPLDETFNESVPPGKRYSSKQLVNKQRKAGREIGLVIDLTNTTRYYSPAEWTRQGTKYAKIACKGRDAVPDNESVNKFVYEAMMFLDRQKQSKNPKYILVHCTHGHNRTGFMIIHYLMRTHVSCVAEAINIFAQRRPPGIYKRDYIEALYSFYHEVPENMMLACPPTPEWKRPDDLDLNGEAKQDDDDDNGDPEPLRNESEDKIITNDDVLGDEVPYDQQEALRVLCYRLLEMPLVRGHSQFPGSHPVSLNSENLQLLRQRYYFATWKADGTRYMMLIMRDGCFLIDRNFCFRRVQMRFPHKSLEGLHDMTLIDGEMIIDTVPDSGLKRRYLAYDLMALGAVSKTKLPFSERWKMLEDEIIRPRYHEKKQFESGAKSNPLYKYDMELFSVRRKDFWLLSTVKKVLKEFIPSLCHDADGLIFQGWDDPYVTRTHEGLLKWKYPEMNSVDFLFELTNDNRQLVFLYERGKKKLMDGARIAFTDDVDPSSVAGRIVECSWNKEEQCWACMRIRSDKSTPNDINTYRKVMRSITDNITEEKLLEEIDEIRRLPMYADRMHAHTKMAQQRRRLPP

SEQ ID NO: 2405 - DNA, 1347 bp, Sorghum bicolor
atggccctcgcgctgcgcttccggcgtgtcctcgccgcggcctccacctcggcgcccctgctccgcccgtccgcctcagtcgcccgtccctcccccctcgcggcccccgcctcctcccctgtcgcgccgctcccgcgggcgccgtggcggctcctccccggcggcgccgccgccgggttccggtccacggcggcggcggctgcgcggggcggtgccgactacggggcgtccgacagcaagatctcccccgacgagatcctcttcgagggctgcgactacaaccactggctcatcaccatggagttcccggaccccaagccgtcgcgcgaggagatgatcgagacattcctccagaccctcgccaaggtcgtcgggagttatgaggaggccaagaagaggatgtatgcttttagcacgacgacttatgttggttttcaggctgtaatgactgaggaaatgtcagaaaaatttaaaggtttacctggagtagttttcattctgcctgattcatacctatacccagaaacaaaggagtacggaggagacaaatatgataatggtgtcatcactcccagaccaccacctattcattatagcaaaccatcaagaactgacaggaaccgtaactaccgaggaaactatcaggatggccctcaacagcaaggaaattaccagaaccgtcctcaacaaggtggttaccagaacaacccgccacagcaaggaaacttccagacaaaccgctcacagcaagatggaagaggctatgccccacagcggaattatgcacaaggtgggcaggatggtagaggttttggaaggaatgattacgcagaccgttcaggctacaatgggccacctggtggttttcaaggtcaagctcagtaccaagggcatgtaaatccggctggacaagatcaaggttataacaacccacaagagcgcaggaacttcccgcaagggcagggaggaggttataggcctggtggtccttcagcacctgggtcttttggtcaacaatcagcacctgggtcttttggtcaacaatcagcacctgggtcatatggccgaccatcagcacctgggtcttatggccaaccatcaacacctggatcttatggccaaccttcgacacctggatcttatggtcagtcatcaacacctggtaactatgggcaggcacctccatcagcgaatccaggtggtagagttcctggtgcgaatcctagttatggtggggatggcagacaggggacaggaccggcatatggtggagataactggcaaagagattctggtcagtatcctagcccaggtgaaggacaagggaactggcagggaaggcagtaa

SEQ ID NO: 2406 - protein, 448 aa, Sorghum bicolor
MALALRFRRVLAAASTSAPLLRPSASVARPSPLAAPASSPVAPLPRAPWRLLPGGAAAGFRSTAAAAARGGADYGASDSKISPDEILFEGCDYNHWLITMEFPDPKPSREEMIETFLQTLAKVVGSYEEAKKRMYAFSTTTYVGFQAVMTEEMSEKFKGLPGVVFILPDSYLYPETKEYGGDKYDNGVITPRPPPIHYSKPSRTDRNRNYRGNYQDGPQQQGNYQNRPQQGGYQNNPPQQGNFQTNRSQQDGRGYAPQRNYAQGGQDGRGFGRNDYADRSGYNGPPGGFQGQAQYQGHVNPAGQDQGYNNPQERRNFPQGQGGGYRPGGPSAPGSFGQQSAPGSFGQQSAPGSYGRPSAPGSYGQPSTPGSYGQPSTPGSYGQSSTPGNYGQAPPSANPGGRVPGANPSYGGDGRQGTGPAYGGDNWQRDSGQYPSPGEGQGNWQGRQ

SEQ ID NO: 2407 - DNA, 1098 bp, Sorghum bicolor
atggcttctcaggcttccaatgttgtccgccctagcgacgccgagctgctgcaggcacaagccgacctatggcgggtgagcctctcctacctgacgcccatgtcactgaggtgcgccgtcgagctcggcatccccacggcgatccaccgccacggcggggctgcctcagccgccgacctgatcaccgcgctgtccctcccttcgaccaagctgccgttcctccgtcgcctgctgcgtctcttggccgtggcgggcgtgttcaccgtcgacaagaccaccgccgaggataggtactgcatcaaccccgtgtcctacctcctggtggacggcatccctcatgaggtgcacatcaaccacacctccctggtgctcacctgcacctcgacgcgctacctcgacgcggcgctggggttggcagagtggttcaagaaggacgtggtgacgccgccattccaggagctgcacggggcggctctgttccatgagagcatggagagcctcgacccggattaccacaacatggcgaacgaagccttggacgcccacgacaactttgggattgagatcgcgctgcgggagttcagggacttgtttgaggggattcagtccatgacttactgctgcggtacctgtggtgatgacaagtttgccagggccattgtccaggcctacccgcacataaaatgcactgtgctggcacctccaaagatgattgccaacaaaccggctgatggggtgatgataaactatgttgaaggtgacatgttcagtttcatcccacctgctcaaactgtgatgctaaagcttgtgctgcaccactggactgatgaggactgcgtgaacatcctggctgcatgccggaaggcgattccttcacgagaggatggcggaaaagttatcgtcggtgacattgtgattgattactctgggcctatgttggaaactcacctcttaatggacattggcatgatgaccatgacaaaaggacgccaacgggatgaaaatgaatttcgtgagatcttcatgaaagcagggttcagcgactataagattttaaagaaatttggagctcgtgttgccttcgaagtgtatccgtaa

SEQ ID NO: 2408 - protein, 365 aa, Sorghum bicolor
MASQASNVVRPSDAELLQAQADLWRVSLSYLTPMSLRCAVELGIPTAIHRHGGAASAADLITALSLPSTKLPFLRRLLRLLAVAGVFTVDKTTAEDRYCINPVSYLLVDGIPHEVHINHTSLVLTCTSTRYLDAALGLAEWFKKDVVTPPFQELHGAALFHESMESLDPDYHNMANEALDAHDNFGIEIALREFRDLFEGIQSMTYCCGTCGDDKFARAIVQAYPHIKCTVLAPPKMIANKPADGVMINYVEGDMFSFIPPAQTVMLKLVLHHWTDEDCVNILAACRKAIPSREDGGKVIVGDIVIDYSGPMLETHLLMDIGMMTMTKGRQRDENEFREIFMKAGFSDYKILKKFGARVAFEVYP

SEQ ID NO: 2409 - DNA, 1431 bp, Sorghum bicolor
atggcggcggtttcttggagagccgtggtgctggcggtggccgcggtgggctggcttcttgttggcggcggtagcggtggcgcgtgggcgttcccggccgaggatttggtcacgcggctgccgggccagccgccggtcacgttcaggcagttcgccgggtacgtggacgtcgacgtcaaggccggcaggagcctcttctactacttcgccgaggcgcagcaggacgccgccgccaagccgctcacgctctggctcaacggaggtcctggctgttcttcgattggaggcggtgctttcacagagctagggccattctatccgcgaggagatggtcgaggcctcagattgaacaagaaatcatggaacaaagcatccaatcttctgtttgtggaatcaccggctggagttggatggtcttattcaaacacttcatcagactacaacactggagatgtgcagacagctaatgacatgtaccaatttttgttgggatggtatgtgaagtttcctgagtacagatcaagagctttatttcttactggagagagttatgcagggcattatataccacaactcactgatgtacttctcacccataacgagaaatcaaagggtttcaagttcaatattaagggagtcgctatcgggaatccgcttctcaagcttgatagggatgtccctgcaacctacgagtatttctggtctcatggcatgatctctgatgaaatatttctagcgatcagccacagctgtgattttgaggactacaccttcaacgacccccacaatgagagcaagtcatgcaacgatgccattgcagaagcaaacagtatagttggagactatgtgaacaactatgatgttattcttgatgtctgctacccatcaattgtgatgcaagagctacggttgcgacaatatgccacaaaaatcagtattggagtggatgtctgcatgtcctatgaaaggtatttctatttcaatctaccagaggtgcagcaggctctgcatgcgaataggacgcatttgaagtataactggagcatgtgcagcgatatcctgaactacagcaacaccgatggcaacatcaacatcttgcctacacttcaaagaattgttgagcacaagataccactctgggtgttcagcggcgatcaagactctgttgtgcccttgttgggcagccgaacccttgtgcgagagctagctcacaacatggggttacaagtcacagtcccctacagcacttggttccgcagaggccaggttggaggctgggtgacgcagtatggcaactttctgaccttcgccacagtgcgaggtgcatctcacatggtgccatttgcacagccagaccgggctctcaggctatttcagtcaattgtactcgggcaaagactaccaaacacaaccagtccaccaattgagtaa

SEQ ID NO: 2410 - protein, 476 aa, Sorghum bicolor
MAAVSWRAVVLAVAAVGWLLVGGGSGGAWAFPAEDLVTRLPGQPPVTFRQFAGYVDVDVKAGRSLFYYFAEAQQDAAAKPLTLWLNGGPGCSSIGGGAFTELGPFYPRGDGRGLRLNKKSWNKASNLLFVESPAGVGWSYSNTSSDYNTGDVQTANDMYQFLLGWYVKFPEYRSRALFLTGESYAGHYIPQLTDVLLTHNEKSKGFKFNIKGVAIGNPLLKLDRDVPATYEYFWSHGMISDEIFLAISHSCDFEDYTFNDPHNESKSCNDAIAEANSIVGDYVNNYDVILDVCYPSIVMQELRLRQYATKISIGVDVCMSYERYFYFNLPEVQQALHANRTHLKYNWSMCSDILNYSNTDGNINILPTLQRIVEHKIPLWVFSGDQDSVVPLLGSRTLVRELAHNMGLQVTVPYSTWFRRGQVGGWVTQYGNFLTFATVRGASHMVPFAQPDRALRLFQSIVLGQRLPNTTSPPIE

SEQ ID NO: 2411 - DNA, 1131 bp, Sorghum bicolor
atggagttggctgtgctgatcatcggtgccggaccagctggactggcgacggcggcatgcctcagccagcgttccatcccctacctcatcgttgagcgtgaggactgcagcgcgtcgctgtggcgctaccgcacctacaaccgcgtcaagcttcacctgtccaaggagttcagctccctgccgtacatgccgcatccggatggcaccccaacctacattcccaaggaggagtttctgaagtacctggactgctacgcccaacattttgacatcaagcccaggtattgcacttgcgttgtgtcagcagcatacgatgagggaaccagacgctggattgtcgctgcacgtgacacggcagcgggcacagaaatcctgtatgcagcgaagttcctggtcgtggccaccggtgagaatggagaggggaggattccggagatcttgggtctagagagcttccacggggaggctatccactcttcaacctacaagtcaggaagcagctatgctgggaaaagggttctcgtggttggtgctggaaattctgggatggagattgcctatgatctcgcaagccatggcgccgacacctcaattgttgctcgcagtccggtacacataatgaccaaggaactgatccgtctgggaatgacatttatccaatatataccaattacaatagtggatctttttataatgaacatagccgatgtcatatttggtgatctatcaaagtatggcatcgtgcggcctagaattggccccctcctactcaaatccaaaacgggacgatcttgtgtaattgatgttgggacagccgggttgattaagaatggcatcgtcaaggtgttcaaggggatatcgaagatcactggaaacaaagttcaattcgaatgtgggaatggttccgaatttgatgccatcgtgtttgcaacaggttacaaaagcactgcgaatttgtggctcaaggacgacaagtgcatgctgaacagtgacggacatccaaacaaaggttatcccaatatttggaaaggtgaaaatggcctctatttctctggttttgcgaggatgggattggctggtatttccaaggatgcttacaacattgccaatgacgtggcgtctgtctattga

SEQ ID NO: 2412 - protein, 376 aa, Sorghum bicolor
MELAVLIIGAGPAGLATAACLSQRSIPYLIVEREDCSASLWRYRTYNRVKLHLSKEFSSLPYMPHPDGTPTYIPKEEFLKYLDCYAQHFDIKPRYCTCVVSAAYDEGTRRWIVAARDTAAGTEILYAAKFLVVATGENGEGRIPEILGLESFHGEAIHSSTYKSGSSYAGKRVLVVGAGNSGMEIAYDLASHGADTSIVARSPVHIMTKELIRLGMTFIQYIPITIVDLFIMNIADVIFGDLSKYGIVRPRIGPLLLKSKTGRSCVIDVGTAGLIKNGIVKVFKGISKITGNKVQFECGNGSEFDAIVFATGYKSTANLWLKDDKCMLNSDGHPNKGYPNIWKGENGLYFSGFARMGLAGISKDAYNIANDVASVY

SEQ ID NO: 2413 - DNA, 519 bp, Sorghum bicolor
atggcggcggccggcggcgagagcatgatgacgagggagcagctgctccacctcttctcccgcttctccttccttatctccctccccgaggtcaagcagcggattgccgacgccgtcagggacaagcaggaggccgtggccgtgaccactgaaatacaagaggagattcttcacgagatgggagtagatccaagttttggcattggttgcctaggaaaggtcaatgttgtttacgaaaatgacaaggacttgatgattaaattctatcaatttgttgccaaagaagaaatggctattgatgaagctgagcttgaacccagagaattggctgccaaactacatgctcaacaaataatacaagaacagcaactgaacatgctagttgaaatgaggaaatatagcccagagagccaatctgtcatacttgggactttgcacagagaattggaagaagctaattttgacatcaatacatcgatcttgagtccagagcaaatccaagagattgttcaaaagtga

SEQ ID NO: 2414 - protein, 172 aa, Sorghum bicolor
MAAAGGESMMTREQLLHLFSRFSFLISLPEVKQRIADAVRDKQEAVAVTTEIQEEILHEMGVDPSFGIGCLGKVNVVYENDKDLMIKFYQFVAKEEMAIDEAELEPRELAAKLHAQQIIQEQQLNMLVEMRKYSPESQSVILGTLHRELEEANFDINTSILSPEQIQEIVQK

SEQ ID NO: 2415 - DNA, 453 bp, Sorghum bicolor
atgggcaagctctggacgatcctcactcacctccactcccttgcagggccaacggtgatgctcttgtaccccttgtacgcgtcggtgcaagcgatggagagcccgtccaagctagacgacgagcagtggctggcctactggatcctctactccttcatcacgctcatggagatggtcctcgagtccctcatctactggatcccgatttggtacgagctgaagctgctgttcatcgcgtggctggcgctccccaacttcaggggcgccgcgttcatctacgacaagttcgtgcgggagcagctccggaagcacggcctcaccaccgccgccggctccggcagcaagaaggacgacggcaagtcttcgtcgtcgccgtcgtccaaggataaggacaagcccaagagcaagttcctcgctttcgtcacacccaagaaggatcatgaagcttactga

SEQ ID NO: 2416 - protein, 150 aa, Sorghum bicolor
MGKLWTILTHLHSLAGPTVMLLYPLYASVQAMESPSKLDDEQWLAYWILYSFITLMEMVLESLIYWIPIWYELKLLFIAWLALPNFRGAAFIYDKFVREQLRKHGLTTAAGSGSKKDDGKSSSSPSSKDKDKPKSKFLAFVTPKKDHEAY

SEQ ID NO: 2417 - DNA, 390 bp, Sorghum bicolor
atggccacttgccaccagcttcagccgatcctcactattgtggtcttcaccatctttgtgataggagcaaatggcgagcgatgcaacacgtcaagcatccaggtggacaccatcaacaccggcacgatagtgcccggcggcgacaccatcttcgtggtggaggtgaagaaccagtgtccatgcgccgtcaggaacgtgcgcctcgacggcatgggcttcgcgaccacagtggacgtggatccggcggcgttccgcgccgacgacggtggcgtctacctggtgaacggcggccagccaatcgccagtatggccaccgtcagcttccagtatgcctgggaccatttcttccagatgcctccaaggagcttggaggtcgacggcccgtgctag

SEQ ID NO: 2418 - protein, 129 aa, Sorghum bicolor
MATCHQLQPILTIVVFTIFVIGANGERCNTSSIQVDTINTGTIVPGGDTIFVVEVKNQCPCAVRNVRLDGMGFATTVDVDPAAFRADDGGVYLVNGGQPIASMATVSFQYAWDHFFQMPPRSLEVDGPC

SEQ ID NO: 2419 - DNA, 945 bp, Sorghum bicolor
atgtcaatggcggccgccgccgccgccgcggcatcatccacgctgctgcgggcaagcaacatctctgtcgcgcgccccgtcccagtcgccgccggtcagcagctggtcccaagcggcgttgcctgctgcatccgcaccgtgagtgggcgcagagctgcggccgtgcgcgcggcagcggcaggcgatgggaccgccccggccggtgcccttccggcggcgctgttgttcgattgcgacggtgtgctggtggacaccgagaaggacggccaccgcatctccttcaacgaaaccttcgccgagaaggaattaggtgtgagctgggatgttgaactgtatggagaattgctcaagataggcggtggaaaggaaaggatgacagcttacttcaaccagacaggatggccagctaaagcaccaaagactgatgagcaaagaaaggagttcattgcttctcttcacaagaggaaaacagaactattcatggccctaattgagaaaaagttgcttcctctgcgtccaggtgttcaaaggttaattgatgaggctttaggaaaggcagttaaagttgcagtgtgcagtacatcaaatgagaaagctgtttcagcaatagtgtcatacttattggggcctgatagagctgaaaggattaccatatttgctggagatgtggttcctcgcaaaaaacctgacccagcaatctacatattagcagcaactacacttggagttgatccacaaagctgtgttgttgttgaagacagtactatagggcttgcagcggcaaaagctgccggcatgaagtgtatcgtaacaaaaagcggctacactgcagaagaggactttgagacagcggacgctgtgttcgattgcattggtgatccaccagaagtgcgcttcgatttggatttctgtgccaacttgctccagaaacaatatgtaagctga

SEQ ID NO: 2420 - protein, 314 aa, Sorghum bicolor
MSMAAAAAAAASSTLLRASNISVARPVPVAAGQQLVPSGVACCIRTVSGRRAAAVRAAAAGDGTAPAGALPAALLFDCDGVLVDTEKDGHRISFNETFAEKELGVSWDVELYGELLKIGGGKERMTAYFNQTGWPAKAPKTDEQRKEFIASLHKRKTELFMALIEKKLLPLRPGVQRLIDEALGKAVKVAVCSTSNEKAVSAIVSYLLGPDRAERITIFAGDVVPRKKPDPAIYILAATTLGVDPQSCVVVEDSTIGLAAAKAAGMKCIVTKSGYTAEEDFETADAVFDCIGDPPEVRFDLDFCANLLQKQYVS

SEQ ID NO: 2421 - DNA, 1242 bp, Sorghum bicolor
atgtcgcaagcacaatcagaagcggatctgatgtgtgcgagccatggccatggggagcccaattcgtctgagctccagtcgttccccatattctcggcggccacctgttgggagcaacagcagtttccttcgctgccttggttgcaaaattcagggatacctaggctgcggcatggagttcttcctcccaatgcttcatctgctgcatcagcccccttgtctgacatgtattccggcgccatggattcagaaagatcttttactgacataattacaaggggatgtaatcctgctgccttgtctgaaaatgtcccagctcctaatgaaatgccagcatgtgttgaggtcccagcaagtgtgaaagcaaatccgaaaagatccaaaaatttcagtaaagaggaggacaaattgttggtctcagcatggctaaatgtgagtttggatccagtgcatggagttgatcaatcacgttcgacttattggaaaagaatatatgaattttttcataccaacaagacatttgagtctgatcgaactcaaagctccctaatgagccgatggtcaggtattcaacatgattgcaactcatatgctggttgtgtttcaaagatagagactagaaatcagagtggcgtatctattgctgataaggaaaaaaatgcattaagaatattcaagtccgaggacaagcatcatcgagatttcccgtacatccattgctgggaaaaattgaaagaccaggccaaatggaagaataggaacaatcagagtggaacggctgcaagaaaaaagcaaaagacgacggcgaattcaagtcctgcagtggctgcacaattagctctcactactaatggtgaagatagtcaggctgcaatgcctacagtgcatagacctgcagggaagaagaaggagatcgacaaattacgacagcgttccagcatcgaagcattggattatctattggcaaagaagaaagaggctgatatagagaaggatttgaagaaagaggagaggtgcaaaaaagccttcgcattgcaggaagaaaggatcagaatcgattcagaaaggatcagaatcgaggaagaaaggatcagacttgagaaagccaaatttgagtttgagaggaacctcgaagaaaagagaattatcaatgtcgatacaagtaccatgtccaataaacaacagctattatatgaagacctcaagaatgacatacttgcacggcgtactatcaaaaattag

SEQ ID NO: 2422 - protein, 413 aa, Sorghum bicolor
MSQAQSEADLMCASHGHGEPNSSELQSFPIFSAATCWEQQQFPSLPWLQNSGIPRLRHGVLPPNASSAASAPLSDMYSGAMDSERSFTDIITRGCNPAALSENVPAPNEMPACVEVPASVKANPKRSKNFSKEEDKLLVSAWLNVSLDPVHGVDQSRSTYWKRIYEFFHTNKTFESDRTQSSLMSRWSGIQHDCNSYAGCVSKIETRNQSGVSIADKEKNALRIFKSEDKHHRDFPYIHCWEKLKDQAKWKNRNNQSGTAARKKQKTTANSSPAVAAQLALTTNGEDSQAAMPTVHRPAGKKKEIDKLRQRSSIEALDYLLAKKKEADIEKDLKKEERCKKAFALQEERIRIDSERIRIEEERIRLEKAKFEFERNLEEKRIINVDTSTMSNKQQLLYEDLKNDILARRTIKN

SEQ ID NO: 2423 - DNA, 1590 bp, Sorghum bicolor
atggatgcgacaaccacacctctagcaccatggcaatggctactcttgctcgtcgtcgcttgcgtgctgctgctgctcacctcctcccgccgtcgtcccctccgccgcagcagcaacgacaaggccaggcggcagctcccgccgtcccctccgggggcgcttcccatcatcggccacctgctcctcgtcggcgaccgcccgcacgtctccttccgtgacctcgccgccaagcacgacgaccgcgggctcatgctcgtccgcctcggcaccgtcccgaacctcgtggtgtcctctgcgcgcgcggcggaggcgatcctgcggacgcacgaccacgtcttcgcctcgcggccggcgtccgcgctcttcgacgacctcgtgtacgggtcctccaacgtcgccttcgccccctacggcgagcactggcggcaggtcaggaagctcgtcaccgcccacctgctcaccgtcaagaaggtcaactcctaccaccatgcccgccaggaagaggtgtgtctagtgctggataagctccgggaagcagcgaccatggacgcggaggtggatctcagtgagatgatgaacgcgttcgccaacgacatcatctgccgtgctgtgtgtggcaagttctccagggaagaaggccggaacaggctcttccgcgagctgaatcacaccaccactcttctggtggcaggattcgatttggaaagctacttcccagggcttgcgagatcgctaggtcgtttgttcgtgagcaacaggaaggtgcagcaggcacacagaagatgggacgacttgcttgaggagatcataagcgaccacgagaggcggcggcgaacctccaagaacggacatggtgagagcggcgatgatgagcaagatcagagcacagcagacttcactgatgtgatgctctctgttcagcgggagtacggtatcaccagagatcacatcaaggccatcttgatggacatgttcgaggcaggcacggccacatcatcttcggtcttggaagccgccatggcggagctgatgcgcagccctcatctcatggccaagctacaagccgaggtgaggaagaagacaccaatgggacaagaaatggtcagggaagaggacctatccggcatgccctatctgagagccgtggtaaaggagacgctaagggtacacccacctgtcccgctcctcgtgcctcaccaatccatggcggactgcgacgtcgacggctacacgatccctgccggaacgagggtcatcatcaacgcgtgggctatctctagagacccaaggtcatgggggaagccggaggagtttgtgccggagagattcatggacggcggtgccgccgcggacgtggatttcaggggaaatgacttccagttcacgccgttcggggccggccggaggatgtgccctggtatcaactttgggttggctacgatctacatcatgttggccaacctcgtgtattgttttgattggaagctgccggccggcgtggagaaggaggatattgatatgatggaggtgtttggattgacggtccaccggaaagacaagctcgttcttgtccccagaccacatgtataa

SEQ ID NO: 2424 - protein, 529 aa, Sorghum bicolor
MDATTTPLAPWQWLLLLVVACVLLLLTSSRRRPLRRSSNDKARRQLPPSPPGALPIIGHLLLVGDRPHVSFRDLAAKHDDRGLMLVRLGTVPNLVVSSARAAEAILRTHDHVFASRPASALFDDLVYGSSNVAFAPYGEHWRQVRKLVTAHLLTVKKVNSYHHARQEEVCLVLDKLREAATMDAEVDLSEMMNAFANDIICRAVCGKFSREEGRNRLFRELNHTTTLLVAGFDLESYFPGLARSLGRLFVSNRKVQQAHRRWDDLLEEIISDHERRRRTSKNGHGESGDDEQDQSTADFTDVMLSVQREYGITRDHIKAILMDMFEAGTATSSSVLEAAMAELMRSPHLMAKLQAEVRKKTPMGQEMVREEDLSGMPYLRAVVKETLRVHPPVPLLVPHQSMADCDVDGYTIPAGTRVIINAWAISRDPRSWGKPEEFVPERFMDGGAAADVDFRGNDFQFTPFGAGRRMCPGINFGLATIYIMLANLVYCFDWKLPAGVEKEDIDMMEVFGLTVHRKDKLVLVPRPHV

SEQ ID NO: 2425 - DNA, 672 bp, Sorghum bicolor
atgaagatcttcactcacttgtgttcctacattcttcttctagtagtcttcaatgttccaaaaggcctatcagataatcctcctctgcaggatgtatgccccatggctccccagggtgagcggaagctgttcatgaatggtttcctctgcaagcatcccagcaccatcctggcctctgacttcaagacactgctgctgaaccatgccggagacctggacaacatagtccggtcatcggtgaacgtggtcactgctaccgagttcccaggcctgaacaccctgggcctgtcgatggcgcgcaccgacatcgcccccaatggggtagtgctcccccattctcacccgagggcgtcggagatgatgttcgtccatggtggcagtgtggtggtcggcttcttggataccaagggcaggctgttccagaagagccttggcgagggggaggtgttcgtcttcccccgtggcttggttcactacatcatgaactatggttttagccatgcgacaacgttttcggtgctgaacagtcagaaccctggcgtggttggcattgtccatgcaatgtttgcaacagattcagatgtagttgaggggctaatggccagaatgtttaagtttggagagatgggagtgagtgataacattactgctgatttcccatgggcgctctga

SEQ ID NO: 2426 - protein, 223 aa, Sorghum bicolor
MKIFTHLCSYILLLVVFNVPKGLSDNPPLQDVCPMAPQGERKLFMNGFLCKHPSTILASDFKTLLLNHAGDLDNIVRSSVNVVTATEFPGLNTLGLSMARTDIAPNGVVLPHSHPRASEMMFVHGGSVVVGFLDTKGRLFQKSLGEGEVFVFPRGLVHYIMNYGFSHATTFSVLNSQNPGVVGIVHAMFATDSDVVEGLMARMFKFGEMGVSDNITADFPWAL

SEQ ID NO: 2427 - DNA, 1389 bp, Sorghum bicolor
atggcggccgccggcgagagcggcgtcagaagggcatgggtggtggacgtggagaagacgctggacgaagcggacgcgtcggtggaggtgtcgcggtggcagcgccactccatctaccgcgtgccggcgtgcatcaaggacctgaaccgcaaggcgtacaagccgcaggtggtgtcgctgggccccttccaccaccaccgccaacgccgcgacgacggggagctcctgcccatggaggagcacaagcagcgcgcgctgcggcacctgctccggcgcgccaagcggccgctggacgagttcgcggccgccgtggagggcgtcgcggagcagctgcagagcgcgtacctcgacctcggcgacgagtggcgcggcgccgacgggagggagcggttcctcgagatgatgatcgtcgacggctgcttcctgctggaggtgatgaaggccgccgaggaggacggcaggagtagcgtcagcgactacgcgcacaacgaccccatcttcagccaccatggcgtgctctacatggtgccctacatccgccgcgacatgctcatgctcgagaaccagctgccgttgctcctgcttgagaagctcgtcgccgtcgagaccggcaagcctccgagcgccgacgtgatcaacaggatggtgctgaggttcatgtcggggtcgccgtcggccaggctgccgccggggagcactctggggctccacccgctggacgtgcggcgacggagcatgctctacggcccgaagcagccgccacaggaggtgtccagggacatcgcgccggagacgacggacatcatgaggtcggcggtggagctgtacgaggccgggatccggttcaagaagaccagctccgacagcctccacaacatccgtttccgcggcggcgtgctgagcatgccggcggtgtcggtggacgactccaccgagtacatgttcatgaacctgatggcgttcgagcggctgcacgtcggcgccggcaacgacgtgacggcgtacgtcttcttcatggacaacatcatcgactccgccaaggacgtcgcgctgctgagcaccagcggcatcatccagaacgccgtcggcagcgacaaggcggtggcgcagctgttcaacagcatctccaaggacgtcgtcctcgagccgcagagctcgctggacgccgtgcagcgggaggtgaacgcctactgcggcaagccgtggaacctgtggcgcgccaacctgatccacacctacttccggagcccctgggcgttcatgtcgctcgccgccgccgtcttcctcctcgccatgaccatcatgcagacggtctacaccgtgctgccgttctaccagcaggaccaagctggcagcagcagctcgccggcggcaccggctccattgtga

SEQ ID NO: 2428 - protein, 462 aa, Sorghum bicolor
MAAAGESGVRRAWVVDVEKTLDEADASVEVSRWQRHSIYRVPACIKDLNRKAYKPQVVSLGPFHHHRQRRDDGELLPMEEHKQRALRHLLRRAKRPLDEFAAAVEGVAEQLQSAYLDLGDEWRGADGRERFLEMMIVDGCFLLEVMKAAEEDGRSSVSDYAHNDPIFSHHGVLYMVPYIRRDMLMLENQLPLLLLEKLVAVETGKPPSADVINRMVLRFMSGSPSARLPPGSTLGLHPLDVRRRSMLYGPKQPPQEVSRDIAPETTDIMRSAVELYEAGIRFKKTSSDSLHNIRFRGGVLSMPAVSVDDSTEYMFMNLMAFERLHVGAGNDVTAYVFFMDNIIDSAKDVALLSTSGIIQNAVGSDKAVAQLFNSISKDVVLEPQSSLDAVQREVNAYCGKPWNLWRANLIHTYFRSPWAFMSLAAAVFLLAMTIMQTVYTVLPFYQQDQAGSSSSPAAPAPL

SEQ ID NO: 2429 - DNA, 504 bp, Sorghum bicolor
atggacggaagaagaagggagctcgccgtcggccgtcatcccctgcaacggcggtgtagtcgtcgtcgtcttcttgctcctcttctcatcctgctgctcgccgtcgccagcagccagtcacccaccgccgccggcagcatcttcggtggcggcgacgacgactcggattgcagccgagagtgcgagtcccagcactgcacggcgccgctgatgcgctacggcaagtactgcggcgtgtcctacacggggtgccccggcgaggtcccctgcgacgccatcgacgcctgctgcatgctccacgacgcctgcgtccaggccaccgacaacgactacctcaacttgctgtgcaaccagagcctgctggactgcgtggcggcggcgaggccggcggcggcggcggccacgttccaggggaaccggtgcaacgtcacggacgtcgccgacgagatcaccaccgtcgtggaggccgccgtgtacgccaggggcatcctgcacaagccctag

SEQ ID NO: 2430 - protein, 167 aa, Sorghum bicolor
MDGRRRELAVGRHPLQRRCSRRRLLAPLLILLLAVASSQSPTAAGSIFGGGDDDSDCSRECESQHCTAPLMRYGKYCGVSYTGCPGEVPCDAIDACCMLHDACVQATDNDYLNLLCNQSLLDCVAAARPAAAAATFQGNRCNVTDVADEITTVVEAAVYARGILHKP

SEQ ID NO: 2431 - DNA, 1020 bp, Sorghum bicolor
atggttcctgccgcgccccggctgctcgccggcattgtcgccgcggcggcggcgctgctgttgctgctagttgcgccgtcggcggcagagctgacgcgggtggagcacccgcccaagaccgagggctccctcgccatccttgccgttggcgactgggggcgcaaggggcagttcaaccagaccctggtggcccagcagatgggagtggtgggggagaagctggacattgacttcgtcatctccacgggcgacaacatctacgacgacggcattgccaacaccagcgacccgctcttcaaggagtgcttcaccaacatctacaccgcccagagcctccagacgccgtggtacattgtactcggtaaccatgactacacgggcaatgcgctggcgcagcaagatcccgccatccgcgaagtggacagccggtacctcaaccttgccaagtccttcatcgtcaactcaggaatcgcggacttcttcctcgttgacacgtcaccgttttacctcaagtactggaacagcagcaagtacgattggagaaacgtttctcctcgcgacacctatatcgaaaacctcctcaaggatctggatgatgcccttgtccaatccgaggctccatggaagattgtggttggtcaccaccccatcagcagcggctgcgagcatggcaacaccactgagctccaggagttgctccgaccaattcttgaggcacgcggggttgacatgtacgtgaacggccatgaccactgcttgcagcacatcagcagcagaaacagtccagttcagttcatgacaagcggcggtgggtccaaggcatgggctggcaagttcaagaccacatctgacaagatagagttcatctacgacggccagggattcatgtcgatgaagttgagcaacacggaggcgcacctagtcttctacgacgtcgctggcaatgtcctccacacctatgacagcaccaagagcgaagaagaagaagaagaggaagaagaagaagaagatgttgactaa

SEQ ID NO: 2432 - protein, 339 aa, Sorghum bicolor
MVPAAPRLLAGIVAAAAALLLLLVAPSAAELTRVEHPPKTEGSLAILAVGDWGRKGQFNQTLVAQQMGVVGEKLDIDFVISTGDNIYDDGIANTSDPLFKECFTNIYTAQSLQTPWYIVLGNHDYTGNALAQQDPAIREVDSRYLNLAKSFIVNSGIADFFLVDTSPFYLKYWNSSKYDWRNVSPRDTYIENLLKDLDDALVQSEAPWKIVVGHHPISSGCEHGNTTELQELLRPILEARGVDMYVNGHDHCLQHISSRNSPVQFMTSGGGSKAWAGKFKTTSDKIEFIYDGQGFMSMKLSNTEAHLVFYDVAGNVLHTYDSTKSEEEEEEEEEEEDVD

SEQ ID NO: 2433 - DNA, 2052 bp, Sorghum bicolor
atggattcaaacattcagttcatgactaggatgagtttcaccgaagatgagattgaagcaattactaacaactatggcacacttatcgggatgggaggatttggagaagtctataaaggggtccttgatgatcactactatgtagttgcagtgaagagatatatccgtgaaaatttgaggaaagagtttatggaagaagtaagcatccatagtcaaatgagccacaagaatgtggtgaagttcataggctgttgtgtgggtaaaagtactctaacattggtaactgagtatgtacctaagggaaacctcgacgacatactgcacagtagcagtgctgcaattcccttggatataagattgggtattgctatagggtgtgcggatgcattgagctatatgcactctatgcatttatcaattgatagccttatttgtcatggtgatattaagccggccaacatacttctagatgacaattttacagccaaagtatctgattttgggttgtcaaggcttcttttgggtggaatcactcaatatgctagcaaggtaataggaagtatagattacatggatcctgtattgatgcatacaggacgacttactccgaggaatgatgtttatagctttggaatagttctcctggaattagtaactcggaaaagagtaaaacaaggtgatatgaatctcattggaatttttgaatgtgcaaagggggaagggttgaggaaactatttgatccatcaatagcaaacaagaatactattaagattcttgaagaaattgtggatctagcaatggcgtgcctgagacttgacattaaaaatcgccctgaaatgaatcatgtggaaaaacgtcttcgggtgcttaaaagagatctgaagtgcagacaagaagcttcttcgcaatccattttgtcaacataccattcatggcacacaaaagacaagcaagagaaaccacagcttaagaagagtggtagctttttcaaaagaaatgctagcaatgctaagattgtatcagaattcagcaatgtaagaaatttcacaaaggcggagttaaaggaaatcacagataattactcacatatgctcagtggaggtatgtcagctaagttttataaaggaacacttgaggacaacacggtggtggcggtccggaaatttcatgacacagactctcaagaggcattcatcaacggagggattgtcctttctcaaattgccaacaagaataatattatcaagcttttgggttgttgcttggaagccgaaactctagcttttatatatgagtatgctgataaaggtagtttactggacattctgggtagccaagaatatctcccactagatctacgtctgaggattgcaattaagactgcagaagcattacaatacctacattcatcagaaactggtataattggacatggtagtgtttcagcatccactgtacttctccataataactttgtaccaaagctcacagaattttcagggtcttctaagcttatcatggacagtggaagtaatgctggtcagagtgtaattaatagcgttcttcttgaaaaggtgctttacagtgacccatctcgttataagactgtattgatgaatctggaaagcgatgtattcaggtttggcggtgttttattggcactcgttagtagggaaaacagtgttagttttgatgagcttattgtcgaatttaccgaggcttaccaaaaggataacagtgggaaggcaatgtttgataaggatataacagctgaacaagatattgctgctcttgaagagatggggaggttggcactgaggtgtactattttgaatgcagacgagatggccaggaggccgacaatgcaggaagtggcggaagaactacgcaggattaggagatgttgcaagccgggcacgagcgcagctccacatgtaactgaaactacggctacagctgcagcgccattggagccaaagctaccaaacctgatgcgtcacttgtttggatatcgacgaatctccagcactgatcctatacgtacaagctaa

SEQ ID NO: 2434 - protein, 683 aa, Sorghum bicolor
MDSNIQFMTRMSFTEDEIEAITNNYGTLIGMGGFGEVYKGVLDDHYYVVAVKRYIRENLRKEFMEEVSIHSQMSHKNVVKFIGCCVGKSTLTLVTEYVPKGNLDDILHSSSAAIPLDIRLGIAIGCADALSYMHSMHLSIDSLICHGDIKPANILLDDNFTAKVSDFGLSRLLLGGITQYASKVIGSIDYMDPVLMHTGRLTPRNDVYSFGIVLLELVTRKRVKQGDMNLIGIFECAKGEGLRKLFDPSIANKNTIKILEEIVDLAMACLRLDIKNRPEMNHVEKRLRVLKRDLKCRQEASSQSILSTYHSWHTKDKQEKPQLKKSGSFFKRNASNAKIVSEFSNVRNFTKAELKEITDNYSHMLSGGMSAKFYKGTLEDNTVVAVRKFHDTDSQEAFINGGIVLSQIANKNNIIKLLGCCLEAETLAFIYEYADKGSLLDILGSQEYLPLDLRLRIAIKTAEALQYLHSSETGIIGHGSVSASTVLLHNNFVPKLTEFSGSSKLIMDSGSNAGQSVINSVLLEKVLYSDPSRYKTVLMNLESDVFRFGGVLLALVSRENSVSFDELIVEFTEAYQKDNSGKAMFDKDITAEQDIAALEEMGRLALRCTILNADEMARRPTMQEVAEELRRIRRCCKPGTSAAPHVTETTATAAAPLEPKLPNLMRHLFGYRRISSTDPIRTS

SEQ ID NO: 2435 - DNA, 1293 bp, Sorghum bicolor
atgcagcaagtcctaacattactcttattacttgcctcactgtgctgttcggcggcggcaccaccatcaggctaccgctctatgctcacccatattgactctcatggcggcttcaccaaggcagaactcatgcgccgagccgcacacagaagccgccaccgagcgtccacgatgctgctgcattattccactttgtctactagctcggaccccggccctgccaggcttcgctccggccaagccgagtacctcatggagctcgccattgggacaccgccggtgccgttcattgccctggctgacaccggcagcgacctcacctggacccaatgcaagccgtgcaagctctgcttcggtcaagacacgcccatctacgacaccacaacctcgtcaagcttctcccccttgccgtgctccagcgccacgtgcctgcccatctggagcagccggtgcagcacccctagcgcaacatgcaggtaccgctacgcctacgacgacggcgcctactcccctgaatgcgccgggatctccgtgggcggcatcgcgttcggctgcggcgtcgacaatggcggcctctcgtacaactccaccggcaccgtcggcctgggccgtgggagcctgtccctcgtggcgcagcttggcgtcggcaagttctcctactgcctcactgacttcttcaataccagtctgagcagcccagtgttcttcggctctctcgccgagctggcggcatcatcagcaagcgccgatgctgccgtcgttcagtcgacgccgcttgtgcagagcccgtacaacccgtcgaggtactatgtctcgctggagggtatatcgctcggtgacgctcggcttccgatcccgaatggcaccttcgacctgaacgacgacgacggctctgggggcatgatcgtggactccggcaccatcttcacgatcctcgtggaaactggtttcagggttgtggtcgaccacgtggccggcgtgctcgggcagccggtggtgaacgcctccagccttgacaggccatgctttccggctccagccgcaggtgtgcaggagctcccggacatgccggacatggtgctgcacttcgctggcggtgcagatatgaggctgcatagggacaactacatgtcttttaacgaagaggagtcgtcgttctgcttgaacattgttgggacggagtcagcttctggttccgttttaggcaatttccagcagcagaatatacagatgctgtttgacatcaccgtagggcagttgtcattcatgcccaccgactgtagtaagctctga

SEQ ID NO: 2436 - protein, 430 aa, Sorghum bicolor
MQQVLTLLLLLASLCCSAAAPPSGYRSMLTHIDSHGGFTKAELMRRAAHRSRHRASTMLLHYSTLSTSSDPGPARLRSGQAEYLMELAIGTPPVPFIALADTGSDLTWTQCKPCKLCFGQDTPIYDTTTSSSFSPLPCSSATCLPIWSSRCSTPSATCRYRYAYDDGAYSPECAGISVGGIAFGCGVDNGGLSYNSTGTVGLGRGSLSLVAQLGVGKFSYCLTDFFNTSLSSPVFFGSLAELAASSASADAAVVQSTPLVQSPYNPSRYYVSLEGISLGDARLPIPNGTFDLNDDDGSGGMIVDSGTIFTILVETGFRVVVDHVAGVLGQPVVNASSLDRPCFPAPAAGVQELPDMPDMVLHFAGGADMRLHRDNYMSFNEEESSFCLNIVGTESASGSVLGNFQQQNIQMLFDITVGQLSFMPTDCSKL

SEQ ID NO: 2437 - DNA, 3225 bp, Sorghum bicolor
atggcgcctggagcttccgagggggagcagcagcaggcgagagatgtcacggcgcatcaaggttattccgacgacggggcggcggcggtggcggccatgatcgaggaggcattaagcaagctgcaggcgcttcgtgagaggatctccctgttggggcctgctggccctcatcgcgtcgtcgtctcctctagtgaccctggacggcgctgcgtggccttcatggagacagagctgagcatcgtcatggcgttcttgaagacgctgagtccgcagcatttggacgatgccgagaccaagcaatggctgggagcctatttgtcccatttgttccctgttctcctccattgggtcgacctcgtcctcgtcctcagtgaagtcgacccctcacgtcacacactgctcccaagagcttcacagtgcttcctccattgtcgtaggaactcatactcacattggcttcctcttgacaccataatgctttactatttcatcgaacatcgatccaggcattggcatcttctccacactacgagctctggccttgggcttattacatcccaactggacgaggcaggtgccctccttcctcttgtcggcatcaatcgcccggcgaagaagatcttcaggtggctcgccgcacatcaggggaagatggacatgaacacgagagtcatgtctatcgttggacctgtggggattggcaagacaactcttgctgttgagctcctcaatcgactcatcaggcacgaaactagcagtggaggacgctaccatttccaatgcaatgttatggctcaagcgtcacgggggactagtgatagaaacattcgtcttcttcgagatatcctctcgcaagtttcaccagcagcagcaacagcactgtcatcttacccgtcagatgccaagacaatggaggtcctagtctgtcttgtttcagaatgcttgcgagataagaggtactttgtcattatcgatgatatatggaaagcatcagactgggaagaaatcaagggcgcatttcctaataataatcgtggtagccgaatattgattacaacacgcagtacacgcacagcatgggcatgttgctccgattcttattatggcctcgtgcatgagatgaaacctctaagtgaaacggattcagaaaggctgcttctagcaaaagccgtgggttcagtggatggttgcgtgccaaataatatcaagctacattgtgatgaaatattgaggagatgtgatggtataccattgtttataattggtatggcagactggctgaaggaacaaggactgcagcagctgcaccaaccaaaagatgagcatcaaggatttgcaacgcattacgaggaacaagtcccgcggctgcctgaacggttagaacaagcactgtcctctgcttttagtgacttccctaatgatgatgactcgagattaccattattgtacatgagcatgtttccttatgggtacaaatttgaaaaggatcgtctcatcttgacatggggctttactgaatgtgttcctctttccctgggttttagtaatgctatgttaaaagcagagctgttcttctcccggctagtggataggaatgtcatcacctgtgtagcgtcaaactgcaagcacaagcaagatgaagccgaggcctgccagtggcaaatcaatcattttatgcaccaattcctggcctccaaatctgcagagatgggtttcgttttcaccactactacgctcaacttactggccgcatcagcatcagcagcagcagcaacaacaacagagtgtggcaaccaaactagcagcaggatgccacggaggttagccctgcaccatccagatcccctgctcccatccctgcttgaaactatggatttgtcccagactcgttcactagctgtttctgggacagtctgcagaatcccagtggacaagtttgtcaatttggtggttctggatcttgaaggctgggaaaatctcaaggatgaggacctactgcaggtatgcacaagcaaaatgttctttttgtgctatttgagcgtcaggaatactcaagtccacaagctcccatacgagatcaaggagctgcggagtctggaggcattggatgtaagttacacacagataacagagctcccacttgaagtgttcgagctaatttttttgaggcacctagacctaagaggcacacggataagacagctgccaaagcaaattgtgggccgatggaatatatctcatcttctcgttggtggcgaaggagtgattcattccatcgaaaaggcagcaagggtgccaaacaatgtgcggcgtctcagcatgctagagacactagctactgttgatctgaccagccaccctgcaagcttcgtcatggctctcggtgatctacgaaggttgaccgtgcttgcagttacatggtcctttcaccagtccactgacagagactactgtgaagcgttactgtcatgcatcaaaaagttggaacggctcgagtccctgaccattcactgtggactcggctgctccatggagttcctgggctcccttgaaaagtctcgtgcacctcgggagcttaagatgttcaaggtgacagccggaagattcgcaagtgttccaccatggatccaagggctctggttatctttcgtgcaaatcaccgtctctaacaagcaaacaacgacggatgacctgaagatacttggagaattgtccgtattgcaatgcctaatactaggcttggacttcatccctggacaagccatagtgattgaaagtggaggattcagtgagcttcagagattcttggtgtactgcccaataccatggctcagttttagcaaaggagctatgtggaagctgacatacctccaactgaagttctgttcgaccccagcgagccagatctgtgttccttcaggtatcagcaacctcagaaggctgacagaggtcgccctctgctacaacgaaaaatacatcaacagccccagcatcaagatgacagtggaggcagtgactaaacaagttgccgagcatcgcaacccgatcgaccttttcatcaatggcattgaacaagatgatgttcaagaagctgacgatgaagtcacagagattacaattgggacttcaagcagtaccaatgctggagctgaagatgatgctcaaccagttggtgaggaggctacggcagtggttcaatgtgagattactgaagctgaaagttga

SEQ ID NO: 2438 - protein, 1074 aa, Sorghum bicolor
MAPGASEGEQQQARDVTAHQGYSDDGAAAVAAMIEEALSKLQALRERISLLGPAGPHRVVVSSSDPGRRCVAFMETELSIVMAFLKTLSPQHLDDAETKQWLGAYLSHLFPVLLHWVDLVLVLSEVDPSRHTLLPRASQCFLHCRRNSYSHWLPLDTIMLYYFIEHRSRHWHLLHTTSSGLGLITSQLDEAGALLPLVGINRPAKKIFRWLAAHQGKMDMNTRVMSIVGPVGIGKTTLAVELLNRLIRHETSSGGRYHFQCNVMAQASRGTSDRNIRLLRDILSQVSPAAATALSSYPSDAKTMEVLVCLVSECLRDKRYFVIIDDIWKASDWEEIKGAFPNNNRGSRILITTRSTRTAWACCSDSYYGLVHEMKPLSETDSERLLLAKAVGSVDGCVPNNIKLHCDEILRRCDGIPLFIIGMADWLKEQGLQQLHQPKDEHQGFATHYEEQVPRLPERLEQALSSAFSDFPNDDDSRLPLLYMSMFPYGYKFEKDRLILTWGFTECVPLSLGFSNAMLKAELFFSRLVDRNVITCVASNCKHKQDEAEACQWQINHFMHQFLASKSAEMGFVFTTTTLNLLAASASAAAATTTECGNQTSSRMPRRLALHHPDPLLPSLLETMDLSQTRSLAVSGTVCRIPVDKFVNLVVLDLEGWENLKDEDLLQVCTSKMFFLCYLSVRNTQVHKLPYEIKELRSLEALDVSYTQITELPLEVFELIFLRHLDLRGTRIRQLPKQIVGRWNISHLLVGGEGVIHSIEKAARVPNNVRRLSMLETLATVDLTSHPASFVMALGDLRRLTVLAVTWSFHQSTDRDYCEALLSCIKKLERLESLTIHCGLGCSMEFLGSLEKSRAPRELKMFKVTAGRFASVPPWIQGLWLSFVQITVSNKQTTTDDLKILGELSVLQCLILGLDFIPGQAIVIESGGFSELQRFLVYCPIPWLSFSKGAMWKLTYLQLKFCSTPASQICVPSGISNLRRLTEVALCYNEKYINSPSIKMTVEAVTKQVAEHRNPIDLFINGIEQDDVQEADDEVTEITIGTSSSTNAGAEDDAQPVGEEATAVVQCEITEAES

SEQ ID NO: 2439 - DNA, 744 bp, Sorghum bicolor
atggaggagcgggagaagctcgtgtgcctggccaagctcgccgagcaggcggagcgatacgacgatatggtggaattcatgaagaatcttgctaggatggatgtggacatgagtgctgaagaaaggcatttgttctcagttggtttcaagaacactatcggggcaaagagagcatcgtggagaatcatttgttcacatgagcaaaaggtcacaactgatcgtcagactggtgtgatgatagatgcctataagaagatagtagaagatgaactaaggaaggtttgcaatgaagtattgtcagtcatcgctattcactgccttcccttggccaatacgagtgaaaatgtcgtattcttttataagatgaaaggtgactactaccgatacttggctgaatttagcagtggaactgaaaagaaagctgcctctgaccagtcacttatggcctatcagcatgccatggttgtcgcctccagtgagctctcacctgcccaccagatccggcttggtcttgctctcaatttgtcggtcttcttttatgagataatgaactctcatgagagagcttgccaagtggcaaaacaagcattcaatgaggctcttactgagataaattctggtgaaggggtttacaaggatagcacacttatgatgcagcttctgaaggacaacttagcattgtggacatcagaactaaccggaggtgaagcatccaaggataatgatgtcgacatggagggttga

SEQ ID NO: 2440 - protein, 247 aa, Sorghum bicolor
MEEREKLVCLAKLAEQAERYDDMVEFMKNLARMDVDMSAEERHLFSVGFKNTIGAKRASWRIICSHEQKVTTDRQTGVMIDAYKKIVEDELRKVCNEVLSVIAIHCLPLANTSENVVFFYKMKGDYYRYLAEFSSGTEKKAASDQSLMAYQHAMVVASSELSPAHQIRLGLALNLSVFFYEIMNSHERACQVAKQAFNEALTEINSGEGVYKDSTLMMQLLKDNLALWTSELTGGEASKDNDVDMEG

SEQ ID NO: 2441 - DNA, 114 bp, Sorghum bicolor
gtagcagcacttgcaaaaagagcaaggagcataatgagggaaaatatcttggccgccattgttgctatgttgctagtgtattccactttctatgttgctagttggtctcaataa

SEQ ID NO: 2442 - protein, 37 aa, Sorghum bicolor
VAALAKRARSIMRENILAAIVAMLLVYSTFYVASWSQ

SEQ ID NO: 2443 - DNA, 4314 bp, Sorghum bicolor
atgtatgccgtggggaaggtgagcagcctcatctcccgcagcgtgtactcggtctctggcccgttccacccgttcggcggcgcggtcgacgtcgtcgtcgtgcagcagcaggacggcagcttcaagagctcgccgtggtacgtgcgctttggaaagttccagggggttctcaagtcgagggagaaggtggtcgacatctccgtcaatggcgtcgaggcggggttccacatgtacctcgacagcaacggtgaggcctacttcctcaggaacggggaccccaatggtgaggaaggggagttcatcgtctcccccgcctcgtcaggagatgagcgggaggtgccgatccaggaagcacaggctcagctgaggaagtcgaagagcacttcgtgtgatagctcgacgatggaggctgacgtcggtgagggcaagattcttgcgaggacaacctcgaggcggaccaccatacttgaaaggatgtttggtcggaaatcggttaagaacaatgcccatgctgtggatagggtgagctcattggagcgagcagagattgctgcggaactccttgattccaagtggtcaacaaatctcccgcggagttcaaaaactaatggttcaaatgatgagccttccaagagcaatttggcagaagttagcaacaatgatcagatggaaacctcaaaacctattggttcaaatgatgaaccttccaagagtaatttggcagaagttagcaacagtgatcagatggaaacctcaaatggttcaaatgatgatccttccaagagcaacttggcagaagttagcaataatgatcagatggaaacctcaaaacctgtgttttcagaacatagcttggatcatgggaaagagatggactctaactgcgacaatgctccctgcaattcatgtagccctcgtggaggaagaatcagttcagcagatgaaaccgatcagtgtttacaagccactattgtgaagaaagaggtggttgagatacacacgcgtgagagtagcgacttcactgatcatatcacttcaaccacacatcaacatgggtcagaacctttgtcaaatgatctgggaacagataaacttacgcatcagtctgtcgatactcaagataagttgctgcatgatgttgaagatgttgctggaagggagacacatacagaggaggttgagatacacacgcgtgagagtagcgacttcactgacaatatcacttcaatcacacatcaacatgtgtcagaatctttgtcaaatgatctgggaacagataaacttccactcgatactcaagatgagttgctgcatgatgttgaagatgtttctggaagggagacccatacagaggaggttgagatacacacgtgtgagagtagcgacttcacttcagtcacaaatcaacatgggtcagaatctttgtcaaatgatctgggaacagatcagcttactcatcagtctggcgatactcaagatgagttgctgcatgatgttgaagatgtcgctggaagggggacacatacagaggaggttatttccaatggcatttttgaaatccatgttgttgagacagacattacaagtggtaagagtgaggtggtttctgagattgttactgttgattctgatggagctaaccaaaattttacagatacaaattaccaaaattatggcaccacagatatatcagctgaaaggcatgaggtttcattgattccttctgcacaggatacagttcaagagaaaatagttatcctcagtagttctgagactgtggagggttcactagatgcagttcaagagaagctagtcattctcagcagttctgagactgtggagagctcatatgctgtgtcgtgtattgtggatgacacagttcatgatgcttatgatatttcacaggctgacagtgtacaacatgaggagcactctggtatctctgatgggagcacagaaaagctagtttctgaggaaagttctttagtatactgtggtgctcccagcaacaaaaaggacttggttaatgtatctgttcaagaatgtgaagcttttatcttagaaaatcctgctccccaaatcttggaagagaatggtccagatatggatgtatctaccgacagtgtttccctttcccatgcagatgcagctcatgatttagcttgtcagcatgtttcttctagtgttgtagagacaccaagttatgagcctgacattggtcctgaagatgtaacaaagaactcaattgtggaaaatgaagcatgcagcagggagcttgttgtttctgttattcagacctcaatgggagatggactgacagaatgcattgctcagccagctgttttttctaataaaatagaagtagagggctcaccaactgctgttggattttccagtttggtcagtgttgaaatgcaaaacacaaaactagaagatgacacaaacaaatctagttctgtgattggagatgaagttggttttgcagctgaggctacagctgagcttgatgaagaagcagaaccagttgtatcattctctgaatatacagaagaaattcagtttcaatttagtgatactgaaaattttgtagatagaaaggccacggatgacatggtggctaacaaaacaactggtgaagtagaacatgacgaatctgattgtgacatagagaaacgggaaggaggtgatgtaggtcttgcaaatgacttggagaactgttctgattcattaaagcctgtgactagccctgtttctattcctgcaattgacttccagtcaggagatagtaacatagaggctaaatctctaccaaatctccgttctcatatacatgatcttgaaaggtctgatagttttcagctaagccgctcactacaattacatgctgaaaataatggggttgacccagtcaagagcacatcaaatgctgaaaatgatggggttgacccagtcaagagcatgaattctgcttttcttgagcagaaatcagaagttattggtgattcagaagaaaatatcagcccacctgaggttaccagcaatgtagcacctgatgtcaagcatgctgataacctgaaagttgatgcattcatcccttttgcagaattatcactatgcaggcacctgttatctgaaggcatgggggaggatgctgcttgcagtgcatttgattctgagaagataaccttagagaagttccgtgacatgaagcaatcgctgatgcgaaacaacaaactagttgttaggattgctggccgctattttccctgggatgctgctgcgcctatagtgcttggtatgatttctttcagtgaggaacaagtttttgaacccaaaggaatgataaaggtggagcgagttgagcaaagtgaagctccaggtggcagctggagaatctggccatttagttttagacgaacaaggactattagtgctatccagccagtttgtgaaagtactgttgagacttctgtatccactcctaaagaatccacacctgttaaagaactagatagagaaaggaataaatccagggtaaagaggattgagaggaaggtgcgatcactcactccaacatctgaggagcttgcatctcttgatctcagagagggaaggaacgtggtaacatttactttctcaactgcaattgttgggaaacagcaggttgattgccacatatatttatggaaatggaatacacgcattgtaatatctgatgttgatggaactatcaccaagtctgatgttcttgggcagttcatgccactagttggagttgattggtcccaaaatggagttgctcatttgttttctgcaataaaggaaaatggatatcagcttctatttctgagtgcacgcgctatttcacaagcccacattacaagacagtttcttttcaacctaaagcaggacggcaaagcacttcctgatggccctgttgttatatctccagatggtctcttcccgtcactttacagagaagtcatcagaagagctccacatgaattcaagatttcatgtttagaggctatcaaaaatttatttccacatgactcaaatccattttatgctggatttggaaatagagatacagatgagattagctacctcaaggttggtattcctatgggcaagatcttcataataaaccccaagggtgaagttgcagtgaatcgacgggttgatacaaagtcatacacatccttgcatgctcttgtccatgggatgttcccgccaatatcgtcatcgtctgagcaggaggactacaatgcttggaattactggaagatgccactgcctgatgtcgatttgtga

SEQ ID NO: 2444 - protein, 1437 aa, Sorghum bicolor
MYAVGKVSSLISRSVYSVSGPFHPFGGAVDVVVVQQQDGSFKSSPWYVRFGKFQGVLKSREKVVDISVNGVEAGFHMYLDSNGEAYFLRNGDPNGEEGEFIVSPASSGDEREVPIQEAQAQLRKSKSTSCDSSTMEADVGEGKILARTTSRRTTILERMFGRKSVKNNAHAVDRVSSLERAEIAAELLDSKWSTNLPRSSKTNGSNDEPSKSNLAEVSNNDQMETSKPIGSNDEPSKSNLAEVSNSDQMETSNGSNDDPSKSNLAEVSNNDQMETSKPVFSEHSLDHGKEMDSNCDNAPCNSCSPRGGRISSADETDQCLQATIVKKEVVEIHTRESSDFTDHITSTTHQHGSEPLSNDLGTDKLTHQSVDTQDKLLHDVEDVAGRETHTEEVEIHTRESSDFTDNITSITHQHVSESLSNDLGTDKLPLDTQDELLHDVEDVSGRETHTEEVEIHTCESSDFTSVTNQHGSESLSNDLGTDQLTHQSGDTQDELLHDVEDVAGRGTHTEEVISNGIFEIHVVETDITSGKSEVVSEIVTVDSDGANQNFTDTNYQNYGTTDISAERHEVSLIPSAQDTVQEKIVILSSSETVEGSLDAVQEKLVILSSSETVESSYAVSCIVDDTVHDAYDISQADSVQHEEHSGISDGSTEKLVSEESSLVYCGAPSNKKDLVNVSVQECEAFILENPAPQILEENGPDMDVSTDSVSLSHADAAHDLACQHVSSSVVETPSYEPDIGPEDVTKNSIVENEACSRELVVSVIQTSMGDGLTECIAQPAVFSNKIEVEGSPTAVGFSSLVSVEMQNTKLEDDTNKSSSVIGDEVGFAAEATAELDEEAEPVVSFSEYTEEIQFQFSDTENFVDRKATDDMVANKTTGEVEHDESDCDIEKREGGDVGLANDLENCSDSLKPVTSPVSIPAIDFQSGDSNIEAKSLPNLRSHIHDLERSDSFQLSRSLQLHAENNGVDPVKSTSNAENDGVDPVKSMNSAFLEQKSEVIGDSEENISPPEVTSNVAPDVKHADNLKVDAFIPFAELSLCRHLLSEGMGEDAACSAFDSEKITLEKFRDMKQSLMRNNKLVVRIAGRYFPWDAAAPIVLGMISFSEEQVFEPKGMIKVERVEQSEAPGGSWRIWPFSFRRTRTISAIQPVCESTVETSVSTPKESTPVKELDRERNKSRVKRIERKVRSLTPTSEELASLDLREGRNVVTFTFSTAIVGKQQVDCHIYLWKWNTRIVISDVDGTITKSDVLGQFMPLVGVDWSQNGVAHLFSAIKENGYQLLFLSARAISQAHITRQFLFNLKQDGKALPDGPVVISPDGLFPSLYREVIRRAPHEFKISCLEAIKNLFPHDSNPFYAGFGNRDTDEISYLKVGIPMGKIFIINPKGEVAVNRRVDTKSYTSLHALVHGMFPPISSSSEQEDYNAWNYWKMPLPDVDL

SEQ ID NO: 2445 - DNA, 1302 bp, Sorghum bicolor
atgcacccgcagcggatgaagcaggccgcggcgcagcagcagctgatgcagcaggcgcagcagccgcccttgttcccggggcaccaccacccgcaccccggcctcctcgccgcgccacagatggagccaatagttagtggaaacctgcctcctgggtttgattcgagtacatgccgcagcgtgtatgttggcaatatcagtcttcaagtgacggacacagtactgcaggaagtcttccaaagtattggtccagtagaagggtgcaaactcatcaggaaagaaaagtcatcctttggtttcattgactactatgaccgcagatatgctgcactagcaattttatctctcaatggcagaccactgtatggtcagccaataaaagttaattgggcatatacaagtactcagagggaggatacatcaggtcattttaatatttttgttggggatctttgcccagaagtcactgatgctactttgtttgcatttttctctggatactctacctgctcagatgctagggttatgtgggaccagaaaacaggacgatccagagggtttggttttgtttctttcaggaaccagcaggatgctcaaagtgcgataaatgacttgaatgggaagtggcttggcaaccgtcaaattcgttgcaattgggcaacgaaaggtgccaatgctggtgaagagaaacagattgtggactccaaggttgacctgacaaatggcacatcagaatctggaaaagagaatccaaatgaagatggtcctgaaagtaaccctcagtttactactgtctatgttggcaatcttcctcacgaggctaccaacaatgatgtgcacctgtttttccattcacttggggctggctcaattgaggaagtccgtgtaactcgtgataaaggctttggttttgtaaggtacagcacccatgaggaggctgcgcaggcaattcagatggctaatggccaacttattggcgggaggcagataaagtgttcctggggaagcaaaccgactccaccagggacagcatcctcgcctctgcctcctccagcaccggcactgttctccactggagtgtcgccgacagacttcctggcataccagcgcatggccctgaacaagatggccacgaacccatccctaatgggtcagcacgccttgaatcaggtcgcactggggatgggtggccgagccagccagtccatctatgatggcggcttccagggcatcagtactgccgccgccacaacctccgcccagcaacaacagcagcagcagcagcagctcatgtactactag

SEQ ID NO: 2446 - protein, 433 aa, Sorghum bicolor
MHPQRMKQAAAQQQLMQQAQQPPLFPGHHHPHPGLLAAPQMEPIVSGNLPPGFDSSTCRSVYVGNISLQVTDTVLQEVFQSIGPVEGCKLIRKEKSSFGFIDYYDRRYAALAILSLNGRPLYGQPIKVNWAYTSTQREDTSGHFNIFVGDLCPEVTDATLFAFFSGYSTCSDARVMWDQKTGRSRGFGFVSFRNQQDAQSAINDLNGKWLGNRQIRCNWATKGANAGEEKQIVDSKVDLTNGTSESGKENPNEDGPESNPQFTTVYVGNLPHEATNNDVHLFFHSLGAGSIEEVRVTRDKGFGFVRYSTHEEAAQAIQMANGQLIGGRQIKCSWGSKPTPPGTASSPLPPPAPALFSTGVSPTDFLAYQRMALNKMATNPSLMGQHALNQVALGMGGRASQSIYDGGFQGISTAAATTSAQQQQQQQQQLMYY

SEQ ID NO: 2447 - DNA, 366 bp, Sorghum bicolor
atgggccgcggcaggggcgtcagctacggcggcgggcagagctcgctgagctacctcttcggcggcggtggcgacgagcccgccgcggcgcccgccaagccgacccccgcggcggtggagcagagggcgcagcaacctgcggctgctgcggcggcgccgacgccggcggcaaccgtagacggcgagaagcagaaggggatcccggccggcgtccgcggcagccagaccaacaactacttccgggcgcaggggcagaactgcggcaacttcctcacggaccgtccgtcgaccaaggtgcacgcggcgcccggcggcggctcgtcgctcggctacctgttcggcggcgggcctcccggcagcaagtga

SEQ ID NO: 2448 - protein, 121 aa, Sorghum bicolor
MGRGRGVSYGGGQSSLSYLFGGGGDEPAAAPAKPTPAAVEQRAQQPAAAAAAPTPAATVDGEKQKGIPAGVRGSQTNNYFRAQGQNCGNFLTDRPSTKVHAAPGGGSSLGYLFGGGPPGSK

SEQ ID NO: 2449 - DNA, 579 bp, Sorghum bicolor
atgaaccttcaccaagacatggacagggagcagatgaggatggccatcctgaaccaagaacagatcttcagacaacaggtacacgagctgcaccggctgtaccatgtccagaagcagctgatgcagcagtcacagagagttgctctggtgagccatggcccggtggtcgtcgacgtcaagccgcagctggacatctggtgcggcgagaaggtgacaacaaagcctcagcagcagatcatcagcttcaccagctgcaacaaggccacaaagcctgcacctgcgtctgcaatggccgaggaatgcaaccttgtgctgacactagcaacgggaccgagtagcagcagcagcaacagcagttatgacgccgagaggcaacagggagaacggttcaaggcgtcgtccaactgcgactccggtgcgaccaaggttgcatccacatcgacggactccgagatggctcgatttagggaggtggatgtggcgaagccggcgaggttgcatggcgaggtttgcaggaggatggatgagatggggctaggtccattgatgtaccaatgcctgagcctcaagatggtgtga

SEQ ID NO: 2450 - protein, 192 aa, Sorghum bicolor
MNLHQDMDREQMRMAILNQEQIFRQQVHELHRLYHVQKQLMQQSQRVALVSHGPVVVDVKPQLDIWCGEKVTTKPQQQIISFTSCNKATKPAPASAMAEECNLVLTLATGPSSSSSNSSYDAERQQGERFKASSNCDSGATKVASTSTDSEMARFREVDVAKPARLHGEVCRRMDEMGLGPLMYQCLSLKMV

SEQ ID NO: 2451 - DNA, 1818 bp, Sorghum bicolor
atggagaaggaagccatggaggggcatgtgatggtaccattgcagagcttgagcctagagctcccggatggggaaatcatagtgggctacaacaaggacacctcggctctgcaagaggagatttcaactatgcgatcaaggcagcgacatcttgacaggagaaggcgggaggcgctcgacaagctcattgacctgaaaggaagtattagggtcttctgccgggtacggccgctggtccagacgaacaacttgaacaccaaatcaccagttactgttggacaagaaaagattgcagtcaagtcagttgggatcaagaaagagttcagtgttgatagggtttttggacaggagtccacacaagaggatgttttccaagaagtaaaaccgatcctcagatctgcacttgacgggcacaatgtctgcattctcgcttatggccagactgggacagggaaaacatacacaatggaaggaactgatgggaagcttggtattgtgcctcgagctatccaagaactgttttctcacgcttcagaagacagttcatccacatactctttcaccataagcatgcttgaggtctacttggggagtctcaaggacttgttggcaccaaggcagcctctcttcaggtcaacagaatgtaacacagcatgtaatctcagcatactagcaacaaaaagtggtgctgtggaagttgaggggctgacggatgtctcaatacctgacctgaagaaagccaaccagtggtactgtagaggacggcgagcccgatcaacatcttggacaaatgtcaatgatgtctcgagccggtcgcattgcttgacaaggattaccataaggaggcatggagccactgaagaagtcagcaagctctggctcatcgatcttggtggcagcgagcggttgctgaagactggtgcatctgggttgaccatggatgagggaaaggccataaacctctccctatcagcacttggagatgtcattgctgcacttaggagaaagaggagtcatgttccttacagaaacagcaagcttacccagattctcagtgactcgcttggtaatggttcaaaagttctaatggtggtgcacatcagcctttctgaggacgatgttggtgagacggtctgttccctgaacttcgcgaaacgagccagatcaatcgaatcaaatagagaaattccagaagatctgaaaatgttgaagcagaagcggctcgcagagcttgacaaggaaatctgcactgtggaggaagagttgaagtatctgaatgaagaaataaggagatcagagatctcacttgaagagaagaacaagctcacttcatctgtttgtcgggctcttagtgatgggaagggatcaccaagaagcactctagtggtaggccacattgatgtcacagagagcccacacgcaacagagaaggcaaagagcaggctatctcacggttcagctccccacttcatgtcttcgacggtgtgcagtcggcaaagacatactgcaggaagccattttgttagtaagccgaggctgacaaagtcagtaaacagatattcaactgagctgagtgggagccagtcattcagctactcaagctgcaagaatgcagccaaggctaggtcagtggcattctcatccagtgtgcccaagataaagtgcttgccagtcaagtctgatcagatcaacataagtaacaacagcatcgactcgacagctgcatcagcaccacggcggagggaaagctttggctccaaaccggttcaaagagcacccctacaccagcacaggaggcggatgtctagcctaacatag

SEQ ID NO: 2452 - protein, 605 aa, Sorghum bicolor
MEKEAMEGHVMVPLQSLSLELPDGEIIVGYNKDTSALQEEISTMRSRQRHLDRRRREALDKLIDLKGSIRVFCRVRPLVQTNNLNTKSPVTVGQEKIAVKSVGIKKEFSVDRVFGQESTQEDVFQEVKPILRSALDGHNVCILAYGQTGTGKTYTMEGTDGKLGIVPRAIQELFSHASEDSSSTYSFTISMLEVYLGSLKDLLAPRQPLFRSTECNTACNLSILATKSGAVEVEGLTDVSIPDLKKANQWYCRGRRARSTSWTNVNDVSSRSHCLTRITIRRHGATEEVSKLWLIDLGGSERLLKTGASGLTMDEGKAINLSLSALGDVIAALRRKRSHVPYRNSKLTQILSDSLGNGSKVLMVVHISLSEDDVGETVCSLNFAKRARSIESNREIPEDLKMLKQKRLAELDKEICTVEEELKYLNEEIRRSEISLEEKNKLTSSVCRALSDGKGSPRSTLVVGHIDVTESPHATEKAKSRLSHGSAPHFMSSTVCSRQRHTAGSHFVSKPRLTKSVNRYSTELSGSQSFSYSSCKNAAKARSVAFSSSVPKIKCLPVKSDQINISNNSIDSTAASAPRRRESFGSKPVQRAPLHQHRRRMSSLT

SEQ ID NO: 2453 - DNA, 780 bp, Sorghum bicolor
atggcggccggcggcagcgagattgacaagggcaagcggtggagcctggcgggcgcgacggcgctggtcaccggcggcagcaaggggatcgggcacgccatcgtcgaggagctcgctgcgttcggcgtgcgggtgcacacgtgctcgcgcagcgcggctgaccttgaggcgtgccgccggcggtggtccgacaagggcctgcaagtcacagtctccgcctgtgacctcgccgtgcgtgccgaccgggagaggctcatggagactgtcaaggccaccttcgacggcaagctcgacattctggtgaacaatgcggcgcagttgttggcgaaaccggtagcgcagtgcacagcggaagacttctggcggcgttgcatggcgacgaacctagagtcctcgctcgcgcatcctctcctccttaacgcctcgtccctcgccggcatcgtcaatgtctcctccattggaagtttgctggcctaccacggcatcacgctctatggcaccgccaaagccggaatgaaccaactaacaaggagcctcgccgccgagtgggccagcgataagatccgtgtgaactgcgtggcacctggactcatcatgaccgacatggcgaaagaggcaccacccgagatcatagagcaatcgttatccagtgtccctatgcggcgggccggcgagccggtggaggtggcgtccatggtgtccttcctctgcatgccggcggcatcctacgtcactggtcaggtcatctgcgtggatggaggccggaccattagtgcctga

SEQ ID NO: 2454 - protein, 259 aa, Sorghum bicolor
MAAGGSEIDKGKRWSLAGATALVTGGSKGIGHAIVEELAAFGVRVHTCSRSAADLEACRRRWSDKGLQVTVSACDLAVRADRERLMETVKATFDGKLDILVNNAAQLLAKPVAQCTAEDFWRRCMATNLESSLAHPLLLNASSLAGIVNVSSIGSLLAYHGITLYGTAKAGMNQLTRSLAAEWASDKIRVNCVAPGLIMTDMAKEAPPEIIEQSLSSVPMRRAGEPVEVASMVSFLCMPAASYVTGQVICVDGGRTISA

SEQ ID NO: 2455 - DNA, 1116 bp, Sorghum bicolor
atggggagggtgaagctcaagatcaagaggctggagaacagcagcgggaggcaggtgacctactccaagcggcggtcggggatcctcaagaaggccaaggagctctccatcctgtgtgacatcgatctcatcctcctcatgttctcgcccaccggcaaacccaccatttgcatcggcgaaagaagcaacattgaggaagtcatagcaaaatatgcgcagttaacccctcaagagagagctaaaagaatgcatgacctcaatgatctcctttgttgtactcaaaaggccctaaagaagactttcaagaagctagaccacgatgagttatcaggccatctcggttcattgcaatgtcaaatggcagaggttcaaaagcgtctcagttattggagcgatcctgagaaagttgagaatatcgaccatataagagcaatggagcaatctctcaaagaatctctaaaccgcatccaaatccataaggagaactttgcaaagcaacatctgatcggcctacagtgtgctgctgcccagttccagaccgacatgcagttgcctctaggactgaccggtgagccgggcccttcgtcctggttccaaaacggcggtgccgatgggcaacaagccatgatgctaccggacgactccagcctgctccatcagagagacattgctggttgctcgacgagcacgtcactgccgggctacccaggctacttcagcatgaccaagcaggagacggacaccggcggcggcagcgagcacgccgggcaggcggcggtgcaccagcagccgccgccgccgccgcctgacttcagccaggccgagtgcctgacgtcgctgcacctgggcgcgcagttcccgtacgcaccctgcttcgaccaccccagccttttcaacgaccggatgttcaggcctgatgctgttgagctgcacgacggcagcgccggcatggactttggcggcggccacttcgacctgcccaggcctggcgacgaggccagcttccagaactgggcgtcggcggcggcatgtggcgcggccatgtttgaccaccaccatcagcagcagcagcatcaccagcaatcacagtcgtcatctgcacaacaacaactctag

SEQ ID NO: 2456 - protein, 371 aa, Sorghum bicolor
MGRVKLKIKRLENSSGRQVTYSKRRSGILKKAKELSILCDIDLILLMFSPTGKPTICIGERSNIEEVIAKYAQLTPQERAKRMHDLNDLLCCTQKALKKTFKKLDHDELSGHLGSLQCQMAEVQKRLSYWSDPEKVENIDHIRAMEQSLKESLNRIQIHKENFAKQHLIGLQCAAAQFQTDMQLPLGLTGEPGPSSWFQNGGADGQQAMMLPDDSSLLHQRDIAGCSTSTSLPGYPGYFSMTKQETDTGGGSEHAGQAAVHQQPPPPPPDFSQAECLTSLHLGAQFPYAPCFDHPSLFNDRMFRPDAVELHDGSAGMDFGGGHFDLPRPGDEASFQNWASAAACGAAMFDHHHQQQQHHQQSQSSSAQQQL

SEQ ID NO: 2457 - DNA, 1071 bp, Sorghum bicolor
atggctgccatatgctgcgtcaaggaatctggacacctattggaggagatgtatgctgcagtcgcctccatagcggacaatgttcgctgcctctacgacaaggatgtgatggcaggtatcagctgtgtagacttccgagatatgatgttcgttgacgcttgctttttggtgcagtacatgagtatgcggagtcgccaaaaaatagataacagcttgcatggtttcctgagctttaaccgcagcaacatccatcatgacatcaagctgctcgagaaccagcttccatggaaggtggttgaggtggtgatgaggttcaggcccgtgcccttgcatcgcttcatggctattttgaaagaatatctgcaggaccgtaagcctcccaaagaagaagatcctgtgttcattttggataatagctacagaccaccacatctccttggcctcctccactactacactgtaggaaggagcaggtacacttccgatcggacagtgagacccaagggccaatcggattccgtcagtgcacttgagcttgccaagattggcatcacgatcacggccaacgagtcaatggagctcatagacatgggcctcagccagaaagggaccctcttcgcggagctctccatggcgcccctgacactggaccgtgaccgtgcaagctacctcctcaacatggcagctctggagctatgcatggtgaaaagcttttcaaaagcggcagtcgaagactctgctgtctgctcctacctcttgctcctggccaacttggcacataggcaggaggacgtgcacgagctacgggtgagtggtctcctgcagggaggaggaggcctcaccgacgaggaggcactccggttcttcactaatcttcggaatatgcgccatggaagatcctacgaccgtgtcatggcacagatcgaggtttacaaggagagcaagtggaaggaggccaaggtctatgcgttctattacaaaaacaagaaaaccattgctgcgtttgtcaccggcatcggtgcacttgttgggatcatagggacactcttgtcaatcaagaaatctttatga

SEQ ID NO: 2458 - protein, 356 aa, Sorghum bicolor
MAAICCVKESGHLLEEMYAAVASIADNVRCLYDKDVMAGISCVDFRDMMFVDACFLVQYMSMRSRQKIDNSLHGFLSFNRSNIHHDIKLLENQLPWKVVEVVMRFRPVPLHRFMAILKEYLQDRKPPKEEDPVFILDNSYRPPHLLGLLHYYTVGRSRYTSDRTVRPKGQSDSVSALELAKIGITITANESMELIDMGLSQKGTLFAELSMAPLTLDRDRASYLLNMAALELCMVKSFSKAAVEDSAVCSYLLLLANLAHRQEDVHELRVSGLLQGGGGLTDEEALRFFTNLRNMRHGRSYDRVMAQIEVYKESKWKEAKVYAFYYKNKKTIAAFVTGIGALVGIIGTLLSIKKSL

SEQ ID NO: 2459 - DNA, 519 bp, Sorghum bicolor
atgacagagacagacaaggtcctcttgcgtgcgattcgtgagctcatcgatctcgatgcttctcatggtcttcgtgaagtttgggtgcagtggctcaggtcatggagccatgacccggtggcagtcggaggaaacactgcgttgctgttagttcgtgccatggagtgttgttcaggaaggtacatcagtgtggccgacaggaacgtgaaccatctggatgagtactcccagctcgagcagctcacccattccatctgctgcaaactgacgtctagggttcttgctcagaatggagaagacaataacaaggaagctgctgatagtagcttggatcagcaggccgtggagctggagatgcaggagctggctcggtgtgttcttcagagctgcaaatccatcgacagagccgccaggcaggcatttctccatgtggccaagacctactactacgtcgctcattgctcaaatgaaacaattgacactcacatctccaaggttatatttgaggatgtcgtctag

SEQ ID NO: 2460 - protein, 172 aa, Sorghum bicolor
MTETDKVLLRAIRELIDLDASHGLREVWVQWLRSWSHDPVAVGGNTALLLVRAMECCSGRYISVADRNVNHLDEYSQLEQLTHSICCKLTSRVLAQNGEDNNKEAADSSLDQQAVELEMQELARCVLQSCKSIDRAARQAFLHVAKTYYYVAHCSNETIDTHISKVIFEDVV

SEQ ID NO: 2461 - DNA, 477 bp, Sorghum bicolor
atggcctattgcgaaatggctccttgtgcgctagctcaacattctgagcttacgatgactctatacacaaacaaggaggtgtattctggaccagaccaaaatgcagcaacaaacacagaagggtcaacaataatgggcagaacccaggtctactcgtggcctgtagccgatggggcaactcctgatgcaaacatcgtcggccatctccagggcactagtgttcaagtagccaaatctcccgccgcggtgtatcactactccctgggtttagtgttctcggatgaaaggttcaaagggtctacactccaaatacaagggacttcccaaataaatggtgagtgggccattgttggagggacaggagaacttactatggcaacgggtactgtcaaacgcacaacagttgtagagaaagactataccaggatctcagaactcaaaatacatgcctatttatttcgctccagtgaagcctag

SEQ ID NO: 2462 - protein, 158 aa, Sorghum bicolor
MAYCEMAPCALAQHSELTMTLYTNKEVYSGPDQNAATNTEGSTIMGRTQVYSWPVADGATPDANIVGHLQGTSVQVAKSPAAVYHYSLGLVFSDERFKGSTLQIQGTSQINGEWAIVGGTGELTMATGTVKRTTVVEKDYTRISELKIHAYLFRSSEA

SEQ ID NO: 2463 - DNA, 426 bp, Sorghum bicolor
atggcaattcttatcgtatttgccatttgcatctcggccctcttgccagcagcaaacgctaatggcagccacagtgacctcgaggcgctgctggccttcaaaggcgagctcactgatcctaccggcgtccttgccaggagctggacaaccaatgtgtccttctgtcgatggcttggagtctcgtgcagccgccgccaccggcagcgcgtcacggctctgtcgctgtcggatgttccgctacaaggggagctcagcccacacctcggtaatctttcgttcctatccacactcaatctcacaaacaccagcctcgctggctccatccctgccgaacttggcatgctacgtcggcttaaggttttatctcttgttcgaaatggcctatctggtgccattcccactttcccagtaccattggaaacctaa

SEQ ID NO: 2464 - protein, 141 aa, Sorghum bicolor
MAILIVFAICISALLPAANANGSHSDLEALLAFKGELTDPTGVLARSWTTNVSFCRWLGVSCSRRHRQRVTALSLSDVPLQGELSPHLGNLSFLSTLNLTNTSLAGSIPAELGMLRRLKVLSLVRNGLSGAIPTFPVPLET

SEQ ID NO: 2465 - DNA, 1119 bp, Sorghum bicolor
atggccgcgtcttctcatgccatagcccccacggatgctgagctgctgcaagctcaagctgatctatggcgccacagcctctactacctcacgtccatggcgctgaaatgcgcggtcgagctccacatccccaccgccatacacaacctaggaggagctaccacactgccagacctggtaaccgcgctatccctcccgaagaccaagcttccattcctaggccggatcatgcggttgctggtcacgtcaggtatctttgcttctgacggcgccaatggcgatggagcggcggcggaggccgtgtaccgcctcaacccactctcctggctcctggtagaaggtgtggaatccgaggaccacacctaccagaagtacttcgtgctcgccaccgtctcccagcactacgttgacgccggcctgtctctggccgactggttcaggaaggatctgcctgagccgctgccatcgcctttcgagtgtttacatggcgtccccctcgcccatgagagcacaaagctcctggacgaggagcttgacaggattgtggaagaaggtgtcgccgcgcacgacaatctggcaatcggaaccataatacgggagtgcagtgatattttcagtggtcttcactcactgacttattgctgtggtagacagggaaacatcagtgccacggcgatcatcaaggctttccctgacatcaaatgcactgtgctaaaccttccgagggttattgagacagcaccagctgatgatgctgttagctctgtcacgggtgatttgttccacaccataccacctgctcaagctgtgatgctcaagcttgtactccacttctggagcgatgaggattgtgtgaagatcctggagcaatgcaggaaggcaattccttctagagaagagggagggaaggtgatcatcatagaaatacttcttgggccttatatggggcccataatgtatgaagcacagctgctgatggacatgctcatgatggtgaataccagaggcaggcagcgtactgaaaatgactggcgccagatctttactaaagctggtttctctgactataagattgttaagaaaataggagctcgtggtgtcatcgaagtctacccataa

SEQ ID NO: 2466 - protein, 372 aa, Sorghum bicolor
MAASSHAIAPTDAELLQAQADLWRHSLYYLTSMALKCAVELHIPTAIHNLGGATTLPDLVTALSLPKTKLPFLGRIMRLLVTSGIFASDGANGDGAAAEAVYRLNPLSWLLVEGVESEDHTYQKYFVLATVSQHYVDAGLSLADWFRKDLPEPLPSPFECLHGVPLAHESTKLLDEELDRIVEEGVAAHDNLAIGTIIRECSDIFSGLHSLTYCCGRQGNISATAIIKAFPDIKCTVLNLPRVIETAPADDAVSSVTGDLFHTIPPAQAVMLKLVLHFWSDEDCVKILEQCRKAIPSREEGGKVIIIEILLGPYMGPIMYEAQLLMDMLMMVNTRGRQRTENDWRQIFTKAGFSDYKIVKKIGARGVIEVYP

SEQ ID NO: 2467 - DNA, 783 bp, Sorghum bicolor
atggccatcatgccatcgtcgtcgtcctggacgacgctacgagctctgacgatgaccttggctctcgccaccgtcgccgctgctgctgcttcccgtcagccgtcgccgggagcatccaccaccaccaacctgaccctccacaacctgtgcccgtacccagtctggccgctggtgaccgccaactcaggagtgccctcgatcccgaccgacgccgacggcgagccggcgggacgtctggacggcaacggcgacggcctggcgacactggcgttcccgccgggggcgtggtcaggccgcgtggtggcgcgaacggggtgcaccggggacgacgaggaagacgcgtacggcgacgacggcccgctggtcccgttccggtgcgcgacgggcgacgcgccgccggtgacggtggcgcaggtgagcgtgggcgggccgggcggcgccgcggcgtacagcgtgagcctggtggacggcttcaacgtggccgtcgtagtgacgccgcacgggctgccgccgccgccgccggagggtgcccggcgcgggcggcggtgccccacgctgggatgcgccgtggacctcgccgccgagtgcccaccgcgcgcccgcgcgcctggaggagggtgcggcgccggcgcgtccgaggcggcgctgttcaagcacctgtgccccgatacgaggaccaacgccacggacgtcgaggtctcgccgcaggactgcgtcgaccccggcgagatcaaggtcgtcttctgccccaagcctgacagcgtcgtcgccggccacctctag

SEQ ID NO: 2468 - protein, 260 aa, Sorghum bicolor
MAIMPSSSSWTTLRALTMTLALATVAAAAASRQPSPGASTTTNLTLHNLCPYPVWPLVTANSGVPSIPTDADGEPAGRLDGNGDGLATLAFPPGAWSGRVVARTGCTGDDEEDAYGDDGPLVPFRCATGDAPPVTVAQVSVGGPGGAAAYSVSLVDGFNVAVVVTPHGLPPPPPEGARRGRRCPTLGCAVDLAAECPPRARAPGGGCGAGASEAALFKHLCPDTRTNATDVEVSPQDCVDPGEIKVVFCPKPDSVVAGHL

SEQ ID NO: 2469 - DNA, 2025 bp, Sorghum bicolor
atgtcgacacctgctgaggttcatgctcagatagaagctcttgtggccaatcctggaggtggttttcagggatatggtgtggagcatttgattgtccacctcccgtatgaggctcgtatgggggggccacagcagtaccgttggatgtatccagtcgagagagttctgaagacccctccgacggcctgcggcatgctcatggagaaggactcatcatcagctcaccaggacaatgaccttgtgctcccctacatctcgcgcttgctcatggaggacgacatcgccgacaagttgttcttccagcagtacgacctggacgaacctgcactcctcgaggcccagcagcccttcattgagatcatctccaatgccgtcgtcgtcccgtcacgcccctgcaataataattattccggccagccgctggtggcaccggcaccttacactggcaccgccgagagcatggcagagactaacagcttattgctgccacccgagaccgagaccgagagcagctgcggcatggacgcggtgagcatggcattcttcagaggcatggaggaggcgaacaaattcgtaccgtccatcgtcgtccctagagatagggaccgcgagacggtcgtcgacgtcgatgacagcagccggagccggaagaagaggcacgagtcagaggcagcggcagaggccagcaagcagatggcggcacctgaatcggaggaggaagccaccgcacgcgagatgctggaccggttgatgcttgacggctacaacccaagccttgcatcggacatgaacgaggcggaggaggaggaggagacgatgacgatgtcacggtcgtcggggaggcggcggcgcagcggcaccggcaccggcacaaagcacgcggtggacatgcataccttgctcatccgctgcgccgaggccatgtccaacaacgactggtgcgctgcggctggcctgcttgagcggatcaagtatcactcgtcgccgacgggggacagcacgcagcggctggcgcactgcttcgccaagggccttgaggcgcggctggccggcatgggtagccagacgtacctgtctctcgtggccaaacgtgcctccatggtcgtcgtcctcaagacctaccagctcttcatggactcgtgctgcttcctccctgtgcaactgctcttctccaacaagaccatctacaaggccgtcgccgggaggaagaagctgcacatcgtcgattatggcctaggccacgggatccagtggccggacttgctccggtggctctcgcgcagggagggtggaccgccggaggtgaggttcaccggaattgacaagccacagcccgggttccgtccagcttggcccgtcgaggagacagggcgccgcctcaatgcctgcgcctgccagtttggcgtgccgtttcagttccgtggcgtcaccaagaagaagccgggggctatcgccgtcgaggacctggacattgatcccgacgaggtgctggtcgtcaactccatgttccacctggagacgttgatggatgagagcatcgtggtggagaggcccaaccccagggacgtggtgctcggcaccatcagcaagatgaggccatccgtgtttgtccacgccatagccaatggatcacacagcagtgctttcttcatggcacggttccgcgacgcgctgcagcgctactcggcgctcttcgacatgatggacaacatcgccccaagagacgacgacaagagggtgctcgtggagcaggacatatttgcgcggtccgccaccagcatcatcgcgtgcgagggcgtggaacgggtggtgcgccctcagaactacaagcaatggcaggcgcggaaccagcgagcagggctcaggcagctgccattggaccccgagattgttgaagcactcaaagacaaggtgaagaaggaataccacaagtgtttcgtcatcagcgaggatcaacgctggcttctccagggatggaaaggacgtgtgctcttcgccatctctacctggacggcagacagctga

SEQ ID NO: 2470 - protein, 674 aa, Sorghum bicolor
MSTPAEVHAQIEALVANPGGGFQGYGVEHLIVHLPYEARMGGPQQYRWMYPVERVLKTPPTACGMLMEKDSSSAHQDNDLVLPYISRLLMEDDIADKLFFQQYDLDEPALLEAQQPFIEIISNAVVVPSRPCNNNYSGQPLVAPAPYTGTAESMAETNSLLLPPETETESSCGMDAVSMAFFRGMEEANKFVPSIVVPRDRDRETVVDVDDSSRSRKKRHESEAAAEASKQMAAPESEEEATAREMLDRLMLDGYNPSLASDMNEAEEEEETMTMSRSSGRRRRSGTGTGTKHAVDMHTLLIRCAEAMSNNDWCAAAGLLERIKYHSSPTGDSTQRLAHCFAKGLEARLAGMGSQTYLSLVAKRASMVVVLKTYQLFMDSCCFLPVQLLFSNKTIYKAVAGRKKLHIVDYGLGHGIQWPDLLRWLSRREGGPPEVRFTGIDKPQPGFRPAWPVEETGRRLNACACQFGVPFQFRGVTKKKPGAIAVEDLDIDPDEVLVVNSMFHLETLMDESIVVERPNPRDVVLGTISKMRPSVFVHAIANGSHSSAFFMARFRDALQRYSALFDMMDNIAPRDDDKRVLVEQDIFARSATSIIACEGVERVVRPQNYKQWQARNQRAGLRQLPLDPEIVEALKDKVKKEYHKCFVISEDQRWLLQGWKGRVLFAISTWTADS

SEQ ID NO: 2471 - DNA, 927 bp, Sorghum bicolor
atgaactcctccaccgccaccgccatggatcaaacaggcaagtactggggcatgtggggagcaagcagcagcagcagcaccagcaccgcgagccccatctctgcttgggcagcggcgtacggcggcagcagcgaaccgtcgtgggaggagcaggcctttgcgcgtgatgcggcggcgcacctcggcggctgcgtgtggccgccgcgctcttactcgtgcaccttctgccagcgcgagttccggtcggcgcaggcgctcggtggccacatgaacgtccaccgccgtgaccgggctcttctccggcaggggggctcgtcgtcccctgatgacgtgcacgcccccaacgacgatcagtcacacccacagcaaggtgctctcctgtacagggcagcagcagcctctaaccctagcaccactaccacgccgactactactactgcagctgcaggtactactactgccggctcagcagcagccatgggccaggatggggatgccaacaccaccactcctacttcctacttatcaacaattatcaaggagagcaagaacaagctcttcatgcccataccagatcactctgtggcggagatgagagaagatcaggcggccatagatgatcatcagtgtgatcgtcatgacgatggcgacagcgtgcagtcagccaggaaaaagaggaggcgtttggatcatccattggcagcggcggcggcacttctgatctttgtgcagccaacggcaaaggccgctaccgatgtttcacaagaaggaagagctgatcatgagacaaaggtaccacaaatgacaaccccaacaagccctagctctatttcccctcttctggatcaacgacaggaattagatctagagttaaggcttgggactactccaaaagttacatatatggcgatacacaaagctagctag

SEQ ID NO: 2472 - protein, 308 aa, Sorghum bicolor
MNSSTATAMDQTGKYWGMWGASSSSSTSTASPISAWAAAYGGSSEPSWEEQAFARDAAAHLGGCVWPPRSYSCTFCQREFRSAQALGGHMNVHRRDRALLRQGGSSSPDDVHAPNDDQSHPQQGALLYRAAAASNPSTTTTPTTTTAAAGTTTAGSAAAMGQDGDANTTTPTSYLSTIIKESKNKLFMPIPDHSVAEMREDQAAIDDHQCDRHDDGDSVQSARKKRRRLDHPLAAAAALLIFVQPTAKAATDVSQEGRADHETKVPQMTTPTSPSSISPLLDQRQELDLELRLGTTPKVTYMAIHKAS

SEQ ID NO: 2473 - DNA, 969 bp, Sorghum bicolor
caaaatgaagattcacacattgaaaacaatgtagctaatagtaatgatgcccatcaaaccgactttgctcaagaacaaatagatcgatatgaagattattcagactcagggtcctcggaacaggacaatgatcattctagttatgcctttcatgctccttctaacaatgtcatgcaacgggaagctgaaacttatggaggacaacaaagtgattcaccatggtcaagggatatatctggcaccgaggatggacatgacaacacctttgtacatagagatgaagaatggctcattattgattctcaagaacctggaccaaattggcagttaggacgaagtttcccttcaagtagaaacgtcaataggcttcgtccttcggatgatgatgtttatggaattgaactcagagagctcttaagcaggcgaagcgtgtcaaatcttcttagcagtggctttcgagaaagtctggaccagctcattcggtcttatgtccaaaggcaagaacatgattggaattttgagggtcaaagaccaaccaccactggtttactcaacgaagatcctattgaaatcaggatagatgaacaaaatcgagctgagagagacaatgcacctcagtcatcaactatgttggcagatcaaacacttttcccgcagcaacgccagtggcatactgaattgccccatcataattggagtcaacaaagcatgcatcattctgaatttaggtcactagagtcctttagtgtacataaatttgaatatccaagcatttatcttgttaaaaatgctttgcaggactgggacactatccacattttgcgagatgagttgattagagtgcagagaggaatgactagcatgcaacagatgttagaagcatgcatggagatgcagatggagctacaacgctccatcaagcaagaagtgtctgctgctcttaaccgatctctaaccatgcaaggttag

SEQ ID NO: 2474 - protein, 322 aa, Sorghum bicolor
QNEDSHIENNVANSNDAHQTDFAQEQIDRYEDYSDSGSSEQDNDHSSYAFHAPSNNVMQREAETYGGQQSDSPWSRDISGTEDGHDNTFVHRDEEWLIIDSQEPGPNWQLGRSFPSSRNVNRLRPSDDDVYGIELRELLSRRSVSNLLSSGFRESLDQLIRSYVQRQEHDWNFEGQRPTTTGLLNEDPIEIRIDEQNRAERDNAPQSSTMLADQTLFPQQRQWHTELPHHNWSQQSMHHSEFRSLESFSVHKFEYPSIYLVKNALQDWDTIHILRDELIRVQRGMTSMQQMLEACMEMQMELQRSIKQEVSAALNRSLTMQG

SEQ ID NO: 2475 - DNA, 3270 bp, Sorghum bicolor
atggataccctcggtgatgaagatgtcgctgcttggtggctgcaaaagaggctgttgcttgattcggaaaagaggcaaggttttgacgccttggtcctgcttgtctcttgggaagtttggaaagaacggaatgtgaggatcttccgaaatgaagtatccacggtggcgaccatcgcgaagcgcatccacgatgaaggaagcctttggattgaggccggcttcatccccttagctacggttatcaaggccgatagcatcgaggcagccgccggacgaattctcgatgaactgaaggagggcaataacaacagcagcagaggcatcactggaggcagggagcatgtcatctacttcgacggctgggacggactgggggcgtccgctgtcctccgagccgttgcacagcgcctcaccccaggagctttggaggcccagggtgaattgcggttcgatcagatcatccacatcgactgctccaagtgggagagcaggagatcgctgcagagggctatcgctgagcagctggacctccctgcccaggtgatggagttgttcgacaggcaagatgaggaggacgattttcatgggatccccaggggctctcgcactgagataccacaagtcctggaggccatgtatcaatgcatacagaagctcaaccacaggttcttggtgattcttcacaacgggagcagccaggagattgacctgtccacctttggcttccctctgttcggatactcgaccaacaaggtcctctggacattccaagggagattccggcttaaacccaggatgaaggtcgataaggccattcagaccactgcaaggaagacggaggttttcctctccgcctcacgcgatgagagagatccacaggagctctggtctttccttgttcatcaagaggttgatgaaatcattactgccggaggcatcatcactcagtcggttgccgctaagtgtgtctcgtatctactgaggctgtgctgcatgcgccatttcttcagcatagactatgatttggccacccacagctgcaactactggatctgtgaaggcatcatacagcaagggcagggcaccgatcaagaagacgaagaacaggcttggagagttgctgatgctatgcagcatgagatgagactggatgtgcagtatttgcccctctttgacatggtaataatgcgtggtgagaccaccaccatgccatcctcctccagcacttcaccaccctactggcatttgccagtaccagccgtagccattcctaacctagacatgctccaacattatcctgaaaaacaaataagcattctcaagctctctcgccgcaccattagcccttcatcaccacccttcctctactgccatggccttaagttcctatggctcgaccactgtgaagacctagaagaaatcaacacaattgagacaacagggaaggaggaggacatcagccaatgcttccagagtctgtgggtgctagacgtgcgatatacacgctgcaagaggatcttgtctgcacggatgctgggattcatgactcacctcagggagctaaatgtggtgggagcacaggattgggacatcggccagctgcagagccaactacctaacatccgaaagctccgagtaacaaagtcaacattaggctgctcggaaaataacttgttcttgggaatgaacaagatggagcttcttgacttttcagggaaccatacaaaattttctgggttgagcactagcagcaaccagcttgagactatgatcattactgatgggtgtgttgggatacaaaagttctctttcaagggatgttctaagctgaagaatctgttgttgcgtggactgtttgagggactttgcatcatagacttgtcggccacagcagtcaaaatacttgatctcagtgccatgacagctcggagcctgaatgagctcttcttgaatgactgccacaagctttgtgcaatcctgtggccatcaccagaagtcaagaacaaaagttacttcaagaagctgcacattgacaccacggggtcatcggcactcatgaaagagaactccacagacggtgtcactgcccccagtgtcatgacatcatcatcggcatcattatctgtggttcatggtgctagagcaccctcagaatttgattggtgtatcaagctaaaagatgcaaggctcctcaggtcacttgtgccgcccttcaaagaatatttcactaccaaatttgtacatgtggagatttactcttctgcccctgctttttctcctggcaacgacgacaaagatgttgaggtcacctttgaagaccatccacttctgcagccaagtgaaggtgacgctcccatgctcaccccatgcccaagtattccttctcatgatgccctgtccttctacgcccacatacaagaccagaagctaaggtgcactaaatcattgccggagggtgaacagactatgactagtattgttataccagatataatatgtcgcagtacttatatcctgcatgtgcatgatagcttgtccatcaccaatatcccaggccctgctcctacactaggttcaacatggcgctatctagagtggtgccgagttgagcggtgcccaaagttggaatatgtcttcaccactcctcagttgcaaggaagagatgatgtcttcgtcttttattttctacagacattctgggcatcagagctccctaaagcacgttacatatggaattggaccccgttccagtttaaggcaacatttaatggtttgaaattgctgcacattgacttgtgccccaggctgatacatgtactgcccttggttccaatggtgaaccaaagtctacgatatctcgagacgctcgagatcgtgtggtgtggtgatctgagggaggtcttccccttgtacaccacagatgccaaaagcaaacaagaacaacaacaatcagcaacaactaccatggagttcaagcatctgaagcgtatccatctgcatgagcttccaaagctgcagggcatctgtgggcaatggaggatatccgcgcccaagctcgagactgtgaaaatcacgggctgctggagcctcaagcgcctgccggccgtcagcaaaaagccaagcaagatggtagagtgtgattgtgagaaggaatggtgggacaggctgcactgggatgggttggaggccaatcaccacccttccctgtacaacccaacccactcacggtactacaagaagaccctgctcaagggctccgtgcttagatga

SEQ ID NO: 2476 - protein, 1089 aa, Sorghum bicolor
MDTLGDEDVAAWWLQKRLLLDSEKRQGFDALVLLVSWEVWKERNVRIFRNEVSTVATIAKRIHDEGSLWIEAGFIPLATVIKADSIEAAAGRILDELKEGNNNSSRGITGGREHVIYFDGWDGLGASAVLRAVAQRLTPGALEAQGELRFDQIIHIDCSKWESRRSLQRAIAEQLDLPAQVMELFDRQDEEDDFHGIPRGSRTEIPQVLEAMYQCIQKLNHRFLVILHNGSSQEIDLSTFGFPLFGYSTNKVLWTFQGRFRLKPRMKVDKAIQTTARKTEVFLSASRDERDPQELWSFLVHQEVDEIITAGGIITQSVAAKCVSYLLRLCCMRHFFSIDYDLATHSCNYWICEGIIQQGQGTDQEDEEQAWRVADAMQHEMRLDVQYLPLFDMVIMRGETTTMPSSSSTSPPYWHLPVPAVAIPNLDMLQHYPEKQISILKLSRRTISPSSPPFLYCHGLKFLWLDHCEDLEEINTIETTGKEEDISQCFQSLWVLDVRYTRCKRILSARMLGFMTHLRELNVVGAQDWDIGQLQSQLPNIRKLRVTKSTLGCSENNLFLGMNKMELLDFSGNHTKFSGLSTSSNQLETMIITDGCVGIQKFSFKGCSKLKNLLLRGLFEGLCIIDLSATAVKILDLSAMTARSLNELFLNDCHKLCAILWPSPEVKNKSYFKKLHIDTTGSSALMKENSTDGVTAPSVMTSSSASLSVVHGARAPSEFDWCIKLKDARLLRSLVPPFKEYFTTKFVHVEIYSSAPAFSPGNDDKDVEVTFEDHPLLQPSEGDAPMLTPCPSIPSHDALSFYAHIQDQKLRCTKSLPEGEQTMTSIVIPDIICRSTYILHVHDSLSITNIPGPAPTLGSTWRYLEWCRVERCPKLEYVFTTPQLQGRDDVFVFYFLQTFWASELPKARYIWNWTPFQFKATFNGLKLLHIDLCPRLIHVLPLVPMVNQSLRYLETLEIVWCGDLREVFPLYTTDAKSKQEQQQSATTTMEFKHLKRIHLHELPKLQGICGQWRISAPKLETVKITGCWSLKRLPAVSKKPSKMVECDCEKEWWDRLHWDGLEANHHPSLYNPTHSRYYKKTLLKGSVLR

SEQ ID NO: 2477 - DNA, 2316 bp, Sorghum bicolor
atgcaactttctctgcaacaacagcttgggatggccaagcttccagttctacgagtgaggccgaggttactgctgctgctatttcttacccactttatgctgcaactgcaatgctccaatggactccagagtgaaccaaaacaaacatacattatctaccttggtgaccgagagcatgacgatgttgaccttgtcactgcttcacaccatgacctgcttgcttccattctcggcagcaaggaggaggctctagagtcaattatctacagttacaggcatggattctctggcttttctgcactgctaacaaaatcacaatctagaaagattgcagctctggctggcgtggttagtgtaacaaaaaaccaattctaccgcacacatacaactcgaagctgggacttcgtcggactggactacaatcagccaaatggattgcttacaaacgctaaaaatggagaggacatcattgtcggtgtcgttgacacaggtatttggcctgaatcgttaagctttgctgaagatggttatggtccccctcctccaaaatggaagggaatttgccaagctggtgcctcgtttggcgcaaacaactgcaatagaaagctcataggtgcacggtggtatgctggtgatgaccttgacaaaagcctactggatggtgagttcttgtctcccagggatgccaatggccatggaacccacactgcttcaacagctgctggcaaccttgtccacaacgttagctttaatgggttagcgcacggcgtggcgcgtggcggtgctcctcgtgctaggcttgctgtgtacaaggcctgctggggtgcatttccaactcatggctcatgcagtggcgccggtatcatgaaagccatagacgatgccattcacgatggtgttgatgtattatctctgtctattggggggccatcagaatatcctggcacattgcacgccgttgcaaatggcatcactgttgttttctcagctggaaatgatggtcctgtcatccagacggtgcagaatgtgtcaccatggctgctaacagttgcggcaacaaccgttgatcgcttatttcccacggttatcacccttggcaacaaccaaaggcttgtgggtcaatctttgtttgtggcaacagaaggggcagatcatttctatgaagttctaggttatgatgctgaaacgtgtgaccctgcctacataaacagcacagatgtaaagggaaagatcatcttctgcatcacacctagcaagatgtctccaccaccaaaattgtctgccattagttcattactgcttgaaaatggagggaaagggttcatattttcacaatataacaaggatacacttgatcagtggcaatacaccagcacgaagattcctttcattgctgttgatttggagatcgccaaccagttggtgcaatacctaacgacaacaagtgatactcctaaagcaaagatatctttgacccaaacaactattggaagtggaattcctgccccaaaggtagcagcgttttcatctagagggcctagccccatctatcctggggttcttaagcctgatatagctgcacctggggtgaccattttggcagctgccccacaaatccctatttacaaagctctgggtgttcactactatttttcttctggaacatccatgtcttgccctcatgtgtctgggattgtcgccttgcttaaatcagtgcatcctgactggtcacctgctgccctgaaatcggcactcatgacaactgcacttagcactgacaacaatgggttcccaatacaagcagatggaactccagtaaaaattgccgaccctttcgattacggagcagggtttgtgaacccaagcaaggccgacgatccaggtcttatatatgacattgatccatcagattatctcaggttcttctcctgcgtgggaggactgggtgtcaacaacaactgcacgacacctaagtcagctgtagcagacctgaacctcccatcgatcgtgatccctaatctcaaggcatccgagactgtcatgcgcactgtcaccaatgttggccagcctgatgcactgtacaaagcattcttccagccgcctcctggcgtggagatgtccgtcgagccatcagttttggtgttcagcaaggagagaagggttcagagtttcaaggtggtgttcaaggcgatgcgcaagattcagggtgactacatgtttggcagcttaacatggcacgatggagggagccactgggttcggatcccgatcgcagcccgcatcataattgaggacttctattcgaccgtctcatga

SEQ ID NO: 2478 - protein, 771 aa, Sorghum bicolor
MQLSLQQQLGMAKLPVLRVRPRLLLLLFLTHFMLQLQCSNGLQSEPKQTYIIYLGDREHDDVDLVTASHHDLLASILGSKEEALESIIYSYRHGFSGFSALLTKSQSRKIAALAGVVSVTKNQFYRTHTTRSWDFVGLDYNQPNGLLTNAKNGEDIIVGVVDTGIWPESLSFAEDGYGPPPPKWKGICQAGASFGANNCNRKLIGARWYAGDDLDKSLLDGEFLSPRDANGHGTHTASTAAGNLVHNVSFNGLAHGVARGGAPRARLAVYKACWGAFPTHGSCSGAGIMKAIDDAIHDGVDVLSLSIGGPSEYPGTLHAVANGITVVFSAGNDGPVIQTVQNVSPWLLTVAATTVDRLFPTVITLGNNQRLVGQSLFVATEGADHFYEVLGYDAETCDPAYINSTDVKGKIIFCITPSKMSPPPKLSAISSLLLENGGKGFIFSQYNKDTLDQWQYTSTKIPFIAVDLEIANQLVQYLTTTSDTPKAKISLTQTTIGSGIPAPKVAAFSSRGPSPIYPGVLKPDIAAPGVTILAAAPQIPIYKALGVHYYFSSGTSMSCPHVSGIVALLKSVHPDWSPAALKSALMTTALSTDNNGFPIQADGTPVKIADPFDYGAGFVNPSKADDPGLIYDIDPSDYLRFFSCVGGLGVNNNCTTPKSAVADLNLPSIVIPNLKASETVMRTVTNVGQPDALYKAFFQPPPGVEMSVEPSVLVFSKERRVQSFKVVFKAMRKIQGDYMFGSLTWHDGGSHWVRIPIAARIIIEDFYSTVS

SEQ ID NO: 2479 - DNA, 2322 bp, Sorghum bicolor
atggtggtgggaacggcgctgctgcgcggcggggtctccatctccatctcctcggtgtggatcctcctgttcctctcctccctgctcctcctctcgccgtcggcggcgtccgtcgacttcagccactgcggcggctgcgacgacgccgacgacggcgccctctccagcgcctacaacatcctgcagtgccagaaggtcagcgacttcctcatcgccgcggcctacttctccatcccgctcgagctgctctacttcgccacctgctccgacctcttccccctcaaatggatcgtgctgcagttcggcgccttcatcgtgctctgcggcctcacgcacctcatcaccgtcttcacctacgagccgcactccttccacctcgtgctcgccctcaccgtcgccaagttcctcactgcactcgtctccttcgccacggccatcaccctgctcacgctcataccgcagctcctcagggtcaaggtcagggaaaacttcctgatgaacaaggcgcgcgagctggaccgggaggtggggatgatgaaaaggaaagaggaggccagctggcacgtgcgcatgctcacgcaggagatccgcaagtcgctcgacaggcacaccatcttgtacaccaccatggttgagctctcaaaggcgctggagctgcagaactgtgctgtctggatgcctaatgagaccaggagcgagatgatcttgacgcatcagctgagggaaagggatataatggacccacagaaccgctctattcctatcgatgatccggatgttctagaaataaaggcgaccaaggatgcaaaagttattgggccagattcggcgctaggggttgctagccgaagcaagcttgaagcagggcctgtggctgcaataaggatgccgatgttaagggtgtcgaacttcaaaggagggactccggaagtgatgcagacgagctatgccatcttggttctggttttgcctaatgatgcttcgttagggtggggtcggagagagctggagattgttgaagtagttgctgaccaagttgcagtcgctctgtcacatgctgcgctcctagaggagtctcagctgatgcgagagaagcttgccgagcagcatagggacttgctacgggcaaagcatgaagccatgagggcaggggaagctcggaattccttccagactgcaatgtacgatggaatgcgaaggccaatgcactcaatccttggtctcgtctcgatgatgcaacaggagagcatgaatccagagcaaaggcttgtgatggatgccattgccaagacaagcagtgttgcatccacgctgatgaacgatgtgatgcaaacatcaacaatgaattgtgagcacttgtctttggtaaggaggccggtcaaccttcattcctttatcaaagaagctgttggagtggtcagatgtctaactggttgcaagggtgtggagtttgagtttcaagtggataattctttgccagaaaggatcattggtgatgagaagagagtcttccatattgtcctgcacatggtaggcaccctaataaaccgatgtaatgccggctgtatctcgttatatgttagtggtcataatgaggttgaagagaggcataatcatgactggatgctgcgaagagcaaacttctctggaggctatgtatgtgtcaaatttgagattagggttagaaaatccaaggacaatcttttgagttcatcaagcagtgagataaggcatgggtccaaacccaacaattctgagatggggcttagcttcaatatgtgtaagaagattgtgcagatgatgaatggtaatatttggtcagtatcagattctaaatgcattggagaaaccatcatgcttgtcctccagttccagttgcaacctgtgactccagtctctggagcgtcctcagatttgtaccgatcgtccgccattcccaactttaatgggctcagagtcctccttgcggacagtgatgacaccaaccgagctgtaactcacaggcttctggagaagcttggttgccgagtcctttcagtcgcttctggtgtccaatgcatgagctcctttgctgccgagtcatccttccagctggtgattcttgatcttgccatgcagacgatggacggattcgaagtagcccgcgcgatcaggaagttcagtagcaatagttggctgccgttgattgttgccctagcagcaagaatcgacgacaacatccgggatcgatgccagaggtcaggaataaatggcctgatccagaaaccagtcacactagctgcactgggagatgaactgtatagagtccttcagaacaattaa

SEQ ID NO: 2480 - protein, 773 aa, Sorghum bicolor
MVVGTALLRGGVSISISSVWILLFLSSLLLLSPSAASVDFSHCGGCDDADDGALSSAYNILQCQKVSDFLIAAAYFSIPLELLYFATCSDLFPLKWIVLQFGAFIVLCGLTHLITVFTYEPHSFHLVLALTVAKFLTALVSFATAITLLTLIPQLLRVKVRENFLMNKARELDREVGMMKRKEEASWHVRMLTQEIRKSLDRHTILYTTMVELSKALELQNCAVWMPNETRSEMILTHQLRERDIMDPQNRSIPIDDPDVLEIKATKDAKVIGPDSALGVASRSKLEAGPVAAIRMPMLRVSNFKGGTPEVMQTSYAILVLVLPNDASLGWGRRELEIVEVVADQVAVALSHAALLEESQLMREKLAEQHRDLLRAKHEAMRAGEARNSFQTAMYDGMRRPMHSILGLVSMMQQESMNPEQRLVMDAIAKTSSVASTLMNDVMQTSTMNCEHLSLVRRPVNLHSFIKEAVGVVRCLTGCKGVEFEFQVDNSLPERIIGDEKRVFHIVLHMVGTLINRCNAGCISLYVSGHNEVEERHNHDWMLRRANFSGGYVCVKFEIRVRKSKDNLLSSSSSEIRHGSKPNNSEMGLSFNMCKKIVQMMNGNIWSVSDSKCIGETIMLVLQFQLQPVTPVSGASSDLYRSSAIPNFNGLRVLLADSDDTNRAVTHRLLEKLGCRVLSVASGVQCMSSFAAESSFQLVILDLAMQTMDGFEVARAIRKFSSNSWLPLIVALAARIDDNIRDRCQRSGINGLIQKPVTLAALGDELYRVLQNN

SEQ ID NO: 2481 - DNA, 1287 bp, Sorghum bicolor
atgagctcgcgcgtcaccaagtcgctgccttttctcgtcgtcccgtcggaggccacgcccgccggcgtcctccccctcaccgccatggacagagctcttgcttccctgcccatggcagccctgcttgtcttcgagaaccccatcgatcagccagccgagagcatcaggagagctctgtcccgagcgcttgttctctactacccaatggccggccgcctcaccatcaccggcgaccagctgaaaatcgcgtgcaccggcgagggcgtggcgttcgttggggcgtccgcgagctgcacgctgcagcagggcagactcttcggcccgcatccggtggtcaccgtcgaggacctcactatgaactacaccgcccagtacagtacggacccgccgttgctgctggtgcaggtgaccgagttctcctgtggtggcttcgtcgtcggggtgacgtggaaccacgtcgtcaccgacggcgccgggatggcgcagttcttgcaggccgtcggcgagtatgcccgcggcttccgttccccttccatcttgccggtgagggtggaccacgccctccctgagcttcccccgccgataaccaccatgaccaaggcactcgtctgcagccagcacagcgacttcccgtcctcctacatcactgttccccttagcttcatcgaccgcgtcaaggacgagttccgtcgtcgtcgtcacagcagcagcggcggcggacagatggcgccggcgtcttgcaccgcgttcgacgtcttcaccgccaccctatggaagtgtcgtacgcgcgcgacgatcgccagcgccgccagccaggacgcgcccacggcgctcgccttcacagtgaacgtgaggaagccggcgaaggccaaggatggctactacggcaacgtcttcgccttcggccttgctgcctcgacgctgcgtgaggtcgccgacggcgacatcctggacctcgtgaggctggtaaaggacgccaaggcaagggtcccatacatgtttgctgatggagcggcgtacatcgccgacgagatgagcggccggctaaatggcctcgacggttatgacaccctgtacgtgaccagctggtggaatctcggcttggacgacgtcgacttcggcagcggcggcgctgaacgtgtcatcgggaacatggagcgcaaggtggtgccaggctgcatcctgtgtgggaggaaggacaaggccgagggtgtcgccgccatggcgctctgtgtcaagcaggagcacgcggagaccttccatgcggagctgcaaagcctcaagtga

SEQ ID NO: 2482 - protein, 428 aa, Sorghum bicolor
MSSRVTKSLPFLVVPSEATPAGVLPLTAMDRALASLPMAALLVFENPIDQPAESIRRALSRALVLYYPMAGRLTITGDQLKIACTGEGVAFVGASASCTLQQGRLFGPHPVVTVEDLTMNYTAQYSTDPPLLLVQVTEFSCGGFVVGVTWNHVVTDGAGMAQFLQAVGEYARGFRSPSILPVRVDHALPELPPPITTMTKALVCSQHSDFPSSYITVPLSFIDRVKDEFRRRRHSSSGGGQMAPASCTAFDVFTATLWKCRTRATIASAASQDAPTALAFTVNVRKPAKAKDGYYGNVFAFGLAASTLREVADGDILDLVRLVKDAKARVPYMFADGAAYIADEMSGRLNGLDGYDTLYVTSWWNLGLDDVDFGSGGAERVIGNMERKVVPGCILCGRKDKAEGVAAMALCVKQEHAETFHAELQSLK

SEQ ID NO: 2483 - DNA, 318 bp, Sorghum bicolor
atggtgaaggcatataccgttcttatggccctttgcatggtaattctgttttcttgcaatgccgtggagggtggagcatacatgaggcatgaagcactttctcgcaaaggtctaaaagaacaaagaaagctagccactattagtggactgaatccttcagttagcaatttgtcaggtcaggcatctagcaacgttaatggtgtgaacaacaataactctgaaagcacaaatactaatatgccggacgccgattcccaccatgacctctcagttgatcagtaccgcaggattactcacaacaatgagaataagccgtga

SEQ ID NO: 2484 - protein, 105 aa, Sorghum bicolor
MVKAYTVLMALCMVILFSCNAVEGGAYMRHEALSRKGLKEQRKLATISGLNPSVSNLSGQASSNVNGVNNNNSESTNTNMPDADSHHDLSVDQYRRITHNNENKP

SEQ ID NO: 2485 - DNA, 468 bp, Sorghum bicolor
atgggcatcgtcgacgtcgtctccgagtactgctccttgcccaggtctcgccgccatctcaagaagaggaagcagttccagacggtggagatgaaggtacggatcgactgcgaaggctgcgagaggaaggtgaagaaagcactggaggacatgaaaggggtgagctcagtggaggtgacggcgaagcagaacaaggtgacggtgacggggtacgtggacgccggcaaggtgatgcggcgggtggcgtacaagacggggaagcgggtggagccgtggccgtacgtgccgtacgagatggtggcgcacccttacgcgccgggcgcctacgacaagaaggcacccgccgggtacgtccgcgacgtcgtcgctgaccctaccgccgcgccgctcgccagggcgtcgtccaccgaggtcaggtacaccgccgcgttcagcgacgagaaccccaacgcctgcgccgtcatgtag

SEQ ID NO: 2486 - protein, 155 aa, Sorghum bicolor
MGIVDVVSEYCSLPRSRRHLKKRKQFQTVEMKVRIDCEGCERKVKKALEDMKGVSSVEVTAKQNKVTVTGYVDAGKVMRRVAYKTGKRVEPWPYVPYEMVAHPYAPGAYDKKAPAGYVRDVVADPTAAPLARASSTEVRYTAAFSDENPNACAVM

SEQ ID NO: 2487 - DNA, 3228 bp, Sorghum bicolor
atgcggtccctcttctcgcggcacgcgcgccaccccggtacgccgccgcccccgtctttctccggcggcgttgagacccctcctcgtcgccgctcgaaggagaacgtcgacccctcctccccggcgcgcaactaccaccactcagccctcgaccacggcgcctccccgtttcgctccccgtcctccgcggccaaaccgctctcctcccgcaaccgcctgccaccgcgtccgccatcctctaacccactaaagaggaagctcgaagtctcctctgcggcgggccctgcgcacgacgccgcgcccagcgccgactccggcgtccaggtggtggtgaggatacggccgtcgtgctgggtcgatgaggaggaggcaggcgaggatgggcgggggccggaggcctgcgtgcgcaagacggcggccaactcagtcgcgatccaggggcaggacttcacgttcgatgctgttgctgactcggtctccacgcaggaggatatcttcacccttgttgggctgccacttgttgaaaattgcttatcgggtttcaacagctccatatttgcctacggacagatctacaatgaacagatcactgatttgctagatccctcgcagaagaatcttcagattagagaggatgtcagaactgcctgtgtttatgttgaatcattgacaaaggagttggttttcaccatgaaggatgtaactcagttgttggttaagggcctggcaaaccggaggacaggggcaacaagtgcaaatgctgacagctcacgctcgcattgtgtttttacgtgtgtcattaagtcagattctaagaatccagaggatggctcaagcatcacaagatcaagcaggataaacttggtagaccttgctggatcagagcggcaaaaactaacacatgcagctggggatcgattgaaagaagctggaaacataaaccgttcactttcacagcttggaaacttgattaatatacttgcagaaatatcgcagtctggaaaacaaaggcaccatgttccatatcgtgattccaagctcacttttctattacaagaatcccttggaggcaatggcaaactggcaatgatttgtgctgtttcaccatcccaaagctgtaagagtgaaacgttaagcacacttaggtttgcccaacgtgcaaaagctataaaaaacaatgccctagttaatgaagagaaagttgaagatgtaaatgcgctgcgtgagcaaatcaggcaattgaaggatgaacttcaccgaatgaaatctaagggatgcatagaagggaacaatggcagctttgccactggatggaaccctaggcgcagtttgcatctgttgaaaatgagcttgggtcatcctgcaacattccaatgtataaaagaagatagtgatgaggaaatggaaattgatgagaatgatattgagaagccctacaatcatgaaaatattgcaatgtctcctattaacgttaaagaagacaccaaacgtttagcttctatggatgtaagtgctggaacttcacatgttgaagatcttgacagggataagaatttgatatccataaaaaggtcctgctgtagtgctaacaaatttaacactggtactgatattggagatggaaaatgcaaattaaacattgccgccagtatacagaggggacttcaagtcattgaaagtcaccaaaacaatagtgcatggaggagagcatcggttggattaaatgctagaatcatggatattcagccttgcaaggttgatgttgcaattcagactgatcctgaagaatatgaatccagagataaccctctagctctgattcctagttgtctgcttgaagcttctgcaaatgagagtaggaatcccagtgcttgcagagacctacaactagtaccggctgatgtgacagtaccatctgatgaccaaaagcagtggcatttgctgaaagctgtggagaaggtcttggctggagctatcaggcgagagatggcacgtgatgaacagtgtgcaaagcaagctgcagaaattcaacaactgaatcgtctggtgcaacagtataagcatgaacgcgaatgtaatgctgtaattgcacaaacacttgaaggaaaaattgctaggcttgagagtctcatggatggaactttaccaactgaagaattcatgaatgaagagtttttatcacttatgaacgagcataagatcctccaaaagaaatatgacaaccatcctgatgttttgcatgctgaaattgagttgaagagactccaggaggaattggacatgttcaggaactctagggacgagaaagaagttctacaggaggagatacaagatctgaaaaatcagttgcattacatgctttcatcatcgtcatcaatctgtagactctggcctccagtgccattgtgtcagggaagtaattctgaacctggaacaaaagacaaagatggagatactaattttggggacactcctaattggactgaagctgagagtaaatggattacactcacagaagagcttagagttgaacttgaagcagcaaaatcccttgttggaaagttgcagtcagaactggattctgagaagaaatgctcagaagaactaaaggaggcagtacaaacagctatccaaggagctgcaagacacctggaacaatatgctgatcttcaagagaatcattttcgtttgcttgctctgcataggaggatgcgtgagggtgttgaggatgtgaatatgagggcagaaaaggctggtatcaaaggtgctgaattgcggttcatcaactcccttgcagctgaaatttcagtcctaaaagctcaaaatgaaggccttcagggccagctaagggatactgctgaagctgttcaggcagctggtgaattgcttgttcggttgaaggatgcagaggaagcagaaacactagccaagaagcaggctttagtggctgagcaagagacagagaaagcctatcaggagattgacaacttgaaaaagaactatgatcaggaaatccttgctctaaagcagcgtctcacagaatcctctcagtgcaaggacgatacattacggccacatgaaccgaacgatcttgagcctcggtatgacacagctggtaaccccagcgggcaggagttcaataccctgcaacaaggtggatcattggaggtctccaagagcacagacctcaactcgtggttttatggatacgacaaatgtaacatttga

SEQ ID NO: 2488 - protein, 1075 aa, Sorghum bicolor
MRSLFSRHARHPGTPPPPSFSGGVETPPRRRSKENVDPSSPARNYHHSALDHGASPFRSPSSAAKPLSSRNRLPPRPPSSNPLKRKLEVSSAAGPAHDAAPSADSGVQVVVRIRPSCWVDEEEAGEDGRGPEACVRKTAANSVAIQGQDFTFDAVADSVSTQEDIFTLVGLPLVENCLSGFNSSIFAYGQIYNEQITDLLDPSQKNLQIREDVRTACVYVESLTKELVFTMKDVTQLLVKGLANRRTGATSANADSSRSHCVFTCVIKSDSKNPEDGSSITRSSRINLVDLAGSERQKLTHAAGDRLKEAGNINRSLSQLGNLINILAEISQSGKQRHHVPYRDSKLTFLLQESLGGNGKLAMICAVSPSQSCKSETLSTLRFAQRAKAIKNNALVNEEKVEDVNALREQIRQLKDELHRMKSKGCIEGNNGSFATGWNPRRSLHLLKMSLGHPATFQCIKEDSDEEMEIDENDIEKPYNHENIAMSPINVKEDTKRLASMDVSAGTSHVEDLDRDKNLISIKRSCCSANKFNTGTDIGDGKCKLNIAASIQRGLQVIESHQNNSAWRRASVGLNARIMDIQPCKVDVAIQTDPEEYESRDNPLALIPSCLLEASANESRNPSACRDLQLVPADVTVPSDDQKQWHLLKAVEKVLAGAIRREMARDEQCAKQAAEIQQLNRLVQQYKHERECNAVIAQTLEGKIARLESLMDGTLPTEEFMNEEFLSLMNEHKILQKKYDNHPDVLHAEIELKRLQEELDMFRNSRDEKEVLQEEIQDLKNQLHYMLSSSSSICRLWPPVPLCQGSNSEPGTKDKDGDTNFGDTPNWTEAESKWITLTEELRVELEAAKSLVGKLQSELDSEKKCSEELKEAVQTAIQGAARHLEQYADLQENHFRLLALHRRMREGVEDVNMRAEKAGIKGAELRFINSLAAEISVLKAQNEGLQGQLRDTAEAVQAAGELLVRLKDAEEAETLAKKQALVAEQETEKAYQEIDNLKKNYDQEILALKQRLTESSQCKDDTLRPHEPNDLEPRYDTAGNPSGQEFNTLQQGGSLEVSKSTDLNSWFYGYDKCNI

SEQ ID NO: 2489 - DNA, 675 bp, Sorghum bicolor
atcaccttgtactatgccgtttccctagccacagtagtagccctcctttggtttcataagcccagagccgtgagagccggcgacaagagcaagcacgagaagcgactgccgccggggccatggacgcttccgatcatcggcagcatccaccacgtggtgcgcggcctcggacaccgcacaatgatggagctgtcccgccggcacggcccgctcatcttccttaggctcggcgaggtcccgacgctggtggtgtgcagtgccgaggcggcggagctggtgatgaagacgcacgacctcgccttcttctcccggccgaccaccagcgtcaccatcgacatcgtcggctgcaagggcaaggggctcggcttcgccccctacggcgaccgcttgatccagatgaagaagaccgtcgtcgtcgagctcctgagcgccgcccaggtgaagcgcatcgagtccatcagggccgacgaggtaggccgcctcctccgatccgtcgccgccgccggcggcgttgttaacgtcagcgacgaggtgaaggcgctcgcgccggatctcgtggcgagggccatgttcggtggcaactgcgccgagaagtccgacgacttcatccgccggtacaacgaggtcagccagctggtgtcggggttcttcctggtggatctgttcccgtcgtcg

SEQ ID NO: 2490 - protein, 225 aa, Sorghum bicolor
ITLYYAVSLATVVALLWFHKPRAVRAGDKSKHEKRLPPGPWTLPIIGSIHHVVRGLGHRTMMELSRRHGPLIFLRLGEVPTLVVCSAEAAELVMKTHDLAFFSRPTTSVTIDIVGCKGKGLGFAPYGDRLIQMKKTVVVELLSAAQVKRIESIRADEVGRLLRSVAAAGGVVNVSDEVKALAPDLVARAMFGGNCAEKSDDFIRRYNEVSQLVSGFFLVDLFPSS

SEQ ID NO: 2491 - DNA, 936 bp, Sorghum bicolor
atggctgcgcgctgcccctacttcgccgtggaggagtcctcccgcggcatccgctcgggggagtccccggccgcggcgctccgccggatcctcgcgacgcccggtgcgcaccaggcgccctgctgctacgacgcgctcggcgcgcgcctcgtcgagcgtgcggggttccagattgggttcatgggcggtttctgtgtttctgccgctcgacttggcttgcctgatgtcggcctcatttcctatggagaaatgatagaccaagggtgtctcatcaatgaagctgtttcaatcccagtgattggtgatggagacaatggttatggaaactctatgaatatcaagagaaccataaaagggtatatcaatgctggttttgctggaattatgcttgaggatcaggtggcacctaaagcatgtggacatactgaaggaaggaaagttatatcaagggaggaagctatcatgcacataaaagctgctgtagatgctaggaaggagagtggctctgacattgttattgtagcaaggtcagatgctcgccaagcaatttctcttgatgaagcattatggagggtgaaagcatttgctgatgctggagcagatgttctgtttattgatgcccttgcttcagtagaagagatgaaagcattttgtgctgttgcaccagaagttccaaagatggcaaacatgttagaaggtggtggtaaaactcccatattgagccctgctgaacttgcagaaattggtttcaggcttgcagtctatcctttatccttagttggggtatcaatgcgtgccatgcaggatgctctagttgcgataaaagacggcggtgtacctccacctagcatcttgccatcttttcaggagatcaaggatacattgggtttcaaccgctattataaagaagagaaacaataccaagtggacaagtga

SEQ ID NO: 2492 - protein, 311 aa, Sorghum bicolor
MAARCPYFAVEESSRGIRSGESPAAALRRILATPGAHQAPCCYDALGARLVERAGFQIGFMGGFCVSAARLGLPDVGLISYGEMIDQGCLINEAVSIPVIGDGDNGYGNSMNIKRTIKGYINAGFAGIMLEDQVAPKACGHTEGRKVISREEAIMHIKAAVDARKESGSDIVIVARSDARQAISLDEALWRVKAFADAGADVLFIDALASVEEMKAFCAVAPEVPKMANMLEGGGKTPILSPAELAEIGFRLAVYPLSLVGVSMRAMQDALVAIKDGGVPPPSILPSFQEIKDTLGFNRYYKEEKQYQVDK

SEQ ID NO: 2493 - DNA, 1398 bp, Sorghum bicolor
atggagatcgtgcgctcacaccggcaggtcgccgccgcagctgccgcagccggcggcgacggcggcggcgcgggggcgctgccgacctacaaggcggcgccgcagctcgaggtgcggctggaggagttcgagctcttcgccatcgaccgcctccgagttctcaaggggatttcggatggactctcgcgggggaagaggcccgaggagatggagaaactggtcagtgaattgtggaagacatacatgaggcaccaggatcctgcagagactttgaacaaggatataatatcacactttgtgctccgcctagtctactgcagaacggaagaattgcgaaagtggtttctctccatggagactgcactttttcggtatcgctttcggcttgagagtcctgaatcacagaggatgcttatgactgagtttcaactgccatacaaagcactgccacactcagagtttgaggctgtgaaagacaagttgagccaagttgcgcgttccatcggtcaatctgcaaatgtggagcatgtgttcttcaaggtaccttttgaagaagttcctgatcttgttgccagccgccgggtatttctttcaaaaggctatgcttatgtggcgatgagccaggtggtttcgctagtggttactcaattccgctgcaatatctcaaaggcacttgctttaacaaacagaaaatggacagcaaccattaaagaacaagaaaaaggcaggttgactcctattgtcgaagcattaagtaatgcatattttggtcctgattactctcagccaaaggatactgttgacatatctctaaaggatattgaccaactggctaaaagttctttccctctttgtatgcggcatatgctagataagttgagagaaaatcaccatctgaagcatgggggtagaatgcagtttggtctttttcttaagggtgctggactaaagttggaagatgctcttgcattttggagggcggaattttctcagaaggttggttctgagcggtttgacaaggaatatgcctataccatcagacataattatggaaaagaaggaaaacggacagattacacaccatattcatgtcaaaagatcatttctgcaacacctggtgttggagatcaccatggatgcccgtttcgacatttcggcgaagaaaatttgcgggcagcactcaacaaaatgggcgttggtgggcatgcattggaagagataatggataaagtgaagaacaggcattaccagctagcttgcacattaacctttgagaccacacacggtgtctcctgtgattctggaatcaaccatccaaatcaatatttcagtgaaagccagaaaattctgcgagccaaaaaccaaacaatggagagccaatcacaatcagcaacctaa

SEQ ID NO: 2494 - protein, 465 aa, Sorghum bicolor
MEIVRSHRQVAAAAAAAGGDGGGAGALPTYKAAPQLEVRLEEFELFAIDRLRVLKGISDGLSRGKRPEEMEKLVSELWKTYMRHQDPAETLNKDIISHFVLRLVYCRTEELRKWFLSMETALFRYRFRLESPESQRMLMTEFQLPYKALPHSEFEAVKDKLSQVARSIGQSANVEHVFFKVPFEEVPDLVASRRVFLSKGYAYVAMSQVVSLVVTQFRCNISKALALTNRKWTATIKEQEKGRLTPIVEALSNAYFGPDYSQPKDTVDISLKDIDQLAKSSFPLCMRHMLDKLRENHHLKHGGRMQFGLFLKGAGLKLEDALAFWRAEFSQKVGSERFDKEYAYTIRHNYGKEGKRTDYTPYSCQKIISATPGVGDHHGCPFRHFGEENLRAALNKMGVGGHALEEIMDKVKNRHYQLACTLTFETTHGVSCDSGINHPNQYFSESQKILRAKNQTMESQSQSAT

SEQ ID NO: 2495 - DNA, 519 bp, Sorghum bicolor
atggcctctgaggcggcgcgtcggcggcaggagatggcgttggagggtcagcggcacctggaggagaccatcgcagccgcgttccagatcctcgtatccatgaacgacgagctctgcaacgccggcctctggtcctcctcctccgtctcggccgctgccgctggctcccagcaccaccactctgctactacgccgccgccgccacactctgcggactccgacgccgccgacgcagggggcgggcccggccccggcgggtcgctcgacgaggcgaggcaccgctacaagtcagccgtggcggcgctgcgggcctccatctctgccttgtcgtcctgcgctcaggacactggatcaacagaatctgaagctgaccatgctgaaattgagagattggaagagcatgcttctgctttgagaaaggaaattgaaagcaaaaacaagcaagtaaagctcctcatggatcagctccgtgacctaataactgacgtagcaatgtggcagagcccttgctcagtgtga

SEQ ID NO: 2496 - protein, 172 aa, Sorghum bicolor
MASEAARRRQEMALEGQRHLEETIAAAFQILVSMNDELCNAGLWSSSSVSAAAAGSQHHHSATTPPPPHSADSDAADAGGGPGPGGSLDEARHRYKSAVAALRASISALSSCAQDTGSTESEADHAEIERLEEHASALRKEIESKNKQVKLLMDQLRDLITDVAMWQSPCSV

SEQ ID NO: 2497 - DNA, 429 bp, Sorghum bicolor
atggcgcaaccaagaacagcagcgctcctcttcctcctcgccgcctccgtcgtcgccgcggcggcagcagaggtagaggcgccggcaccagcgcgtgctgcggcgacgacgacaaggacgacggggtgccggcgcggggacctggtggtgcgtcagcgcgcgacggggcgcgtggtggaagggaagcccgagtacgcggtggaggtgcggaacgcgtgccggtgcgcgcagtcccgcgtcctgctgcgctgctacgggctcagcagcgtggaggccgtggacccgcgcgccatccgcgccgtcgacggcgagcgatgcctgctccgcggcggccggccgctgccgccgcgcgggggcgccgtgcgattcacctacgcctggatgacgccgcaggacttcccgctcgtcagcgcgcacccgcactgctag

SEQ ID NO: 2498 - protein, 142 aa, Sorghum bicolor
MAQPRTAALLFLLAASVVAAAAAEVEAPAPARAAATTTRTTGCRRGDLVVRQRATGRVVEGKPEYAVEVRNACRCAQSRVLLRCYGLSSVEAVDPRAIRAVDGERCLLRGGRPLPPRGGAVRFTYAWMTPQDFPLVSAHPHC

SEQ ID NO: 2499 - DNA, 435 bp, Sorghum bicolor
atggcatcccaggccatcgagagccaccgtgccggcgctgaggtcgtcaccggaggagacgccatctgcaggaagaagctaatcgagctgctggaggagctcggcctccccaaaggcttcctgcccctcgaggacatccaggagttcggtttcaaccgccagacagggttcatgtggctggtgcaggggaagaagaaggtggagcacaccttcaagaagatcaagcagaccgtgtcgtacgccgccgaggtaacggcatttgctgacaagggtaagctgagtaagatcaccggcgtaaagacaaaggagctgatgctttggctcagcgtcgtcgaggtgtacgtccccgaggcatcgccagagaaggttaccttcaagaccggcactggcctctctgacacctttgatgcctctgcctttgcgttaggagagtaa

SEQ ID NO: 2500 - protein, 144 aa, Sorghum bicolor
MASQAIESHRAGAEVVTGGDAICRKKLIELLEELGLPKGFLPLEDIQEFGFNRQTGFMWLVQGKKKVEHTFKKIKQTVSYAAEVTAFADKGKLSKITGVKTKELMLWLSVVEVYVPEASPEKVTFKTGTGLSDTFDASAFALGE

SEQ ID NO: 2501 - DNA, 2055 bp, Sorghum bicolor
atgctcctgctccgccgcggcgtcttcgtcctcctctcgtcgccctcgcctcgcgcgccgctcgcaaaacctctcctgccccaacgcccgcccagaaccctagccccgacagcgcggcagctcgtggctatgtctgcgccggcgccgaccccggccccgtcggcgggtggggcggggacgatgagccgggacgcgttccgcgcggccgtgaccaacacgctggagcgccggctcttcttcgtgccctccttcaagatctacggcggcgtcgcggggctctacgactacgggcccccaggttgtgccgtcaaggctaacgtcctcgctttctggcgccagcattttgtattggaggaagggatgcttgaggttgactgtccatgtgtgacaccagaagttgtcttgaaagcctctggacatgttgataaatttacagacttaatggttaaagatgaaaagacaggcaactgctaccgtgcggatcatttgctgaaggacttctgtaaggataagcttgagaaggatcacacattgtcaccagagatggtacaagaatacaatagagttcttgctatcctggatgatctctctgcagaacaattgggtgctaagattaaggagtatgggattgttgctccggacaccaagaacccattatcagatccgtaccctttcaatctcatgtttcaaacttccattggaccatcaggtttgagcccagggtatatgaggccagagacagctcagggtatatttgtgaacttcaaagacttgtattactacaatggcaacaagctgccatttgctgcagcgcaaattggtcaagccttcaggaatgagatatctccccgtcaaggccttctgagagtccgtgagtttactttagcggaaattgagcactttgtggacccagaggacaaatcccatccaaagtttggtgatgtttctgatctagagttcttgatgtttccaagagaggatcaaatggccggaaggtctgccacaagacttaaactcggaaatgctgtgtctgagggaactgtgaacaatgagacccttggctacttcattggaagggtctaccttttcttgacacaacttgggattgacaaagatcgtctccgtttccgtcaacatctgccgaatgaaatggctcattatgctgctgattgttgggatgcagagattgaatgctcctatggttggattgagtgcgttggaattgctgataggtctgcctatgacttacgtgcccactcggataaaagcggcgagaaacttgaagcacatgagaagtttgcagaacccagagaagtggagaaattagttataacgccatcaaagaaggaacttggtcttgcattcaaagggaaccagaagatggttcttgaatcattggaagccatgaccgagactgaagcattggatatgaaagctgtgttggaatccaagggggaggttgagttcaaggtgtgtacgcttgggaaggatgttaccataaagaaaaacatggtttcaattaacatcgagaagaaaaaggaacaccaaaggaaatttactccttccgtcatagaaccatcctttgggattgggcgcattatatattgcctttttgagcactgcttctaccaaagggctggcaagacagaggatgagcagttaaacgtattccgttttccccctcttgttgctccaataaagtgcactgtctttccattggtcaagcttgagaaatttgaggttgttgccaagaaaatttcaaaggccttgacagcagcagggatttcacatattatcgacatgacaggtaatacaataggaaaacggtatgcaaggacggacgagattggtgttcccctggcgatcacagtcgataacactataagcgtgacggtgcgcgatcgcgacagcaaggaccagatccgcgttgaggtggacgaggtggcctcggtggtgaaggaagtgacggacgggcagagcacctgggcagacatcatgtggaggtacccggcgcataccacctcggccgccgacgaggaagacgcggagccctga

SEQ ID NO: 2502 - protein, 684 aa, Sorghum bicolor
MLLLRRGVFVLLSSPSPRAPLAKPLLPQRPPRTLAPTARQLVAMSAPAPTPAPSAGGAGTMSRDAFRAAVTNTLERRLFFVPSFKIYGGVAGLYDYGPPGCAVKANVLAFWRQHFVLEEGMLEVDCPCVTPEVVLKASGHVDKFTDLMVKDEKTGNCYRADHLLKDFCKDKLEKDHTLSPEMVQEYNRVLAILDDLSAEQLGAKIKEYGIVAPDTKNPLSDPYPFNLMFQTSIGPSGLSPGYMRPETAQGIFVNFKDLYYYNGNKLPFAAAQIGQAFRNEISPRQGLLRVREFTLAEIEHFVDPEDKSHPKFGDVSDLEFLMFPREDQMAGRSATRLKLGNAVSEGTVNNETLGYFIGRVYLFLTQLGIDKDRLRFRQHLPNEMAHYAADCWDAEIECSYGWIECVGIADRSAYDLRAHSDKSGEKLEAHEKFAEPREVEKLVITPSKKELGLAFKGNQKMVLESLEAMTETEALDMKAVLESKGEVEFKVCTLGKDVTIKKNMVSINIEKKKEHQRKFTPSVIEPSFGIGRIIYCLFEHCFYQRAGKTEDEQLNVFRFPPLVAPIKCTVFPLVKLEKFEVVAKKISKALTAAGISHIIDMTGNTIGKRYARTDEIGVPLAITVDNTISVTVRDRDSKDQIRVEVDEVASVVKEVTDGQSTWADIMWRYPAHTTSAADEEDAEP

SEQ ID NO: 2503 - DNA, 522 bp, Sorghum bicolor
atggcctcgattctggtgacgacgaccaccgccaccgccatcctcttatgcgtcctcttctgtgccgcggcggctaacaccaccgtcgccaacgaccccaacctccccgactacgtcatccagggccgtgtctactgcgacacctgccgcgccgggttcgtgaccaacgtcaccgagtacatggcgggcgccaaggtgcggctggagtgcaagcacttcggcaccggcgaggtcgagcgcgccatcgacggggtgaccgacgcgaccggcacctacaccatcgagctcaaggacagccacgaggaggacatctgccaggtggtgctggtgcagagcccgcgcaaggactgcgaccagacgcagccgctcagggaccgcgccggcgtcctgctcaccaggaacgtcggcatcgcagacagcctgcgccccgccaacccgctcggctacttcaaggatgtcccgctgcccgtctgcgctgcgctgctcaagcagctggactccgacaatgacgacgatcagtaa

SEQ ID NO: 2504 - protein, 173 aa, Sorghum bicolor
MASILVTTTTATAILLCVLFCAAAANTTVANDPNLPDYVIQGRVYCDTCRAGFVTNVTEYMAGAKVRLECKHFGTGEVERAIDGVTDATGTYTIELKDSHEEDICQVVLVQSPRKDCDQTQPLRDRAGVLLTRNVGIADSLRPANPLGYFKDVPLPVCAALLKQLDSDNDDDQ

SEQ ID NO: 2505 - DNA, 720 bp, Sorghum bicolor
atgcatgtttgtttgcagatgggtatactggtgattacggtggacctagactgctgtcgctgtagagccaagatcaccaaagtcctcgactgtctcaaagaggaattctgcatcgagaaggtggagttcgaggacaagaaggagaagaaggtggtggtggtgcgcgggaaattcgacgccgagaagctctgcaagaaggtctggtgcaaggccgggagtaaggtcgtgaaggagatcatcatcgtggacgtctggccgattccacccaagccacccaagccatgcgatccttgcaatcccaagcctgagaaatgctgtgtctgtgaccactgcaagcccaagcctgagaaatgctgtgtctgtgatcactgcaagcccaagcctaagcaggagcaaaagcctaagcctgaggaaaagcctaaggcggcgacgcccaaaacggagtacaagttcgtgccgtacccgtacctggtgccgaaccctgggatgtgccagagctggccgtggcagtgccctcctcaccagcagtgccagtgctgccagaagcctccttcgccgccgccggcaccgccgcagcggccaccgtgcacctgttcgagccacggtagctgtggctgcggccagacactgccggtctggccaccgcagccgccggtctggcctccaccgtgggcaggctgcaatgttgtcgccgacgagaactcgtgctctgtcatgtga

SEQ ID NO: 2506 - protein, 239 aa, Sorghum bicolor
MHVCLQMGILVITVDLDCCRCRAKITKVLDCLKEEFCIEKVEFEDKKEKKVVVVRGKFDAEKLCKKVWCKAGSKVVKEIIIVDVWPIPPKPPKPCDPCNPKPEKCCVCDHCKPKPEKCCVCDHCKPKPKQEQKPKPEEKPKAATPKTEYKFVPYPYLVPNPGMCQSWPWQCPPHQQCQCCQKPPSPPPAPPQRPPCTCSSHGSCGCGQTLPVWPPQPPVWPPPWAGCNVVADENSCSVM

SEQ ID NO: 2507 - DNA, 882 bp, Sorghum bicolor
atggccatgcaagcgcggcaccactcccacgactacttcctatcgagggccggctccctgttcttggacgagtacgccgggtgcgtgcccctgccaacgtcgccggcggtggggatccgggacatgccgctgctcagcgactttgcaggcagcgagcttagctttggctacagtttcctgccgaggaagcgggcgcgcatggaggatcaccgcgttgttctgcccccggcggtgatgcaggggctggtgcaagtgcaagtgcaactgccgatgacatccagtaacgtgatgggttccggcgccgtgacgtccacaagtgggagggagatcgacgcgctgctaagagtggagagcgagaggatgcgcgcggcgctggaggcggcgtggcggaggcacgcgcgggcgctggcgtccgccgtgggtcgaacagcggcgggacggatgcgcgcggcggagtcggagctggacggcgcgctgcggcgcaacggggagctggaggagacggcgcggcagatggtcgcggagtgccaggcgtggatgggcgtcgcgaggagccacgaggccgtcgccgccggcctccgcgcctcactcgaccagctcctcctccagtcgcccccctgcgcggtggcgactggcggcgcttgcgagggtcatggggagaccgaggacgcgcggtcgtgctgcttcgagccaggctgctccggcggccgcggaccacagggggcggtggaggagtgcaggtcgtgcggcggcggcgaggcgtgcgtgctgctgctcccgtgccgccacctgtgcctgtgccgcgcgtgcgaggccgccgtcgacgcctgcctcgtctgcgccgcagccaagaacgcatcgctccttgtcctggtctcttga

SEQ ID NO: 2508 - protein, 293 aa, Sorghum bicolor
MAMQARHHSHDYFLSRAGSLFLDEYAGCVPLPTSPAVGIRDMPLLSDFAGSELSFGYSFLPRKRARMEDHRVVLPPAVMQGLVQVQVQLPMTSSNVMGSGAVTSTSGREIDALLRVESERMRAALEAAWRRHARALASAVGRTAAGRMRAAESELDGALRRNGELEETARQMVAECQAWMGVARSHEAVAAGLRASLDQLLLQSPPCAVATGGACEGHGETEDARSCCFEPGCSGGRGPQGAVEECRSCGGGEACVLLLPCRHLCLCRACEAAVDACLVCAAAKNASLLVLVS

SEQ ID NO: 2509 - DNA, 1566 bp, Sorghum bicolor
atggtggacgtagaactgttctataaggacactagcgatcacagcatcagctctgaggaagaagatatgcttatcaggagttgtagcaatctcaatgtgagttttggataccattgtgattcttctcagagcttttctcctgaaaatgatcatgggaatggcatttctcctaagaacatatttgggactaataccatgatcgggtcacgaaatggctcatttacttgtttatctggtgctgctattagtgcaaattttacactggcaaacacaaatatttgcaatggtcttattggtgaagaaattttaccagaactagattctccaaactccttcagaaaaatcgtttcttctccatcaatgtcaagattggactcatactccacctcacaaggcagccctgtgtcaactgagagctctatatttgagatcagtaaaaatctttggaggtccagtgccccaacaactgtatcatccaattttctgactaatacagaggtgaaaatggctggcggagctgctggagaggatagagtccaagctgtgtgctcagagaaaaatggatggctgatttgtggaatatatgatgggtttaatgggagggatgcagctgattttctcgcggtaactctgtatgataacatagtatattacttgtacctgctggagaatcggataaagcaacaaaatggtttatacaattcatcagaaacctctctcaatggccttaaaagcgagttaacactagccatgagaaattcagaaaatgaagacataaaattttctgaaacatttcgagctggtgtgctgaattgcctttctactgctgttgagcaagctgagaatgactttttatgcatggttgaacaagagatggatgataggccagatttagtttcagtagggtcttgtgttctggttgttcttcttcatggaacagatctgtgcatcttaaatttgggggacagtagagctgtgcttgcttccatgccatatgtacaaaatggtgctttgaaggctactcagctgacagagacccactcgcttgaaaatcctttggagtaccaaagacttttagctgaccatcccgacgattcttcagttgtcaggggtaacaaaataaaaggaaagttgaaggttactcgtgcttttggagttggctatctaaagcagaggaagttcaatgatgcactgatgggcattctacgagtccgcgatttgagcagccctccatatgtttacacaaatccacacacattgagtcacaaagttacagatgatgacttgtttgttgtgctcggtagtgatggcttatttgatttcttcagtaatgatgaagttgtttggttggtttatcaatttatgcgtgataatccaatgggggatcctgcaaaatatctcattgagcaacttatactcaaagcagccaaggaagcagctttaacagccgaagaattgatgaggatacctgttgggagtaggaggaagtaccatgatgatgtgaccgtcattgttatcatccttggaaatgcacagaggacgatgactgcatcaacttccttgtga

SEQ ID NO: 2510 - protein, 521 aa, Sorghum bicolor
MVDVELFYKDTSDHSISSEEEDMLIRSCSNLNVSFGYHCDSSQSFSPENDHGNGISPKNIFGTNTMIGSRNGSFTCLSGAAISANFTLANTNICNGLIGEEILPELDSPNSFRKIVSSPSMSRLDSYSTSQGSPVSTESSIFEISKNLWRSSAPTTVSSNFLTNTEVKMAGGAAGEDRVQAVCSEKNGWLICGIYDGFNGRDAADFLAVTLYDNIVYYLYLLENRIKQQNGLYNSSETSLNGLKSELTLAMRNSENEDIKFSETFRAGVLNCLSTAVEQAENDFLCMVEQEMDDRPDLVSVGSCVLVVLLHGTDLCILNLGDSRAVLASMPYVQNGALKATQLTETHSLENPLEYQRLLADHPDDSSVVRGNKIKGKLKVTRAFGVGYLKQRKFNDALMGILRVRDLSSPPYVYTNPHTLSHKVTDDDLFVVLGSDGLFDFFSNDEVVWLVYQFMRDNPMGDPAKYLIEQLILKAAKEAALTAEELMRIPVGSRRKYHDDVTVIVIILGNAQRTMTASTSL

SEQ ID NO: 2511 - DNA, 819 bp, Sorghum bicolor
atggagagggcggaccagaagcgacggccgctgacggtgatggcatcctcatcgtcgcaggtagcagcggcgcggggcatgggcatgggcatggccaacccactggcggagtggaccggccgcgtcaggtcgctggaggccggcgtgcgggcgtggctagcgaagcagcccacccacgtggaggccgcggtggtcacggtggccggggccgtgcagggcgccgcgctcggcgggctcatgggcacgctcgcgcccgacggcggggccgcgctccccgtgccgccgccgccgcctggggccgaccctaaggtcttggcctccttcaagcaagcgcaggctttagccggtggacccctggtgcaagcacgaaactttgcggtcatgactggtgcgaatgcaggcatatcttgtgttatgagaagaataagaggagtggaggatgtccagggcagcatggcagcagcttttggttccggggctctattctccatcgtgagtggaatggggacaccaaatccggtagctaatgcaattacaactggtgttgcttttgctgtatttcaaggtggtttttttatgatcggtcaaaagttttcacagccaaagagtgaagatacatactattctcgtggaagaagcatgctgcaaaagttaggccttcagaactatgagaaaaacttcaagaagggtctcctgactgatcaaaccttgggcctccttacggacagtgcactcagagatgtgaagatccctcctggtcccagactcctcattcttgatcacattaaaagagatccagagctgacaagagcaaattaa

SEQ ID NO: 2512 - protein, 272 aa, Sorghum bicolor
MERADQKRRPLTVMASSSSQVAAARGMGMGMANPLAEWTGRVRSLEAGVRAWLAKQPTHVEAAVVTVAGAVQGAALGGLMGTLAPDGGAALPVPPPPPGADPKVLASFKQAQALAGGPLVQARNFAVMTGANAGISCVMRRIRGVEDVQGSMAAAFGSGALFSIVSGMGTPNPVANAITTGVAFAVFQGGFFMIGQKFSQPKSEDTYYSRGRSMLQKLGLQNYEKNFKKGLLTDQTLGLLTDSALRDVKIPPGPRLLILDHIKRDPELTRAN

SEQ ID NO: 2513 - DNA, 1356 bp, Sorghum bicolor
atgataaggatggcggcggcggcgtctcagccaccatcgtcagccgtgcgggtgcgcgggtgcggcggcgcggcgtctgtgtcgtcggcgcgccccttcacggggtcgccgcggggtagagtcgcggcgtcgattgggaaggggaggaagcggaggcgcgccatctcgtgctgctcgtctccggacgcagatggaccacgccccgccgcgccaccgacctccgcggcgccttcggacgggtcgatacagctctattcccagattgagagggtgatcacggaggcggcaaagcagtcccgggagggctggggttcgactggagattggaccgaagtcgagggagcgtgggtattgcgaccgaagtcctcggagccatcatttgttgtccactttgttggaggaatttttgtcggagccgctccccagatcacataccgcttcttccttgaatgtctcgcgaacaggggagctttggtgattgctacgccttatgcgagcggctttgaccatttcttcattgcagatgaagttcaatttaagtttgataggtgtttgagaaacttggatgagcctgtaaatgatatcccaacatttggtgttggacattccttgggatctgttatccacatgttgattggatcaagatatgctgtgcagcgaagtggaaatgtactgatgtcctttaacaacaaggaggcaagctccgcggttccactattttcacctgtaattgttcccatggcacaaagttttggcccgatactgtcccaattgacatcatatccaacaatccgatttggggcagaagcagccattaagcagcttgagaatctaagcccacctgtggttaagcaacttctacctttacttcaacaacttcctccgttgtatatggacttagtaaatgggagggaggacttcattccaaaaccagaagagacacgccgcctgataaaatcctactatgggatttctcggaatctcttaataaagttcaaagatgatcaaattgatgaaacctctacccttgcacaagtactaagctccgaagcagctattagctcgttgcttgatatgtcaattcgatcacttcctggggatcatgggctaccattgcaacaggttcttcctgatgttccaccagcaatggctgatgcagtgaaccgtggaggtgaacttctggcaaatctgacaatgggcacaccatgggaggctgttgctaaggaggttggtaccagtttgggtactgactcaggcattctacgagcacagatctcaaaagacattgaaactcttgttgatgtaattgcttcatggatatcttcaaattctggtccaagactacttcgcccatga

SEQ ID NO: 2514 - protein, 451 aa, Sorghum bicolor
MIRMAAAASQPPSSAVRVRGCGGAASVSSARPFTGSPRGRVAASIGKGRKRRRAISCCSSPDADGPRPAAPPTSAAPSDGSIQLYSQIERVITEAAKQSREGWGSTGDWTEVEGAWVLRPKSSEPSFVVHFVGGIFVGAAPQITYRFFLECLANRGALVIATPYASGFDHFFIADEVQFKFDRCLRNLDEPVNDIPTFGVGHSLGSVIHMLIGSRYAVQRSGNVLMSFNNKEASSAVPLFSPVIVPMAQSFGPILSQLTSYPTIRFGAEAAIKQLENLSPPVVKQLLPLLQQLPPLYMDLVNGREDFIPKPEETRRLIKSYYGISRNLLIKFKDDQIDETSTLAQVLSSEAAISSLLDMSIRSLPGDHGLPLQQVLPDVPPAMADAVNRGGELLANLTMGTPWEAVAKEVGTSLGTDSGILRAQISKDIETLVDVIASWISSNSGPRLLRP

SEQ ID NO: 2515 - DNA, 2484 bp, Sorghum bicolor
atggcgtcgttcgctgtgtccggcgcgggcgcgaggctcggggtcgtgcggcccggcggctcggcgcgatctggcggcggggagcggaggagtggggtggacttgccgtcggtgctcttcaggaggaaggacgccatctctcgtaccgttctgagctgcgctggtgctcctggaaaggtgctggtgcctggaggtggcagtgatgacgtgctttcctccgcagagcctgtcgtggacacttcagagcagcacgaagaactacagatacctgatgcagaacaggttgtggaggagaaagcatactcatcagcagctcaagcaacctcagcagcggctgaagaaagctcagaagttgacgcagccatcaaagccaaagcaccactcgtggaggagaaaccacgagttatctccccaccaggagatggtcagcgaatatatgagattgacccaatgctggaagggtatcggggccaccttgactaccgatacagtgaatataagagaatgcgtgcggctattgatcaacatgaaggtggcttggatgcattttcacgcggttacgaaaagcttggatttactcgcagcgctgaaggtatcacttatagagaatgggctcctggagcatcctctgcagcattagtaggtgacttcaacaactggaatccaaatgctgatgctatgaccagaaatgagtatggcgtttgggagattttcctgcctaataacgctgatggttcccctgctattcctcatggctcacgtgtaaagatacggatggatacaccatctggtgtgaaggattccattcctgcgtggatcaagttttctgtacaagctccaggtgaaataccatacaatggtatatattatgatccacctgaagaggagaaatatgtattcaaacaccctcaacctaagcggccaaagtcactgcggatatacgaatcacatattggaatgagtagtccggaaccaaagataaatacgtatgctaacttccgagatgaggtgctgccaagaattaaaaggcttggatacaatgcagtacagataatggcaatccaggaacactcttattatgcaagctttgggtaccatgttacgaacttttttgcgccaagtagccgttttgggactcctgaggacctaaaatctctgattgacaaagcgcatgagcttggcttgctagtgctcatggatattgttcatagtcattcatcaaataataccttggacggtttgaatggtttcgatggcactgatacacattacttccatggtggtccacggggccatcattggatgtgggattctcgcctattcaattatgggagttgggaagttttgagatatctactgtcaaatgcaagatggtggcttgaagaatataagtttgatggatttcgatttgatggggtgacctccatgatgtatactcaccatggattacaagtggcattcaccgggaactatggcgagtattttggatttgctactgatgttgatgcagtagtttacctaatgctggtaaacgatcttattcatgggctttatccagaagctgtatccattggtgaagatgtcagcggaatgcctacgttttgtattcctgtccaagatggtggtgttggttttgattatcgccttcatatggctgtcccagacaaatggattgaacttctgaagcaaagtgatgaatattggaaaatgggtgatatcgtgcacaccttaacaaatagaaggtggctagaaaagtgtgtcacttattgtgaaagtcatgatcaagctttagttggtgacaagacaattgcattctggttgatggacaaggatatgtatgatttcatggctctggacaggccttcaacacctgtcatcgatcgtgggatagcattacataaaatgattaggcttatcacaatgggtttaggaggtgaaggctatctaaatttcatgggaaatgagtttgggcatcctgaatggatagattttccaagaggtcctcaaagtcttccaaatggctctgtcattcctgggaataactatagctttgataaatgccgtcgtagatttgaccttggagatgcagattatctgagatatcgtggcatgcaagagtttgatcaggcaatgcagcaccttgagggaaaatatgaattcatgacatctgatcactcatatgtatcacggaaacatgaggaggataaggtgatcatcttcgagagaggagatttggtctttgtattcaacttccactggagcaatagctattttgactatcgtgttggttgtttcaagcctgggaagtacaagatcgtgttagattctgacgatggccttttcggtggatttagtcggcttgatcatgatgctgagtacttcactgctgactggccgcatgacaacaggccgtgttctttctcggtctatgcacccagcagaacagccgtcgtatatgcacctgcaggtgaagaggacgaatag

SEQ ID NO: 2516 - protein, 827 aa, Sorghum bicolor
MASFAVSGAGARLGVVRPGGSARSGGGERRSGVDLPSVLFRRKDAISRTVLSCAGAPGKVLVPGGGSDDVLSSAEPVVDTSEQHEELQIPDAEQVVEEKAYSSAAQATSAAAEESSEVDAAIKAKAPLVEEKPRVISPPGDGQRIYEIDPMLEGYRGHLDYRYSEYKRMRAAIDQHEGGLDAFSRGYEKLGFTRSAEGITYREWAPGASSAALVGDFNNWNPNADAMTRNEYGVWEIFLPNNADGSPAIPHGSRVKIRMDTPSGVKDSIPAWIKFSVQAPGEIPYNGIYYDPPEEEKYVFKHPQPKRPKSLRIYESHIGMSSPEPKINTYANFRDEVLPRIKRLGYNAVQIMAIQEHSYYASFGYHVTNFFAPSSRFGTPEDLKSLIDKAHELGLLVLMDIVHSHSSNNTLDGLNGFDGTDTHYFHGGPRGHHWMWDSRLFNYGSWEVLRYLLSNARWWLEEYKFDGFRFDGVTSMMYTHHGLQVAFTGNYGEYFGFATDVDAVVYLMLVNDLIHGLYPEAVSIGEDVSGMPTFCIPVQDGGVGFDYRLHMAVPDKWIELLKQSDEYWKMGDIVHTLTNRRWLEKCVTYCESHDQALVGDKTIAFWLMDKDMYDFMALDRPSTPVIDRGIALHKMIRLITMGLGGEGYLNFMGNEFGHPEWIDFPRGPQSLPNGSVIPGNNYSFDKCRRRFDLGDADYLRYRGMQEFDQAMQHLEGKYEFMTSDHSYVSRKHEEDKVIIFERGDLVFVFNFHWSNSYFDYRVGCFKPGKYKIVLDSDDGLFGGFSRLDHDAEYFTADWPHDNRPCSFSVYAPSRTAVVYAPAGEEDE

SEQ ID NO: 2517 - DNA, 885 bp, Sorghum bicolor
atggcggtcgccatccccgccgccgaggccgtcattctcgccgtcgccatcgcggccgccatccccaccatcgtggccccgtccctgttccctcgccttgctgggggaggaggcggagaagctgaacggcgccgagagcagccaccactagcatcagcaggcgagaatgaaggtcgaccaacgcggtggagcttccactgcccggctggtgaccgtgcccagcccaggatcctgtccggcggtggtggagagcaggcgatgagcacctaccagacatttgatgagctccgccttgagatattagctgtgctgctcacattctcaagcacactaccctacaaccccccacaagtgggtcagatatatgtcctcgggccccagcgcctgaatttccttgacgagccgcctgcctgcatccatgtcatcgtcggggaagagaaggaagacaaggaattagcaacctacgaccctgaaatcacctctaaagaccagcttaaagatggcgttgtaagatttgttgtgatgatgagtgaagggatgcggctccgagagattcgcgagacattttcgggcaacaactgggagaaggagacatttatctctacagaccaggcaaactctgtggtcgactggggaactctctcaaagctcctcatccggtgggacctaaccagaacaaggcaagggggcgcaaaatggggcggaggtgaatttacgaagcatgctgaaaaagtgaagagaaatagtaaggtcactgctggccaggcactgtctgcactggacgctcagacgcagcgtccggtgctccagaagccagcgtccgggtataacaggattgactttgggtacattcaactcttcatcatcagaaccaaagcaatctag

SEQ ID NO: 2518 - protein, 294 aa, Sorghum bicolor
MAVAIPAAEAVILAVAIAAAIPTIVAPSLFPRLAGGGGGEAERRREQPPLASAGENEGRPTRWSFHCPAGDRAQPRILSGGGGEQAMSTYQTFDELRLEILAVLLTFSSTLPYNPPQVGQIYVLGPQRLNFLDEPPACIHVIVGEEKEDKELATYDPEITSKDQLKDGVVRFVVMMSEGMRLREIRETFSGNNWEKETFISTDQANSVVDWGTLSKLLIRWDLTRTRQGGAKWGGGEFTKHAEKVKRNSKVTAGQALSALDAQTQRPVLQKPASGYNRIDFGYIQLFIIRTKAI

SEQ ID NO: 2519 - DNA, 522 bp, Sorghum bicolor
atgtctagggtgttggaacctctagtcgtcggcaaggtgattggggaagtcatcgacaacttcaaccccacggtgaagatgacggttacctacggctccaacaaccaggtgttcaacggccatgagttctttccgtctgcggttctgtccaagccgcgcgtggaggttcagggcgacgacatgaggtccttcttcacgctggtcatgactgacccagatgtgccagggcctagtgatccatacctgagagagcatctccattggatcgtcactgacattcctggaacaactgatgcttcttttggaacggagttggcgatgtacgagagccccaaaccctacatcggcatccacaggttcgtcttcgtgctgttcaagcagaagagccgccagtcggtgcgcccgccctcgtccagggactacttcagcacccgccgctttgccgccgacaacgatctcggcctcccagtcgctgccgtctacttcaacgcgcagcgggagaccgccgcgcgccgccgctga

SEQ ID NO: 2520 - protein, 173 aa, Sorghum bicolor
MSRVLEPLVVGKVIGEVIDNFNPTVKMTVTYGSNNQVFNGHEFFPSAVLSKPRVEVQGDDMRSFFTLVMTDPDVPGPSDPYLREHLHWIVTDIPGTTDASFGTELAMYESPKPYIGIHRFVFVLFKQKSRQSVRPPSSRDYFSTRRFAADNDLGLPVAAVYFNAQRETAARRR

SEQ ID NO: 2521 - DNA, 1140 bp, Sorghum bicolor
atggccgtgtccggcgagaagcggccaccgccaccggccccggcctccggcggaacggcaaggaagaagcttatcctagcactgtttatctgtttctcggcgctgctgtacaagcagattcttcagccaccactgcccaagatcgccggctcgccgggcggccctccggtcacggcaaccaggacacggctcagcgacggcaggtacctggcctatctggaacacggcgtccccaaggagaaggccaagtacaagatcatctttgtccatggattcgactcgtgcagatacgacgcgcttccaatctccacggagcttgcacaagagctgggcgtttacctgttgtcctttgatcgccccggctacgccgagagcgacccgcacccgggcaggaccgagaagagcatcgccctcgacatcgccgagctcgccgacaacctgcagctcggcctcaagttctacctcgttggcttctccatgggcggcgagatcatgtggagctgcctcaagcacatcccacacaggctctccggcgtggccattctcgggccggtgggcaactactggtggtccggcttgccggcgaacgtgtcgcgggacgcctggtaccagcagctccctcaggaccagtgggcggtctgggtggcgcatcacctgccgtggctgacctactggtggaacagccagaggctcttcccggcctccagcgtcatcgcctacaaccctgccctcctgtcccaagaagacaagctgctcatggcaaagtttggctatagaacctacatgccgcagatcaggcagcagggggagcacgagtgcctgcaccgggacatgatggtcggcttcgggaaatggagctggagcccgctgcagctggagaacccgttcgccggcgctgatgatgatggccaggagggggcggggaaggtgcacctgtggcacggcgccgaggacctcgtggtgccggtcagcctgtccaggtacatcagcgagaagctgccgtgggtcgtctaccatgagctccccaagtcgggacatctcttcctgatcggtgacgggatggctgacaccattgtcaagtccctgctgctcggagacgatcatccgtcgtcggcctcagccctcacagcctcctcctga

SEQ ID NO: 2522 - protein, 379 aa, Sorghum bicolor
MAVSGEKRPPPPAPASGGTARKKLILALFICFSALLYKQILQPPLPKIAGSPGGPPVTATRTRLSDGRYLAYLEHGVPKEKAKYKIIFVHGFDSCRYDALPISTELAQELGVYLLSFDRPGYAESDPHPGRTEKSIALDIAELADNLQLGLKFYLVGFSMGGEIMWSCLKHIPHRLSGVAILGPVGNYWWSGLPANVSRDAWYQQLPQDQWAVWVAHHLPWLTYWWNSQRLFPASSVIAYNPALLSQEDKLLMAKFGYRTYMPQIRQQGEHECLHRDMMVGFGKWSWSPLQLENPFAGADDDGQEGAGKVHLWHGAEDLVVPVSLSRYISEKLPWVVYHELPKSGHLFLIGDGMADTIVKSLLLGDDHPSSASALTASS

SEQ ID NO: 2523 - DNA, 408 bp, Sorghum bicolor
atggccatggcggcgctgcgggaggcctcccgctgcctggcgtccagggggagccctgcggccgcgcgatccatgctcctcgcgcagtcgcgcggcatcacttacaagctcttcgtcggaggtttatcacaatttgcaacggaggaaagcctagcagaagcattctcacgttacggacaagtaatagaagctaccgtcgtcagggataaggtgaccgacataccaaaaggattcggcttcgtgaaatttgcctccccggaagaagccaataacgcgagggaagagatgaacggcaaggcattgaacggccgggtcatatacgtggacatcgcaaaggccaaaccggaccgtgctacagatgctctcccaatagcgagaggtcctcctaagccaattagcaacggctga

SEQ ID NO: 2524 - protein, 135 aa, Sorghum bicolor
MAMAALREASRCLASRGSPAAARSMLLAQSRGITYKLFVGGLSQFATEESLAEAFSRYGQVIEATVVRDKVTDIPKGFGFVKFASPEEANNAREEMNGKALNGRVIYVDIAKAKPDRATDALPIARGPPKPISNG

SEQ ID NO: 2525 - DNA, 348 bp, Sorghum bicolor
atgagccgcagcaacaggaagagctctaggggccttgacctgaaactgaacctctcgcttcctgcaacagggggctcctccaggagggcgatggctgatgaggagtcatccccaagctcctgcctgtcgtcagagaacgagcatggccttcagtggtccaacagccctgaggccacatccatggttcttgctgcctgtcctcgctgcttcatctacgtcatgctcccacaagatgaccctcggtgcccccagtgcaagagccctgttctccttgacttcctgcaggacaacaacagcaacagtaagaacaacagtaataatagcagcaggaggagcaggaggggatga

SEQ ID NO: 2526 - protein, 115 aa, Sorghum bicolor
MSRSNRKSSRGLDLKLNLSLPATGGSSRRAMADEESSPSSCLSSENEHGLQWSNSPEATSMVLAACPRCFIYVMLPQDDPRCPQCKSPVLLDFLQDNNSNSKNNSNNSSRRSRRG

SEQ ID NO: 2527 - DNA, 666 bp, Sorghum bicolor
atgagcaaggagaagcaccaccgcgactgggtcctccgccgctgctgcggctccatcgccgcctgcatcctcacgctcttcgccctcgtcggcttcatcgtgctcgtcatctacctcgccctccacccctccaagccttccttctacctccaggacgtgcagctccgctccatcgacctcagcgaccccgctctctccctcgacctccaggtgacgatcgcgtcgcggaacccgaacgaccgggtgggggtgtactacaagacgctggacgcgttcacgacgtaccgggacgagccggtgacggtgccggtgtcgatgccgtccatctaccagggccacaaggacgtgtcggtgtggtcgccggtgatgtcgggcgacgcggtgcccgtggcgcagtacgtggcggacgccatgaagcaggacatcgcggcggggtacgtgctgctccacgtcaaggtggaagggcgcgtcaagtggaaggtcggcagctgggtctccggcggctaccacctcttcgtcacctgccccgcgctgctcgccaccagcgggagcgccgtcgccggcggcgcgttcgccgccagcgccgcgtccggagtgcccgccggcgtcaacaccaccgtctcgctcaagttcacccacccggccgactgtactgtcgacgtgtga

SEQ ID NO: 2528 - protein, 221 aa, Sorghum bicolor
MSKEKHHRDWVLRRCCGSIAACILTLFALVGFIVLVIYLALHPSKPSFYLQDVQLRSIDLSDPALSLDLQVTIASRNPNDRVGVYYKTLDAFTTYRDEPVTVPVSMPSIYQGHKDVSVWSPVMSGDAVPVAQYVADAMKQDIAAGYVLLHVKVEGRVKWKVGSWVSGGYHLFVTCPALLATSGSAVAGGAFAASAASGVPAGVNTTVSLKFTHPADCTVDV

SEQ ID NO: 2529 - DNA, 1671 bp, Sorghum bicolor
atggaccacgatgggattgtcaggatgctatggaactcatctattgtgtattggtccagcacgtggaatggtagattcttcagtgcgataccagagatgtctgcaggcctaggtaccggtggtatagccaattataccttcgtcaacaacgaccaagagctttacttcacctacaacatatttgatgacagcataatcatacgcactacgcttctagtctctggtcaaaaccgagcgagcgtttggaccgggcaggcttggatgacagtgaacaaccttccagcacgtcaatgtgatgtgtatgctgtctgtggccctttcacggtctgcacttcaaatgcagatccttattgcagttgcatgaagggattctctctaagatcacctgcggattgggagacagagaacagaacaggcgggtgcatcagaaatactccactgaagaagtgtcgcgctgatgatggaaacaaaacaggaaaaaatggttgctctatctggcatgatgagttacttaatgtagctactgacggtaatgaagaaatgatttaccttcgccttgctgcagtagagttagagagcgggaaaggcaataggagtggcatggtcattggtgtttccgttggcacaagcattgctgctttggcctttattctcatcatattgatttggaggagaaatgggaagtggtctagacccatagtagacaatgataatggtagtgttggcataattgcattcaaatattctgacttgcaagatgcaacaaaaaaattctcagagaagctaggtgcgggtggttttggttctgtatttaagggatgcctaagtgggtcgattgtcatagcagtgaaaaggctcgatggcgctcgacaaggagagaagcaattcagggcagaagtaaattcaattggaatcattcaacatataaatttagtgaaattggtcggattttgctgtgaaagtaataagaggttacttgtgtatgagcacatgccaaatggctccctggattctcatctattcgaaagttatggtacaactttagattggaacattagatacaaaatagctattggagttgctagaggtctagcatacttgcaccatggttgtcgagactgcatcatacactgtgacatcaaaccacagaacatacttctggatgcatcatttgttccaaaaatcgcagattttgggatggcaaagtttctcgggagggatttcagccatgttgtgactacaatgcgaggaactatcggatatcttgctccagaatggatcagtggaacacctattactcccaaagttgatgtttatagctatgggatggtcttgctagagatcatatcaggaaagaggaactctatccaacattcatctagtgatattgaaggccaaggtgactatctacctgtgcaagttgcacacaagcttgtccatggagacattttgagcattgtggatgcaaacttgcatggcgaagtgaacatggcagaagttgaaagggtttgcaaaatcgcatgttggtgcatccaagatcgtgagtttgatcggcccacaatgattgaggtggtacaatttctcgagggaatatgcgaaccagaaattcctccaatgccaaagctactctatgctgttgccgtaggtggctcatatcagtcgggagagtaa

SEQ ID NO: 2530 - protein, 556 aa, Sorghum bicolor
MDHDGIVRMLWNSSIVYWSSTWNGRFFSAIPEMSAGLGTGGIANYTFVNNDQELYFTYNIFDDSIIIRTTLLVSGQNRASVWTGQAWMTVNNLPARQCDVYAVCGPFTVCTSNADPYCSCMKGFSLRSPADWETENRTGGCIRNTPLKKCRADDGNKTGKNGCSIWHDELLNVATDGNEEMIYLRLAAVELESGKGNRSGMVIGVSVGTSIAALAFILIILIWRRNGKWSRPIVDNDNGSVGIIAFKYSDLQDATKKFSEKLGAGGFGSVFKGCLSGSIVIAVKRLDGARQGEKQFRAEVNSIGIIQHINLVKLVGFCCESNKRLLVYEHMPNGSLDSHLFESYGTTLDWNIRYKIAIGVARGLAYLHHGCRDCIIHCDIKPQNILLDASFVPKIADFGMAKFLGRDFSHVVTTMRGTIGYLAPEWISGTPITPKVDVYSYGMVLLEIISGKRNSIQHSSSDIEGQGDYLPVQVAHKLVHGDILSIVDANLHGEVNMAEVERVCKIACWCIQDREFDRPTMIEVVQFLEGICEPEIPPMPKLLYAVAVGGSYQSGE

SEQ ID NO: 2531 - DNA, 828 bp, Sorghum bicolor
atggcggcaaccttctgcgccgggcccgccgcatccgcggtagcaaaccctagctccgccggctgccgacgccagaacctacctcgggctggcgtgctgtctgcctgctggcggcccacccggccgattcccgccttcctctccctccggcgccccaatgccgagctgcggccgctacgcgtggccgccggctccggcgttgacccgaaggttgtcaatggggaagattttcctcccatgaaggacctaattcaactatacaggacagcttttcaacaaggaaatgatgaggttcttggtgaagttgagaaggcaatcactgctgtggaaaaagagaagagtagggtagcttctcagtttgaaagtattacaaccgaaataacttctgggaaggagaagtttattcgcttaaatgctgatctggagaatttccggaaacagactgaaaaggatcgtgcaaagtttacatcaaatatgcgggtgcaagttgttcagagtctgttacctctggttgatagttttgagaaaacgaatttagagaacacaccagagactgagaaggagcaaaagatcagcacaagctatcaaggcatatacaagcagttagttgaaacactaagatatttgggtgtaggagtagtggaaacagttggcaagccatttgatccttcagtccatgaagccatctcacgagaagcatccatgcaattcaaggcagggattgtcatgcatgaagtccgcagagggttccatttgaaggagaggctgctaaggcctgctactgttaaggtctctactggctctggcaaacaaagcgcaagctcataa

SEQ ID NO: 2532 - protein, 275 aa, Sorghum bicolor
MAATFCAGPAASAVANPSSAGCRRQNLPRAGVLSACWRPTRPIPAFLSLRRPNAELRPLRVAAGSGVDPKVVNGEDFPPMKDLIQLYRTAFQQGNDEVLGEVEKAITAVEKEKSRVASQFESITTEITSGKEKFIRLNADLENFRKQTEKDRAKFTSNMRVQVVQSLLPLVDSFEKTNLENTPETEKEQKISTSYQGIYKQLVETLRYLGVGVVETVGKPFDPSVHEAISREASMQFKAGIVMHEVRRGFHLKERLLRPATVKVSTGSGKQSASS

SEQ ID NO: 2533 - DNA, 744 bp, Sorghum bicolor
atgccactcgtcggctgtccccgccgcggcccgccgctttctcccgcctgccgccaccgccgcagcctgtatcgggcccgagccgtcgcgcccaaatgcgaggcctcctcctcctctcctccgccgctcctgaccaggagactgtccgctgcctcgctgcttctcgctgtcctccccgtccccgcgtcgtcgccgcaactccccgtcgcctccgcgtcgcaggcggaggcgaaggaggcggaaggagaaagcggagcttccgaggggatagaactggagcggtacactgaccaggagcagggcttcaccctcctcaagccgacctcttggcccaaggtggagaaggcgggcgcgacggcgctgtttcagcaggagggcaaagggagtaacaatatcggggtcgtcgtcaaccccgtccggctcaattcgctgacggagttcgggacgccgcagttcgtcgcggacagacttctgcaagcagagaagaaaaaggaaagtaccaagactgccgaggtgatctcagtgggagagagatcaggtcatggtggcctgacagtgtatgaaatcgagtacacactggatagcactaggggagggatgaaacggatcttctcgggtgcatttgttgcttcaaggaagctctatctgctcaacatagcctgttcagacacccaggagaagcccttggacagcgagacaagaattgttctggaaaaagttctacattcttttgattctgtatag

SEQ ID NO: 2534 - protein, 247 aa, Sorghum bicolor
MPLVGCPRRGPPLSPACRHRRSLYRARAVAPKCEASSSSPPPLLTRRLSAASLLLAVLPVPASSPQLPVASASQAEAKEAEGESGASEGIELERYTDQEQGFTLLKPTSWPKVEKAGATALFQQEGKGSNNIGVVVNPVRLNSLTEFGTPQFVADRLLQAEKKKESTKTAEVISVGERSGHGGLTVYEIEYTLDSTRGGMKRIFSGAFVASRKLYLLNIACSDTQEKPLDSETRIVLEKVLHSFDSV

SEQ ID NO: 2535 - DNA, 1515 bp, Sorghum bicolor
atgaaggacccggcgcaccgcacgaaggtggtgctccggcggctgccgccggcgatcgcgcagcaggccgtcgtggaccaggtcgacgcgcgcttcgctgggcggtacgactgggcgtgcttccgccccggcaatgccagccaaaagaatcataggtattctcgactttacctcaatttcaagcgcccagaggatgttgttgagtttgctgaggtcttcaatgggcacgtatttgtgaatgaaaagggtgctcaatttaaagcttttgtggaatattcaccatcacaacaggttcccaaatcaaatatcaagaaggatggccgtgaaggaactattatgaaagatccggagtacttggagtttcttgagcttatttcaaagcctactgagcatctgcctagtgctgaaattcagctcgaaaggaaagaagctgaaagggcagctgctggaaaggaggcacctgttgtgacacctcttatgatgtatgtccgccagcaaagggcagctaagagtatggctcagagacctggaagtagacttagcagaaaagttgcaggtgtcgtaactagcagttccagtcctaaaaggtcttctgagaagcgcagatcctccacgtatgttgtacgagacagtactaaggaaaagccaacctatatcatggtgccaaagagagaggagcatacacacagggaaaaagccattgctggaaattcaggtgatgccacaagtgggggaacatctggatctggtcaggctggtgaggctaaaagggacaaaattgtcattttgaaaggaagaggaagggttgattctaatacacctgatggagcaactcagcagtcatcaacccctgtgaagagtgtaccgccggcgacttctagactagaccagcgacctgaagccagtggaagaattattaaaactatactttcaaacaaggaaatccgcagttcaaatccatctcaacatgagcaggaaggtcatgtgtttaatactgagaaggataagcggccaccacgggctgtcaaccctcgtaccattgtgaaagatcagttagttgaaaattctgagagaagccattttgatgagaagactaatcatcttcatggctctgctccaattggtgagaaggttgaaaggcatgccagaaacagagatagacctgatcgtggtgtatgggcgcctcgccgctatgacaaatctacatctgggggtggttcacatgcctcatcgtcagatttccctcaaatacagtcacattctggagataatgtttcgcaaatagcagatggtcatggagacagaaagacagacacaaggggtcatggtggtagccgtggtgttcctgttgaaaatggacataggcatgccaaccgtcgtggtcctccacgtggtccaaaggaaactgaaatatctgctagcgtgcctgatggaaagaattcaaagaggggctctgctagttatggtgctcatgagagacaagtatgggttcagaagtcaagttcaggctcgtga

SEQ ID NO: 2536 - protein, 504 aa, Sorghum bicolor
MKDPAHRTKVVLRRLPPAIAQQAVVDQVDARFAGRYDWACFRPGNASQKNHRYSRLYLNFKRPEDVVEFAEVFNGHVFVNEKGAQFKAFVEYSPSQQVPKSNIKKDGREGTIMKDPEYLEFLELISKPTEHLPSAEIQLERKEAERAAAGKEAPVVTPLMMYVRQQRAAKSMAQRPGSRLSRKVAGVVTSSSSPKRSSEKRRSSTYVVRDSTKEKPTYIMVPKREEHTHREKAIAGNSGDATSGGTSGSGQAGEAKRDKIVILKGRGRVDSNTPDGATQQSSTPVKSVPPATSRLDQRPEASGRIIKTILSNKEIRSSNPSQHEQEGHVFNTEKDKRPPRAVNPRTIVKDQLVENSERSHFDEKTNHLHGSAPIGEKVERHARNRDRPDRGVWAPRRYDKSTSGGGSHASSSDFPQIQSHSGDNVSQIADGHGDRKTDTRGHGGSRGVPVENGHRHANRRGPPRGPKETEISASVPDGKNSKRGSASYGAHERQVWVQKSSSGS

SEQ ID NO: 2537 - DNA, 1446 bp, Sorghum bicolor
atggcctcgccggcggcggtgacgcggcacccttcccccaccgtccttgcctccggccctcgctactgccgccgcggacatccaccctcaaaagttggcttccgaagcttggcgccacggctaaaggtcaatgcactttttgggtggcctaagggagacacgtcaacacgtcaactgatccctcctgctgctgaatcatatacgctctcagggtcagccttagaggtgggtgcaaaaccacgtgaggtgtctatttctgttgcttcttctatcatggacattcctgctgcggattgggatgcctgtgcgtgtgatccagatgatcctgaaaactttaaccctttccttacttatgcattcctctcaagcttagaagaatcacattctgcagtaaaggaaactggctggttacctttccatgttgttgcacgggatgagaatggacatattataggtgttgttccgctttaccttaaaagtcattctagaggagagtttgtgtttgatcaatcatgggcagaagcttactacaactatggccttgaatactatccaaagctccagtcctgtgtgccttttactccagtaactggtcaaagaatattacttcgaaatacatcatatcgtgatcaagtttttgatgcacttgtcaaaggtttgatgagcctgactaccaagatgaacgtgtcatcattacatattacttttccgtctgaaggtgaattcagcaaattgaagaatagtgggttgttacaaagaattgggttgcaatatcactggagaaatcggaattacaagagttttgatgagtttctgatggatttgaagcaacctaaacggaagaatatcagacaagaacgtaaaaagattcctgctcaaaatttgcaaatgaagcgacttcgtggagacgaaataaagagcagccactgggatgccttctataaattctaccgtaacacaactgataatcattggggccgaccatacttgacaagggatttctttcacctcttgggcgaaaagatgggggagaatgtgatgcttattgttgctgaaaaagatgataaactagttgctggagctcttaaccttattggaggtgatacactgtttggccggttatggggatgcctgccagatgcttactttcccaatttgcattttgaagcttgctattatcaggcgattgaagcagccatagagttaaacctgagtaatgtggaggcaggtgctcagggagagcacaagatccagcgtggttacctcccagtgacaacttacagctgccactacttttcaaatcctggttttgcggcagctattggaaattttcttacacatgagacggctcaggttaagcgtgctattaaggtccttcatgattcgggtccatacaaggaagacatactgaaagaatttgcagctcaacaaggcatcgacctgtag

SEQ ID NO: 2538 - protein, 481 aa, Sorghum bicolor
MASPAAVTRHPSPTVLASGPRYCRRGHPPSKVGFRSLAPRLKVNALFGWPKGDTSTRQLIPPAAESYTLSGSALEVGAKPREVSISVASSIMDIPAADWDACACDPDDPENFNPFLTYAFLSSLEESHSAVKETGWLPFHVVARDENGHIIGVVPLYLKSHSRGEFVFDQSWAEAYYNYGLEYYPKLQSCVPFTPVTGQRILLRNTSYRDQVFDALVKGLMSLTTKMNVSSLHITFPSEGEFSKLKNSGLLQRIGLQYHWRNRNYKSFDEFLMDLKQPKRKNIRQERKKIPAQNLQMKRLRGDEIKSSHWDAFYKFYRNTTDNHWGRPYLTRDFFHLLGEKMGENVMLIVAEKDDKLVAGALNLIGGDTLFGRLWGCLPDAYFPNLHFEACYYQAIEAAIELNLSNVEAGAQGEHKIQRGYLPVTTYSCHYFSNPGFAAAIGNFLTHETAQVKRAIKVLHDSGPYKEDILKEFAAQQGIDL

SEQ ID NO: 2539 - DNA, 936 bp, Sorghum bicolor
atgcacctgatcacatatttcaccaatatcattggtgtggtgaccattgctctcatctccgtagtctccatcttgggcctaatttgcctctgccgctcagtgtacttccaactgtggatcaaaagaagaggctaccagcgccttagctacttcaacgggccatggctgactcggataacattgatgctggttgcattctggtggggtattggcgaggtagtcaggctcacctttgtgaatggggagggaaggctaatctctaaccggacatggcaagtgaacgtgtgcaaattctacatcatctcaaatctggggtttgcagaaccaggattgttcctcttgctctctttccttcttagtgcagctttgcagaagcaagaacttggtaccttgaataggaaatggaaccggaagactatacgtgcagtattcattctctgctcgccttgtttgatctgggaagcttgtgttgttttcgttggtggtcgtgtttcctcagatgacggtcagcgatcaaaggtttcaaagtactggttttctgcttctgcaagccacaacggcaacattacatgcacgtatccactgttgagcagcgtatttattggggcgttttacatcattttgactgtctatgtcatgtttgtcggacgtcaaatgctgtctttggtgatcaacaagggactccggcgaaggatatatatgctcatttttgccaccggaatattacttccccgagcaacacttcttgggttatcggttcttccttggcctggtgaagttatccatgaggctcttgtgtttgtttccttccttgtgctgatgcttgctgccatggtcggtatcgttattctggtttattttccagtcgctgatacctttgccataggtgaccaggagcatatagagatgcaagcaagtcgtgaaatgatcctgtga

SEQ ID NO: 2540 - protein, 311 aa, Sorghum bicolor
MHLITYFTNIIGVVTIALISVVSILGLICLCRSVYFQLWIKRRGYQRLSYFNGPWLTRITLMLVAFWWGIGEVVRLTFVNGEGRLISNRTWQVNVCKFYIISNLGFAEPGLFLLLSFLLSAALQKQELGTLNRKWNRKTIRAVFILCSPCLIWEACVVFVGGRVSSDDGQRSKVSKYWFSASASHNGNITCTYPLLSSVFIGAFYIILTVYVMFVGRQMLSLVINKGLRRRIYMLIFATGILLPRATLLGLSVLPWPGEVIHEALVFVSFLVLMLAAMVGIVILVYFPVADTFAIGDQEHIEMQASREMIL

SEQ ID NO: 2541 - DNA, 990 bp, Sorghum bicolor
atgctgccgctcgcataccccgccggccacagccaactccatctccatctccacctccctcccgcagcgctgcagcgcgctgccgctccgggtcgagcctaccttcccagtcgccgcggcgcccgaaccttcgccggagcgcgccctcccggttccagcgcgggggcggccggaactgagaccacctctaccactagcggcagcgtcttgtcgttcctgtgtccgctcctcaaactcctcgggggaggcgatccttcgcagcagcgcaacgacgttgtggaggtcacgacatcttcaatttcaagtttagctagactgcaatggggatcaaaagtggctactagcagtggggagaacatagattcggcaataagcactccaactcttcaattgtatgagtttgaggcatgtcccttctgtaggagagttcgggaggccatgaccgagcttgacctttctgcagaggtttatccatgtccaaaagggtcactaaggcacagagatgtggtcaagaaaattggagggaaggagcagtttccactccttattgacgctagtactggtatctcaatgtatgaaagtggagatattgtgaagtacctgttcaggcagtatggacaaggaaagagtccttctcctggacttcttgagagtacaattttcacaggatgggtgcccactcttcttagagctggaagaggaatgacactgtggaacaaagctggtgctgtacctgcagagaagttggagctgttctcatatgagaataattcttatgcaaggatagttcgagaggctctctgtgaattggagcttccttatgttctccagaacgttggagagggatcatcaaagacagatttgcttctaaggaagtcgggctctaagcaggtgccatatctgattgaccctaacactggattccagtcgaacgaccataagaagatactagcttacttattccagcagtactcacttagtagccagtag

SEQ ID NO: 2542 - protein, 329 aa, Sorghum bicolor
MLPLAYPAGHSQLHLHLHLPPAALQRAAAPGRAYLPSRRGARTFAGARPPGSSAGAAGTETTSTTSGSVLSFLCPLLKLLGGGDPSQQRNDVVEVTTSSISSLARLQWGSKVATSSGENIDSAISTPTLQLYEFEACPFCRRVREAMTELDLSAEVYPCPKGSLRHRDVVKKIGGKEQFPLLIDASTGISMYESGDIVKYLFRQYGQGKSPSPGLLESTIFTGWVPTLLRAGRGMTLWNKAGAVPAEKLELFSYENNSYARIVREALCELELPYVLQNVGEGSSKTDLLLRKSGSKQVPYLIDPNTGFQSNDHKKILAYLFQQYSLSSQ

SEQ ID NO: 2543 - DNA, 1407 bp, Sorghum bicolor
atgcggaacagtggcgggaagaggcggctgctgctgtcgcagtggtgggtcgtcctcctcggcagcctccagctcccggcggccgccggcggcagcggccacgtcgtcaggcgcatgcgcggcttcgacgggccactcccgttctacctcgaaaccgggtacgtggaggtggacgagcagcacggcgtgcagctcttctactacttcgtgcgctcggagaaggagcccggcgaggacccgctgctgctgtggctgtccggcggcccaggcagctccggcatctccggccttgcctacgagataggacccttacaatttgttgacgcccatggctacagaggtggattccccactctgcgctaccgacctgagacatggaccaaggtgagcaacatcatatttgtggattcgcctgtggggactgggttctcgtacgccaagaccaaggaagggcttaagaccggtgacaccaaagcagtgaagcagctactcatttttctcagaaagtggctccacgaccatccccggttcctgtcgaatcctctttatattgctggagactcatacagtggtcgcatcattcctgctcttacattagaaattcacagaagcataaaactcggtgaaaaaacattttccaatctcaaggggtacattgctggcaacccgctgactgacaaccagtttgatacggacggcaaaattccatactttcatggcatgggacttgtatctgatgaactttacgagaacgctagggagaagtgtggtggaaaatatagtgctccattgcatgctatatgcgcagaggctgtccaagctatctacaattgcacacgggatatcaatcagcaatacatcctggatcctgcttgcccggatgatgatctgtggagccccaagactgtagcagagacagatggaatgagtagggtgatgctagagtctgcactgcttgcctccaaatgtacagaatctttatacagtctatcctacacttgggggaatgatgaaacagttcaggagagccttggtgtccgcaagggaacaattggagagtggaaacgatttaaccatgaattgctttacaatcatgatatccagagtgcagtggggtaccattcaaggctagccacaaaaggatacagggcgctgatatacagcggcgatcacgatgctgtcgtaccccatgttggcacacaggcatggattaggtacctcaacttgaccatcgtagatgattggagaccatggtacgttggtgggcaagttgctggattcacaaggagttatgcgagtggactaacatatgccactgtgaagggtgctgggcatatcgcaccaatgtataagcccttggagtgccaaaaaatgttaataagatggatttcaggggattctctttga

SEQ ID NO: 2544 - protein, 468 aa, Sorghum bicolor
MRNSGGKRRLLLSQWWVVLLGSLQLPAAAGGSGHVVRRMRGFDGPLPFYLETGYVEVDEQHGVQLFYYFVRSEKEPGEDPLLLWLSGGPGSSGISGLAYEIGPLQFVDAHGYRGGFPTLRYRPETWTKVSNIIFVDSPVGTGFSYAKTKEGLKTGDTKAVKQLLIFLRKWLHDHPRFLSNPLYIAGDSYSGRIIPALTLEIHRSIKLGEKTFSNLKGYIAGNPLTDNQFDTDGKIPYFHGMGLVSDELYENAREKCGGKYSAPLHAICAEAVQAIYNCTRDINQQYILDPACPDDDLWSPKTVAETDGMSRVMLESALLASKCTESLYSLSYTWGNDETVQESLGVRKGTIGEWKRFNHELLYNHDIQSAVGYHSRLATKGYRALIYSGDHDAVVPHVGTQAWIRYLNLTIVDDWRPWYVGGQVAGFTRSYASGLTYATVKGAGHIAPMYKPLECQKMLIRWISGDSL

SEQ ID NO: 2545 - DNA, 2028 bp, Sorghum bicolor
atgccggccacgctgagcacaacgcgggcaccgccgagggcgacctccctcccctcgtctcgggcgtctcagacggcgatcctacgccaccccgtctcccgccgcaaccgagcgctccgccttctcgcgctcccctccccgtccgcgccgcggcagaggcgtagtaggcccggtcttcttcctcctgcccgcgcggggctcgtcgccaccgcggcaatgccaccggcggcgccggagccggagcgcaaggcgcgcgtcctggtggccggcggcggcatcggcggcctggtattcgcgctcgccgccaggcgcaaggggttcgaggtgctcgtgctggagcgggacatgagcgccgtccgcggggaagggaggtaccgcggcccgatccagctgcagagcaacgcgctcgccgcgctcgaggccgtcgacgccgctgcggccgacgagatcatggacgctgggtgcgtcacgggggaccgcgtcaacggcatcgtcgacggcgtctctggctcctggtacatcaagtttgatacgtttactcctgcagctgagcgggggctcccagtcacaagggtcattagccgcatgacactgcaacaaatccttgctcgagcagttggcgatgatgctatattgaatggaagccatgtagtcgattttatagatgatggcagtaaggttactgccatattggaggacggtagaaaatttgaaggcgaccttttggttggtgccgatggaatatggtcaaaggtgaggaagacactattcgggcattcagacgccacctattcaggttacacttgctacacagggattgcagattttgtgccacctgatatcgatacagttgggtaccgagtatttcttggtcacaaacaatacttcgtctcttcagatgtcggtgctggtaaaatgcaatggtatgcttttcacaatgaagaggccggtggcactgaccctgaaaatggcaaaaagaaaagattgcttgagatatttgacggatggtgtgataatgtcgttgatttgataaacgcaactgatgaagaagcggttcttcgccgggatatatacgaccgcccacctactattaattgggggaaaggtcgtgtcaccttgcttggtgattctgtccatgctatgcagccaaatctgggtcaaggtggctgcatggctattgaggatggttaccagctggctgtagagctagagaatgcctggcaagagagtgtcaagactgaaactcctatggacatagtttcctccttgaggcgttatgagaaagagagaaggctgcgtgttgctgttatacatggactggcaagaatggccgcaatcatggctaccacctatagaccttatttgggtgttggtctaggacctttatcgtttttgaccaagttgcggataccacaccctggaagagttggtggcagattcttcatcaaatatggaatgcctgcgatgctgagctgggtgcttggtggcaacagctcaaagctagagggaaggcctttaagctgccgactttctgacaaggcaaatgaccagctttatcgatggtttgaggatgatgatgcgctggaacaagctatgggtggagaatggtacctcttcccaacaagtgaaggaaacagcaatagcttccagcccattcgtttaattagggacgagcagaggtcactctctgttggaagccagtcagatcctaatgacacagattcttccctatcattgccgtttccacagatatcagaaaggcatgctacaatcacatgcaagaataaggctttctatctgactgatcatgggagtgaacatggtacctggattaccgacaatgaaggtagacgttaccgtgtgccaccaaacttcccagttcgtttccatccctccgatgtcattgagtttggttctgataagaaggctatgttccgggtgaaggtgctgaacacgctcccatatgaatccgcaagaagtgggaagcagcaggggcagcagcaacagcaagtccttcaggcggcatga

SEQ ID NO: 2546 - protein, 675 aa, Sorghum bicolor
MPATLSTTRAPPRATSLPSSRASQTAILRHPVSRRNRALRLLALPSPSAPRQRRSRPGLLPPARAGLVATAAMPPAAPEPERKARVLVAGGGIGGLVFALAARRKGFEVLVLERDMSAVRGEGRYRGPIQLQSNALAALEAVDAAAADEIMDAGCVTGDRVNGIVDGVSGSWYIKFDTFTPAAERGLPVTRVISRMTLQQILARAVGDDAILNGSHVVDFIDDGSKVTAILEDGRKFEGDLLVGADGIWSKVRKTLFGHSDATYSGYTCYTGIADFVPPDIDTVGYRVFLGHKQYFVSSDVGAGKMQWYAFHNEEAGGTDPENGKKKRLLEIFDGWCDNVVDLINATDEEAVLRRDIYDRPPTINWGKGRVTLLGDSVHAMQPNLGQGGCMAIEDGYQLAVELENAWQESVKTETPMDIVSSLRRYEKERRLRVAVIHGLARMAAIMATTYRPYLGVGLGPLSFLTKLRIPHPGRVGGRFFIKYGMPAMLSWVLGGNSSKLEGRPLSCRLSDKANDQLYRWFEDDDALEQAMGGEWYLFPTSEGNSNSFQPIRLIRDEQRSLSVGSQSDPNDTDSSLSLPFPQISERHATITCKNKAFYLTDHGSEHGTWITDNEGRRYRVPPNFPVRFHPSDVIEFGSDKKAMFRVKVLNTLPYESARSGKQQGQQQQQVLQAA

SEQ ID NO: 2547 - DNA, 1536 bp, Sorghum bicolor
atggccggaggaggatcctccgtcggtgtgccggactacggcggtggcgtgacgttctccgtcgtggtgaccagcctcatggctgcctcctgcggcatcatctttggctacgactccggcgtctcaggtggcgtgactcagatggattcattcctgagcaaattcttcccggacgtgatcgacgggaggaagagcgcaaaggtggacgcctactgcaagtacgacaaccaatggctcaccgccttcacgtcgtcgctatggatcgccggcgcgctgtcctcgctggtggcgagccgcgtgacccgaagggtgggccgccaggccatcatgctcatcggcggcgtgctgttcctcgccggctccgtcatcaacgccgccgcggtgaacatcgccatgctcatcgtcggccggatgctgctaggcttcggcctcggcttcaccttgcaggccgctccggtgtacctctccgagacggcgccggcgaggtggcgcggtgcgttcacgtcagcctacaacgcgttcgtcgtcgtcggcatactgtcggcgaccgtcaccaactacttcaccaaccgcatccccggctgggggtggcgcgtctccctgggcctggcagccgtgccgggcgccgccgtcgtcctgggagccttcttcgtctcggacacccccatcagcctggtgatgcgaggccagcacgagaaggctcgggccgcgctgcagcgcgtccgcgggggcgacgccgacgtcgacgccgagttcaaggacatcgtccgcgccgtggacgtggcgcgccagaacgacgacggcgcgttccggcggctgttcagcaaggagtaccggcactacctggcgataggggtggccataccggtgttctacgagttcaccggcatgatcgtcatctccatcttcttgccggtgctgttccggaccgtcgggttcagcagccagagggctatccttgggtccgtgatcaacagcatgaccaatctggcctcgacgctgctgtcctccgtcgtcatggaccgcgttggacgcagatttctgttcgtcgttggtggattaggcatgatgctttgcgaggtggccatctcatggatcatggcggatcacctcgggaagcacggaggggtgacgacggcgatgccgcggagctacgcgacgggcgtgctggtgctgatctgcatgtgcacgttcagcttcggcctgtcgtgggcaccgctcaggtgggtggtgccgagcgagatctaccccgtggaggtgaggtcggccgggcaggcactgagcatctccatcacgctctgcatctccttcgtggagctgcaggtgttcatcgcgctgctctgcgccatgaagtacgccgtcttcgtgctctacgccgcgtggctgctggccatgaccgtcttcgtggtgatgttcctgccggagacgaaaggggtgccgctggaggccatgcagtccgtgtgggcgcggcattggtactggaggaggttcgtcaaggttgatgccaggcagcacaacgaagtcaattgtttgtaa

SEQ ID NO: 2548 - protein, 511 aa, Sorghum bicolor
MAGGGSSVGVPDYGGGVTFSVVVTSLMAASCGIIFGYDSGVSGGVTQMDSFLSKFFPDVIDGRKSAKVDAYCKYDNQWLTAFTSSLWIAGALSSLVASRVTRRVGRQAIMLIGGVLFLAGSVINAAAVNIAMLIVGRMLLGFGLGFTLQAAPVYLSETAPARWRGAFTSAYNAFVVVGILSATVTNYFTNRIPGWGWRVSLGLAAVPGAAVVLGAFFVSDTPISLVMRGQHEKARAALQRVRGGDADVDAEFKDIVRAVDVARQNDDGAFRRLFSKEYRHYLAIGVAIPVFYEFTGMIVISIFLPVLFRTVGFSSQRAILGSVINSMTNLASTLLSSVVMDRVGRRFLFVVGGLGMMLCEVAISWIMADHLGKHGGVTTAMPRSYATGVLVLICMCTFSFGLSWAPLRWVVPSEIYPVEVRSAGQALSISITLCISFVELQVFIALLCAMKYAVFVLYAAWLLAMTVFVVMFLPETKGVPLEAMQSVWARHWYWRRFVKVDARQHNEVNCL

SEQ ID NO: 2549 - DNA, 900 bp, Sorghum bicolor
atggagagggcggtgccggttcggaagccgcacaccaacacggccgaccttctctcctggtcggccacgggccctgacgcatctgcctcgccggcggcggcctcgcgccccagcctcaagccggccgcggggattacgccggcgatgttcggcgcgccggtcaccgatcaggaggccgaggatctgagcaagagtgaaagaaaattttgctctggctcgaagttgaaagagatgagtgggagtgggatttttgctgagaagagtgaaattggtgattcagaggcttcaaatcctgctaacaagacttccttgaggatgtaccagcaaactgtgactggaataagccagatttcattcagcgctgacggaagtgtttcgccgaagaagccatcgtcgatacctgaggtggctaagcagcgagagcttagtggtaccctggaagatgctgatgctaaaattaataagcagctttctgaagccaagaccaaggagcttagtggcagtgacatctttggtccgcctcctgagattcctgccaggccattggctgctcgtaacatggagctacaaggaaatgtcgatttttcacttccacagcgaagcgtccacacatcagttaaagtatctaatcctgccggaggtccaagcaacatctcattcagtgaagatcctgtagtgaagacagcaaagaaaatccacaaccagaagttccaggagctgacaggtaacaacatcttcaaggaggatgtccctacctcggctgagaagtctctgagctctgcgaagctgaaggagatgagcggcagtgacatctttgctgatggaacgccagctccccgagaatacctcggcggcatccggaagccccctggtggtgagagcagcattgctctgatctga

SEQ ID NO: 2550 - protein, 299 aa, Sorghum bicolor
MERAVPVRKPHTNTADLLSWSATGPDASASPAAASRPSLKPAAGITPAMFGAPVTDQEAEDLSKSERKFCSGSKLKEMSGSGIFAEKSEIGDSEASNPANKTSLRMYQQTVTGISQISFSADGSVSPKKPSSIPEVAKQRELSGTLEDADAKINKQLSEAKTKELSGSDIFGPPPEIPARPLAARNMELQGNVDFSLPQRSVHTSVKVSNPAGGPSNISFSEDPVVKTAKKIHNQKFQELTGNNIFKEDVPTSAEKSLSSAKLKEMSGSDIFADGTPAPREYLGGIRKPPGGESSIALI

SEQ ID NO: 2551 - DNA, 1098 bp, Sorghum bicolor
atggcgaggcgtgagctgttcctcgcgctgctgtggctcgcggccttggcgctggccaccggccccgctgacgcgacgaggaagatggtcggggtgtacgtgctcaggaagggggatttctccgtcaggctcaccaactggggcgccagagtcatgtccgtcgtcctcccagactgcaaagggaatttggctgatgtcgtccttggcagagacaccatcgctgaatacgtcaacgatgacgtgtacttcgggccgataacgggccgcatagcgcagagagtagcccgcggccggttcgtcctcgatggcaaggtctaccacatgcacaggaacgatggcaggaacacgattcacggtggtgacagaggattcagcagaagcatttggacggtgaaggagtacgtagccggcggcgagtcaccctacatcaccttctactaccgtagcttcgacggagagcaaggtttgccggggaacgtggacgcgtacgtgacgtaccgtatgtcggggccctacacgctgggcgtgcacatgaacgcgacggcgctggacaaggcgacgccggtaaacttcctgctgcacgtgtactggaacctgcgcggcgaggggaacggcgacgtgctgggccacacgctccggctgcacgcgtcgcggtacgccgtgctggatgatgagctcctcccgtcgtcggggcgcatcgagcccgtggccggcacgccgctggacttccggacgccgacgccgatcggctcgcgcatccgccaggtcgtcgtcatgggcggccgcgccgtcgggtacgacaccaactacatcgtcgacggcggggaagggatgatgcggcccgtggcgcaggtccgggaccccgcgtccggcagggcgttggagctgtgggcaaaccagccgaccatgcagctctacacggggaactttctcaaccacaccaagggaaagcgcggcaaggtgtacgacaggtacgctgggttctgcctggagacgatggggtacgtggacgccgtgaaccaccctgagtttccgtctcagacactcaggcccggccaggtgtacaagcacgatatggtctacaagttctcgttctag

SEQ ID NO: 2552 - protein, 365 aa, Sorghum bicolor
MARRELFLALLWLAALALATGPADATRKMVGVYVLRKGDFSVRLTNWGARVMSVVLPDCKGNLADVVLGRDTIAEYVNDDVYFGPITGRIAQRVARGRFVLDGKVYHMHRNDGRNTIHGGDRGFSRSIWTVKEYVAGGESPYITFYYRSFDGEQGLPGNVDAYVTYRMSGPYTLGVHMNATALDKATPVNFLLHVYWNLRGEGNGDVLGHTLRLHASRYAVLDDELLPSSGRIEPVAGTPLDFRTPTPIGSRIRQVVVMGGRAVGYDTNYIVDGGEGMMRPVAQVRDPASGRALELWANQPTMQLYTGNFLNHTKGKRGKVYDRYAGFCLETMGYVDAVNHPEFPSQTLRPGQVYKHDMVYKFSF

SEQ ID NO: 2553 - DNA, 1122 bp, Sorghum bicolor
atggcggcgctcctaaaacctatgtaccggcgactcgccgtcgtgggctaccgccggatctctacaccggcggtagagaagcccctgctgcccctcgtgtttcactggagcttccaggaaagacacaattccagtttggtggatgcgggtggaggattcggcaagatgcttgcctctccacagaggtactatgtctttggaggcaaaggtggtgtggggaaaacaagcatggcggcgtcgcttgctgtgaagtttgccaaccatggtgaaccaacacttattgcatcgacagagccatctcggtcactgggtgatttatttgaacaagacacgagtgatggcaaaactgtacgcgtcgatggatttgactctctttttgcagttgagattggccatatgaagttaaagggaaaacctcaagatgttggatcttatatcaacaatttacttggaaagatggggcttggaacacatcctgatattatgtctatgcttaatgagatgctgactataataccacctggacttgatgaagcagttttactatcagagctgataaaatctattgaagtacaagggcttgataaacttaggcgtatagtgctggatgctccatccactggacatacacttaagcttctgtcagcttctgattggtttcaaaagttcctcgttttgagcattaaggtcattaatgtcgcttcgtccatgccaacctctaatatgtctcttaagaatgtccaagtaatctctgccaagctagaggaactaaggaagcagattgccagaatgcgtgagattctatttgatccacaatcaacagaattcatcattgtgacaattccaacgatgatggcagttagtgagtcatcaagatttcacgcgtcattaatgaaggatggtgtggacgcaagaaggctcatcgtaaatcaggtgttgccaccatctgcatccgactgcagattctgtgctgcaaagaggagggaagaagcacgtgccttccgtgcgatactggaggaccatcaacttggcggcctgaagctgatccaggctcagctccttgacatggaggtgaaaggcgtccctgcactccgattcctcagcgattcagtgtggaagtag

SEQ ID NO: 2554 - protein, 373 aa, Sorghum bicolor
MAALLKPMYRRLAVVGYRRISTPAVEKPLLPLVFHWSFQERHNSSLVDAGGGFGKMLASPQRYYVFGGKGGVGKTSMAASLAVKFANHGEPTLIASTEPSRSLGDLFEQDTSDGKTVRVDGFDSLFAVEIGHMKLKGKPQDVGSYINNLLGKMGLGTHPDIMSMLNEMLTIIPPGLDEAVLLSELIKSIEVQGLDKLRRIVLDAPSTGHTLKLLSASDWFQKFLVLSIKVINVASSMPTSNMSLKNVQVISAKLEELRKQIARMREILFDPQSTEFIIVTIPTMMAVSESSRFHASLMKDGVDARRLIVNQVLPPSASDCRFCAAKRREEARAFRAILEDHQLGGLKLIQAQLLDMEVKGVPALRFLSDSVWK

SEQ ID NO: 2555 - DNA, 696 bp, Sorghum bicolor
atgcctgactccagggacggcaggagggcggccctcgctgacctctcaagcggggttggtggcggagggttctttatcaggagggtggcctcgccgcgagccctggcggtgaggggtgctgggaagccgttggcgcggcgttatatgtcaccatcgaggaacaaggagaacctgctgccaatttgggcgttgagggccacaccggcaaagaggagcccgcttcctggatggtaccccaggacgccgctccgcgatattacggccattgcaaaggccattcagagaagccgtgcaaggattgctgcggctcaacagcaaagccaaaggatcgagcagtcaccgcagtctgtgaacgtgactactccagcacaagcagagcaggatgctcctcacattgctgaagcctcccatgctgttgcatctggctccggttcaactgaaagagaaactgtagcaaaccctgctactgtcttggctgatgacaatttgaatgtgtcttcctcgccagcagaaagctcactgaatactccatccaaaccaatggatcctgcccttgctgacattgttgagaagaaactttccagttcaatagagaagatagagaagttggtgaggaaaaacatgaaacgaacaccgaaggctgcccgggcctccaggagggccacccagaggcgcaatctcatgtccatgcgatga

SEQ ID NO: 2556 - protein, 231 aa, Sorghum bicolor
MPDSRDGRRAALADLSSGVGGGGFFIRRVASPRALAVRGAGKPLARRYMSPSRNKENLLPIWALRATPAKRSPLPGWYPRTPLRDITAIAKAIQRSRARIAAAQQQSQRIEQSPQSVNVTTPAQAEQDAPHIAEASHAVASGSGSTERETVANPATVLADDNLNVSSSPAESSLNTPSKPMDPALADIVEKKLSSSIEKIEKLVRKNMKRTPKAARASRRATQRRNLMSMR

SEQ ID NO: 2557 - DNA, 1449 bp, Sorghum bicolor
atggaggtctccttctccgcgcccccacccgctccggacgccgcgtgtgccgccaccgctgccccgttgatgccacctgccgccgccgcccagacgctgccgccccctgtcgccgcggtctcctcctcgccgccgcagcagcagcaggcggctgcggctgcggccgtggtcgctccttccccggccgacgacaaggtcctcgtgtcagttgaggtactgttgcacgccgcgagcgcggctcgccacgaggacgtccaggtggcggtcgagaggatgctagaagctcgatgcttaagctatgttgatgggcctgtgccaattcctgctgataattcttttcttcttgaaaatgtcaaaaggatacgaatatgcgacactgatgagtgggttgggaatcgcaaagttcttttattttggcaagttaagcctgttgtgcatgtgttccagctgagtgaagatggtcctggtgaggaaccaagcgaggatgatacactctctagctttaacgagtgggccttacctgccaaagaatttgatggtttgtgggaaagtttactatatgaagttggtctcaagcagaggttgctgagatatgctgccagtgctttgctttttactgagagaggtgtggatacatgtctggtttcatggaaccggattgtacttttgcatggtccacctggaacaggaaagacttccttgtgtaaagcactagcacagaaactttccattcgcttcaagtcaaggtattctatgtgtcagttgattgaagtgaatgctcattcattgttcagcaagtggttttctgaaagtggaaaattggttgccaaacttttccagaagatccaggagatggtggaggaagaaagcaacctggtatttgtattgatagatgaagttgaaagccttgctgctgccagacaagctgccatatctggctctgaaccttcagactccattagagttgtgaatgcgctgctaacacaaatggacaaattgaagtcttggccaaatgttatcattttgacaacatcaaatatcactacagcaatagatattgcatttgttgacagggcagacattaaggcatatgtcggaccccctacgcttcaagcacgatacgagatcttgaggtcatgtatacaggaactcttaagagttggcattcttacatatcctcagggtagtagtgtgccatgtattctgaactattcgaccctggaggagaagaagcactgtcctgaggctgcagaaccccatggcgtgtttcaattatccagtctactctatgaagccgcaaaactgtgtgagggacttagtggccggtcattgaggaaactccctttcctggcacatgcctctgtcaccaacccttgctgtgatgcttctactttcttgcatacattgataaagactgcgcaaagagaagtattggagtcgcgtggttag

SEQ ID NO: 2558 - protein, 482 aa, Sorghum bicolor
MEVSFSAPPPAPDAACAATAAPLMPPAAAAQTLPPPVAAVSSSPPQQQQAAAAAAVVAPSPADDKVLVSVEVLLHAASAARHEDVQVAVERMLEARCLSYVDGPVPIPADNSFLLENVKRIRICDTDEWVGNRKVLLFWQVKPVVHVFQLSEDGPGEEPSEDDTLSSFNEWALPAKEFDGLWESLLYEVGLKQRLLRYAASALLFTERGVDTCLVSWNRIVLLHGPPGTGKTSLCKALAQKLSIRFKSRYSMCQLIEVNAHSLFSKWFSESGKLVAKLFQKIQEMVEEESNLVFVLIDEVESLAAARQAAISGSEPSDSIRVVNALLTQMDKLKSWPNVIILTTSNITTAIDIAFVDRADIKAYVGPPTLQARYEILRSCIQELLRVGILTYPQGSSVPCILNYSTLEEKKHCPEAAEPHGVFQLSSLLYEAAKLCEGLSGRSLRKLPFLAHASVTNPCCDASTFLHTLIKTAQREVLESRG

SEQ ID NO: 2559 - DNA, 459 bp, Sorghum bicolor
atggcgcttctcttgctcctcgccttcctgctggcaacggctgcagccccggccgccgcagtcgccatggacaacggaacacacgacggcagcaaaaccgccacgtccgcggtccagtcgtgcatcggcgaggggtgcgagcaaccggcgcaggcgctgccaatctacgggtacccgccaccggcggcaccgtcgctgccatccgcaccgccggcgccaccatcggtcccgggctcactgacgccgtgcccgccggtgaccgtcgtctgctgcggcggcggcggcggtgccggggggcagttcccacagcaaccgaacaactacgggcctcctgccggtggttacgtgccctattacagcaacgcctctgcctcgcctcctgtgctgcttgttcccgttactgctggctactacgtcatggctgcagcttgcatctttttactgtggactgtggtgtag

SEQ ID NO: 2560 - protein, 152 aa, Sorghum bicolor
MALLLLLAFLLATAAAPAAAVAMDNGTHDGSKTATSAVQSCIGEGCEQPAQALPIYGYPPPAAPSLPSAPPAPPSVPGSLTPCPPVTVVCCGGGGGAGGQFPQQPNNYGPPAGGYVPYYSNASASPPVLLVPVTAGYYVMAAACIFLLWTVV

SEQ ID NO: 2561 - DNA, 1431 bp, Sorghum bicolor
atgtcattgggctatgctgagaagctgtcctaccgggaggatgtgggtactgtgggaatgcctgagatctttgagccccctgagctagtccagaataagatagaagagcttgctgccatggtgcaaaagagtaagcatttagtggtgtttactggggcagggatatcaacttcatcaggcatacctgattttcgagggcccaagggtgtctggaccttgcagcgtgcaggaaaaggtgttcctaatgcatcacttcccttccatcgtgctgttccaagcttgactcatatggcactagtcgaactggaaagaggagggtttctaaagttcgtcataagccagaatgttgacagcctacatctccgttctggtttcccaagggagaagctggctgaattacatggcaattctttcaaggagatctgcccatgctgtaaaactgagtaccttcgtgattttgagattgagacaataggactgaaggatactccaaggcgttgttctgataagaattgtggagctagattaaaagatacagttcttgactgggatgatgctttaccccctgaggagatgaattcggccaaggagcattgtcgatcagctgatcttgtcctttgtctaggaactagcttgcagattactcctgcatgtaatatgcctctgatgtcaatcaagaatggggggagggtggctattgtaaatcttcaggcaactccaaaggataaaaaggcaagccttgtcatccatggacttgttgataaggtcattgctggagtcatgagcaagttgagtctgcgaattcctccatatatacgtactgactttgttcagctcactctcaggcactctgtgaaaaagaaatgtgttagatggactcttcgagtaacaagtattcatggcctccgagcaccgttgccatttcttcagtctgtcaaggtttcctttccagaaagacctgacatgaagtctgtagtgcttaaagagcaaccattctcattgcagagggaaacatcaatgaataaaccatttttcatgctgttgacattaaatttcagtgatggttgcagctgcttgagctcatcaatcggatggcctgttgattttcagaagcaaaaagacagtttcgtcagagatagagctctagtcctaaaggagttgcagtctgctgccgagcatgagacttgcggtgggcaacaagaagttctggaaagagagatcctgccaagagctgagacatctattcatggaattgtaacaaacgtcgtcaggtatgacattgaagctgaaaagttggctccacccaaggatgatttgatgaatcacagccgcagcaaccctgcaaaacggcacatggaaggcactgattgccactcgccactgccaaagaaactgaaatactttttgaaagacgagaggctgaactgctaa

SEQ ID NO: 2562 - protein, 476 aa, Sorghum bicolor
MSLGYAEKLSYREDVGTVGMPEIFEPPELVQNKIEELAAMVQKSKHLVVFTGAGISTSSGIPDFRGPKGVWTLQRAGKGVPNASLPFHRAVPSLTHMALVELERGGFLKFVISQNVDSLHLRSGFPREKLAELHGNSFKEICPCCKTEYLRDFEIETIGLKDTPRRCSDKNCGARLKDTVLDWDDALPPEEMNSAKEHCRSADLVLCLGTSLQITPACNMPLMSIKNGGRVAIVNLQATPKDKKASLVIHGLVDKVIAGVMSKLSLRIPPYIRTDFVQLTLRHSVKKKCVRWTLRVTSIHGLRAPLPFLQSVKVSFPERPDMKSVVLKEQPFSLQRETSMNKPFFMLLTLNFSDGCSCLSSSIGWPVDFQKQKDSFVRDRALVLKELQSAAEHETCGGQQEVLEREILPRAETSIHGIVTNVVRYDIEAEKLAPPKDDLMNHSRSNPAKRHMEGTDCHSPLPKKLKYFLKDERLNC

SEQ ID NO: 2563 - DNA, 210 bp, Sorghum bicolor
atggtgtcgcttgggattgtgaggctggtcgctctggtgctcttggtagtcttcagttcgtcgctgcatcaacaagcaggcgttggtgctattaggctgcatgacagaaggcaacacgcgcagcagtgggtggaggagaggaatcagctgagatcatacatgaccatggactacgctccatggcaccgccgcgtgcccaagcacaactga

SEQ ID NO: 2564 - protein, 69 aa, Sorghum bicolor
MVSLGIVRLVALVLLVVFSSSLHQQAGVGAIRLHDRRQHAQQWVEERNQLRSYMTMDYAPWHRRVPKHN

SEQ ID NO: 2565 - DNA, 624 bp, Sorghum bicolor
atggcgtcgcggacggcgtccaaggatatcatcacgctgcgaggctccgccgccatcgtcagcgagttcttcggatacgcggcgaatagcatcctctacaaccgcgcggtgtatcctgaggagagcttcaccaaggtgaagaagtatgggctcaccatgctgctcacgcaggacgagggggtgaaggacttcatcgccaacctcacctcccagctctcaaagtggctggaggccgggaagctgcagcggattgtgctggtgataatgagcaaggccaccagcgaggttctcgagcgatggaacttcaatatcgtcactgacgccgaggtcgtcgagaagggggctatcaaggagaagagcgacaaggagatcatgagggagattcaggccatcatgcgccagatcacctcctgcatcacctacctcccctgcctcgacgagccatgcgtgttcgacgtgctggcctacacggacaccgacgtcgacgctccgggcacctgggtcgagagcgacgccaagctcatcgacaacccgcagatggttaagctccactcgttcgacaccaagattcataaggtggacacgctggtgtcgtacaagaaggatgagtgggacgaggagtag

SEQ ID NO: 2566 - protein, 207 aa, Sorghum bicolor
MASRTASKDIITLRGSAAIVSEFFGYAANSILYNRAVYPEESFTKVKKYGLTMLLTQDEGVKDFIANLTSQLSKWLEAGKLQRIVLVIMSKATSEVLERWNFNIVTDAEVVEKGAIKEKSDKEIMREIQAIMRQITSCITYLPCLDEPCVFDVLAYTDTDVDAPGTWVESDAKLIDNPQMVKLHSFDTKIHKVDTLVSYKKDEWDEE

SEQ ID NO: 2567 - DNA, 822 bp, Sorghum bicolor
atggcaaacgcgccgccgaggatcttggcagtcctgggggctctcgggctagcactcctctgcgctgccgccgtcccggccgccgcgcagaactgcggctgccaggcaggttactgctgcagcaagttcggttactgcggcacgacggacgactactgtggcgacgggtgccagtcgggcccgtgccgctcgagcggcagcagcagtagtggtggtgggaacgtgggtagcgttgtcaccgacgcattcttcaacggcatcaagaaccaggccgcgagcgggtgcgagggcaagaacttctacaccaggagtgcgttcctgagcgccgccaactcgtacaaaagcttcggtggcgggtcggtggcgggcaagcgcgagatcgccgctttcttcgcccatgtcacccacgagaccgggcatttctgctacatcagcgagatcaacaagaacaacgcctactgcgactcgagcaacaagcagtggccgtgcgccgcgggacagaagtactacgggcgcggcccgctgcaaatctcgtggaactacaactacgggcctgccgggaaggccatcggcttcaacgggctcgcgaacccgaacaaggtggcgcaggacgccgtgatcgcgttcaagacggcgctctggtactggacgaacaacgtgcacggggtgatgtcgcaggggttcggcgccaccatcagggccatcaacggcgccctcgagtgcaacggcaagaatactgcccagatgaacgcgcgggtgggctactacaagcagtactgccggcagctcggcgtcgaccccgggcccaacctcacttgctag

SEQ ID NO: 2568 - protein, 273 aa, Sorghum bicolor
MANAPPRILAVLGALGLALLCAAAVPAAAQNCGCQAGYCCSKFGYCGTTDDYCGDGCQSGPCRSSGSSSSGGGNVGSVVTDAFFNGIKNQAASGCEGKNFYTRSAFLSAANSYKSFGGGSVAGKREIAAFFAHVTHETGHFCYISEINKNNAYCDSSNKQWPCAAGQKYYGRGPLQISWNYNYGPAGKAIGFNGLANPNKVAQDAVIAFKTALWYWTNNVHGVMSQGFGATIRAINGALECNGKNTAQMNARVGYYKQYCRQLGVDPGPNLTC

SEQ ID NO: 2569 - DNA, 2178 bp, Sorghum bicolor
atgtctgacatcaattttgatgagattcttgaggttcctgacactcctgaccaacatcagtcaaaataccatgtttccagctctattgttgggagggattatacaatggcagctgctaatccatcaccacggcgcaaacttagaattagattcaagaacaattccctggatggttcatcaagtcagaataatgcttgtagtgtattgcctgcagcttcagatattgatcatattttcaaacaagctaaagcagcacaggttctggaactgtcaaaagattataatgcaaaattttccctaaagaaatctgacaggacagggatatctgttgacaatgaaaagagggctgaaaaacatggcttggatcagagcagaagcatttcgaacaacataagttgtagtgtgacggtaggaaggaaccctaccttccaagttaaagatggagaggttgttcagcaagatgcaggtcatcagaatgcaaactttcttggcataggatcaggtcttcctactatcccagtgggaaaaccaggaaacaggacatgcactagcactacgaaaggtgtaacaggtgctgatgtttgtctaggatcaagttctggagaggtcaaaggggaagtgatcactgacaaggtcattacaggacctacaagccctctgtgtgttgttcctcgaaggcatgttggccaaaaaaggctggtccacaatggatgtatttctccctctaacatagccaagacaaatgtaaaagtggatgcaaaacgggaaatgtgctcttcaagtgaacatttgcaccatccacatcctcagcttgatgcatttgacagaagcagtgtgattgacctcactgataattcaccaataatgacaaggcagagatctaaagtgaacaataaatttatccctggacacaatatggacacaagggccacaaaaaaactgagaacagagacaactggcaggacttcggttccactgtccaaatatcatgcaaacagcagcaattgttctgaagctaatttatcaggccacaacaacaaaggaaaaggaattagcattgatatcttggatagtgatcagattggagaagctgacttgaggggggttgatcttagtactgctggaacttgtgtaaacaaaaacagttctgatataaacacagagcaaggttggagaacaacacacaaccacacaagtaaattacccatttcgtttatgggtaacacaactactagttccagacgagaacctggatcttccacgcgatctaatcaaaaccatggatctgctggaggcaatcatacctcagttagtggagcaaccatgatggttcctgataggttggggaataaaacaataatgaatcataaaggatggagaaaagaaacctcaacttcttgtcatactggtgaaagctctagtgctgttgacgaacctagaggttctcttcaatcatcaaaaatatcagccggcagaaatcataccagtcatcagcataatattcctgtaataaccatagatgacatatcccctgaagctagacctagttcgagtggattcactaatggaacctctgttgatcctaacatagaagcacaattggagtcggatgagttattggctcgccaactccaggagcaactttacaatgaatctcctcgttttgccccaacagaagagattgatgcaatcgtagcaatgtcacttcaacatgaagaagatgcacatcggacatctaggcctagagatgcccgggctgctcgttcgagttcttatcgaaatgctcttagggctcgattggcgacagcagacgatatgatttcccgtctgcggaatactgctccaagaacactgggattgggagctgctttagcaagatattctggtgctttgcacattcaaccaaacattgacttaaatgactatgacgcactgcttgcactggatgaaaataaccaccagcacactggtgcttcagaaagccagatcaataatttgccgcagtcagtagttcagtccaatagcattgaagatccatgttctgtctgccttgaaaatccttctgtgggagatactatccgccatctgccatgctttcacaagttccataaagagtgtattgacgagtggcttaaaagaaagaaactgtgcccagtctgcaagtttgggattaattga

SEQ ID NO: 2570 - protein, 725 aa, Sorghum bicolor
MSDINFDEILEVPDTPDQHQSKYHVSSSIVGRDYTMAAANPSPRRKLRIRFKNNSLDGSSSQNNACSVLPAASDIDHIFKQAKAAQVLELSKDYNAKFSLKKSDRTGISVDNEKRAEKHGLDQSRSISNNISCSVTVGRNPTFQVKDGEVVQQDAGHQNANFLGIGSGLPTIPVGKPGNRTCTSTTKGVTGADVCLGSSSGEVKGEVITDKVITGPTSPLCVVPRRHVGQKRLVHNGCISPSNIAKTNVKVDAKREMCSSSEHLHHPHPQLDAFDRSSVIDLTDNSPIMTRQRSKVNNKFIPGHNMDTRATKKLRTETTGRTSVPLSKYHANSSNCSEANLSGHNNKGKGISIDILDSDQIGEADLRGVDLSTAGTCVNKNSSDINTEQGWRTTHNHTSKLPISFMGNTTTSSRREPGSSTRSNQNHGSAGGNHTSVSGATMMVPDRLGNKTIMNHKGWRKETSTSCHTGESSSAVDEPRGSLQSSKISAGRNHTSHQHNIPVITIDDISPEARPSSSGFTNGTSVDPNIEAQLESDELLARQLQEQLYNESPRFAPTEEIDAIVAMSLQHEEDAHRTSRPRDARAARSSSYRNALRARLATADDMISRLRNTAPRTLGLGAALARYSGALHIQPNIDLNDYDALLALDENNHQHTGASESQINNLPQSVVQSNSIEDPCSVCLENPSVGDTIRHLPCFHKFHKECIDEWLKRKKLCPVCKFGIN

SEQ ID NO: 2571 - DNA, 1101 bp, Sorghum bicolor
atgcctgttgaccacaccttcttcgagtttggatcgattcgatatcatgtggaggcttcagtgtcggatcctgagaacgtgttcctgtcgatatcgacgccgtcgctctcccacgaggcggctgcaccctcgtcgtcgtcggcggcgagccgcctgcctgaactgaccctgcaggagacgaggaagacgtatggcaggttcgcggagatcgtggagccgccgagggaaggatacgccctgacgctcaagctcaacttctccggcctcgcccggccgaaagatcgcgtgaaggccattaaccaggtgtcgctgctgcaatccgtggtgctgagctcgcagctgaaggagatgctggggagcctcggctcgtcgccgggcaccatgaggctcgtgtacaaccagagggagcccttcttcgtcagcaggacggctgatgagacgataaacgccatcttccccatgcgcttcagggacgacacggacctggccatcgccacctccttcttccaggagctacaggacgtcgggaactcgttcgcgtgggcgcccaagtgcagctggtcgccgatcccgccgccggagctgcgcggggagaaggtgcaccacctcaccaccaacggcggcttcgtctccttcggcgtcctgtcgcgccacgtgagggggaagcgggccgccaagaccgcgtggatcctgctcaacttccagtcctacgtcaagtaccacatcaagtgcacccggagccacgtccagagccggatgcgggagcggctggagacgctgacggaggccgtccagaacgcgaggctacgcgggacgaatagccacgacaagaagcgggcgtcacaagttgtgaagaagaggagcagcaagagacggctcgttagcctggcgaaagcgagcaagaagctgcacaagggtttcagggccgtcctggacaagatcatgaagcggctgcggcagaggatcagggtgaaaggcctggaccggctccggcggcagttccggtgccggtgcttcgcggtgcctaggctcccggccgcgccacctcgcgctcacagtcgcagcaggaaggcgcacagataccacaagctggccgagtaa

SEQ ID NO: 2572 - protein, 366 aa, Sorghum bicolor
MPVDHTFFEFGSIRYHVEASVSDPENVFLSISTPSLSHEAAAPSSSSAASRLPELTLQETRKTYGRFAEIVEPPREGYALTLKLNFSGLARPKDRVKAINQVSLLQSVVLSSQLKEMLGSLGSSPGTMRLVYNQREPFFVSRTADETINAIFPMRFRDDTDLAIATSFFQELQDVGNSFAWAPKCSWSPIPPPELRGEKVHHLTTNGGFVSFGVLSRHVRGKRAAKTAWILLNFQSYVKYHIKCTRSHVQSRMRERLETLTEAVQNARLRGTNSHDKKRASQVVKKRSSKRRLVSLAKASKKLHKGFRAVLDKIMKRLRQRIRVKGLDRLRRQFRCRCFAVPRLPAAPPRAHSRSRKAHRYHKLAE

SEQ ID NO: 2573 - DNA, 1062 bp, Sorghum bicolor
atggagctggggagcgccgtttcggcgcacagatgtagcagctactacacggcgacctacacccactgttccataggcttctccccacgggtccgcgccaccagctgctggatccgcgcggcggctgagggcgacgacggcggggcagaccgccgacggagaggcgccagcttcggcgacgataggcccaaggtcgtcgaagtcaccgccgagctcgccatgtgggacaagctcggggccgtcgtcaggctcagctatggcattgggatctacggggccatggcgctcaccgggagattcatatgccaaatggccgggatagactgcacgggaggcttccatccatctctcacggcacttgtcgaggggcttggttatgcagctccaccaatcatggctctgctcttcatccttgatgatgaagtagtcaagtattcgcctcacgcgcgtgccatccgtgatgtggaggatgaggagcttcgcagcttcttctatggcatgtcaccatggcagttcattctcatcgtggctgctagctcaattggtgaggagctcttctaccgtgcagctattcagggagcattggctgatattttcctgagaagcacagagctaatgaaagatgctcgagggattgcatccctgagtggtattgttcctcctttggttccatttgctcaaacgtttgcagcagtcatcactgcagccctcacaggaaccctctactatattgccacagctcccaaagaccctacatatgttgtgacaccagcaatgcgttcgcgcacagggcgggagaacctcaagaaactatttgcagcttggtacgagaggaggcaaatgaggaagatatactccccgcttctagaaggaatcttggctttctaccttggcttcgaatggatccagaccgacaatatcctagcacctatgatcacccacggcatatactccaccgttgtccttggccatgggctctggaaaatccacgaccaccggagaaggctacggcagcggattcagcaggtcagaagtcaagagagcagctcagacacattgtaa

SEQ ID NO: 2574 - protein, 353 aa, Sorghum bicolor
MELGSAVSAHRCSSYYTATYTHCSIGFSPRVRATSCWIRAAAEGDDGGADRRRRGASFGDDRPKVVEVTAELAMWDKLGAVVRLSYGIGIYGAMALTGRFICQMAGIDCTGGFHPSLTALVEGLGYAAPPIMALLFILDDEVVKYSPHARAIRDVEDEELRSFFYGMSPWQFILIVAASSIGEELFYRAAIQGALADIFLRSTELMKDARGIASLSGIVPPLVPFAQTFAAVITAALTGTLYYIATAPKDPTYVVTPAMRSRTGRENLKKLFAAWYERRQMRKIYSPLLEGILAFYLGFEWIQTDNILAPMITHGIYSTVVLGHGLWKIHDHRRRLRQRIQQVRSQESSSDTL

SEQ ID NO: 2575 - DNA, 1023 bp, Sorghum bicolor
atgtcagctggtttccagctcggtgtgatcgggtcacttgcactctctgttgcatcttcagttgccattgtcatctgcaacaaagctctcatcagcacacttggttttccattcgctacaacattaacaagctggcatctgatggtaaccttctgcaccctccatgtggcacagcgcttacatttcttcgagcccaaggcaattgatggacatacagtgatactctttggattgctgaatggcacgtcaattggccttctcaacctgagtttaggattcaactccattggattctaccagatgacaaaattggcgatcatacctttcactgtgctattggagactatcttcttgaagaaaagattcagcgagagtatcaagctttctcttctggtcttacttcttggagtaggaattgcttcagttactgatctcaagctaaatatgcttgggtccatcctttctggcctcgccattgccaccacttgtgttggccaaattctcacaaatacaatacagaagaagttgaaggtctcctcaacccagcttctgtaccaatctgcgccttaccaggcggcaattctgtttgcaactggcccttttgtggatcaactccttactaaccggagtgtctttgcacacaaatactctgctccagttctgggtttcattgtcctatcttgcttgattgcggtgtctgtgaacttcagtacatttcttgtgattggaacaacatccccagtgacataccaggtgcttggtcacctgaagacatgtctggttctatcatttggctacactctattacacgatcctttcactctaaggaacatattgggcattctaattgccatatttgggatggcactgtactcctacttctttgtaagagagggcaagaagaagtcagcaaatgatgctctgccagtttcacagatgtcagataaggaggctgaaccacttttggcaactaaagacagcaccgacagcaagaaagcaaatggtttatctcacgactgctaa

SEQ ID NO: 2576 - protein, 340 aa, Sorghum bicolor
MSAGFQLGVIGSLALSVASSVAIVICNKALISTLGFPFATTLTSWHLMVTFCTLHVAQRLHFFEPKAIDGHTVILFGLLNGTSIGLLNLSLGFNSIGFYQMTKLAIIPFTVLLETIFLKKRFSESIKLSLLVLLLGVGIASVTDLKLNMLGSILSGLAIATTCVGQILTNTIQKKLKVSSTQLLYQSAPYQAAILFATGPFVDQLLTNRSVFAHKYSAPVLGFIVLSCLIAVSVNFSTFLVIGTTSPVTYQVLGHLKTCLVLSFGYTLLHDPFTLRNILGILIAIFGMALYSYFFVREGKKKSANDALPVSQMSDKEAEPLLATKDSTDSKKANGLSHDC

SEQ ID NO: 2577 - DNA, 1023 bp, Sorghum bicolor; identical to SEQ ID NO: 2575

SEQ ID NO: 2578 - protein, 340 aa, Sorghum bicolor; identical to SEQ ID NO: 2576

SEQ ID NO: 2579 - DNA, 249 bp, Sorghum bicolor
atggcgtcgacctcccgccgcatggtcgcatcatccgtcctcgtcttcctgctgctgctcgccgcctcagagatggggacgacgagggtggcggaagcgaggcactgcctgtcgcagagccacaagttcgtcggcgcctgcctgagcaagaggaactgcgccaacgtctgcaggacggagggcttcccgtggggcgagtgcaggtggcacggcattgagagcaagtgccactgcaagcggatctgctag

SEQ ID NO: 2580 - protein, 82 aa, Sorghum bicolor
MASTSRRMVASSVLVFLLLLAASEMGTTRVAEARHCLSQSHKFVGACLSKRNCANVCRTEGFPWGECRWHGIESKCHCKRIC

SEQ ID NO: 2581 - DNA, 2382 bp, Sorghum bicolor
atggaggaccccgacccgccccctgacccgctctccgtcttcctcatcgcctccgccgccgagtcacccaaccccgtcagatccgtcccttcctctgcgcccctcctccattcaacttcagatccagctccgcctgaggtggatctattccctgatgggtcgccgaggggggctcagcccggccacacctcgctcggggccatttccatgtcaccggcgggtgtccgttcgccgccgacgacacaccacatcgtacctgaggggcctatggtggagctacgggtgataaaccaggtgcctgcttcttctaccgagcgcatgactgctttgcacaacttggtctgcgacgcgcaggtacgttcggcatccgacgacagggacaacaggacttcaatgctcgccgggaaagatgggacgagcacggtggaatcaacgccggcttccattggagcgcagatgccttcacctctcaccaggaaagctgaacctctacatcgattagtctgcggcgaggaggaggtccttcagacccagacgcattcaatgctcatcggcaccatgcctctgcccctgcccaatcagggagaacaggagttcccaagcctctacggcattgaagtaccttcgagcccaacctcaattgacccggtgattcaggaacaggcccaggcattgctccccgacctgagggagtaccaacaggaccaaagcttcacccacacccacaaacaaaactcagaccacatcgggttgcagatcgaccaccgttcctttgcggaggtggtgagaggggagaaaagcaaggagggaggtatggcggcggctcgctatccaggagacccacgggccaggccggcacgcggcttctgtgctgtgtcggccaccggagacatccgtaggcgtcgagacgagctcatcaacagggcggcagtgtgctggctccctggcaacagccatgacacggagccgcaccacctcgagactgcgctccgccaacttgacatccatcgtggcgacgtccaggtgctcaagcacttccccgagcagttcctagccatcttcaacaaccctagggacaggcaacgggtggtggacgtgggcgtcctccctgacaacggccgacgcttccagttcgcggcttggagcgagcgtcgctacgccaacaacatcagctgggagttccgcgtcaaagtccgcattgaaggtgtcccggttcactgctgggctaaagatgtagcagcgaaagtgctcggcaagagctgtgcgattcactacctggaggagaccacccggaggcgccagcgcaccaggtcctttgacctatgggcctggtgcagcgacccgtgtgacatacccacggaggttcagctcacagtcaccgagccggacagagaccatccacaccgtgatgagcctgtcgacgtcaagcgaagccaagtctacaccctgtgcaaccatctggaggtggtgaaggacctcaccttcctccaggatccaggaaggctaggtggccctgcaaatcgcagggcgcgccgtgtctttgactgggactatggtgtgccggacacgaagggggagcgtcttcaggggagacgtgctggtcatgaccgtggccgtgacatgaggccgcgtcgggacgacgacgactacgacgacaggcgcaatctgggtaaccgtcgccatcgcagcctttctgcctgggcaagaaattcccgctgcaggggtggggctgaggactgccttagctccaacagatggcgtggtcgtgacggatcacccccaaggaggaacagatcattagcaagggcacaccaggagccggctctggtgtggaaggtaaaggaacaaaaaaaggagaaggcgccaaaaagggtctcttttgcagatcctattgcaactgagctgcagccccccatgcgtccaattagagacgacagcataatgctcatcaagggtacccctcccttcccatcctattttgttgactctaatcccctggtagttgattgtgaaaggtggaacaccccatttgcagtggccaacggcgccatcctgaactgcagcaagaagatggaaggagaaaaggaaggcttcgcagtcaacaactcccccgtgatgctgacagaaaaggtgcagtacaagattgcaaacagggaccgcagcaacatccttccaaagaaggacatgggaatgacaagagaggaggcttttgtcgaactggggactgtactggggcatctccacaatatcacgcattttgcgaggccgattgaaaagatcaagatggacgccatccaggacctcatcgaacatggtgctgctatcctggtgaagaaaaacaaccagaccgacgatgctacggagctgggacagagggcctag

SEQ ID NO: 2582 - protein, 793 aa, Sorghum bicolor
MEDPDPPPDPLSVFLIASAAESPNPVRSVPSSAPLLHSTSDPAPPEVDLFPDGSPRGAQPGHTSLGAISMSPAGVRSPPTTHHIVPEGPMVELRVINQVPASSTERMTALHNLVCDAQVRSASDDRDNRTSMLAGKDGTSTVESTPASIGAQMPSPLTRKAEPLHRLVCGEEEVLQTQTHSMLIGTMPLPLPNQGEQEFPSLYGIEVPSSPTSIDPVIQEQAQALLPDLREYQQDQSFTHTHKQNSDHIGLQIDHRSFAEVVRGEKSKEGGMAAARYPGDPRARPARGFCAVSATGDIRRRRDELINRAAVCWLPGNSHDTEPHHLETALRQLDIHRGDVQVLKHFPEQFLAIFNNPRDRQRVVDVGVLPDNGRRFQFAAWSERRYANNISWEFRVKVRIEGVPVHCWAKDVAAKVLGKSCAIHYLEETTRRRQRTRSFDLWAWCSDPCDIPTEVQLTVTEPDRDHPHRDEPVDVKRSQVYTLCNHLEVVKDLTFLQDPGRLGGPANRRARRVFDWDYGVPDTKGERLQGRRAGHDRGRDMRPRRDDDDYDDRRNLGNRRHRSLSAWARNSRCRGGAEDCLSSNRWRGRDGSPPRRNRSLARAHQEPALVWKVKEQKKEKAPKRVSFADPIATELQPPMRPIRDDSIMLIKGTPPFPSYFVDSNPLVVDCERWNTPFAVANGAILNCSKKMEGEKEGFAVNNSPVMLTEKVQYKIANRDRSNILPKKDMGMTREEAFVELGTVLGHLHNITHFARPIEKIKMDAIQDLIEHGAAILVKKNNQTDDATELGQRA

SEQ ID NO: 2583 - DNA, 141 bp, Sorghum bicolor
atgggcgggttcgatcagcaggtgaaggagcggaccaaggagctgaagcacctcaagaccgcggcggtgaagggcatcaaggccgccggcgagtcgtgcaagaaggcgtggagcaaggtcaggagcagcatcaagcgctag

SEQ ID NO: 2584 - protein, 46 aa, Sorghum bicolor
MGGFDQQVKERTKELKHLKTAAVKGIKAAGESCKKAWSKVRSSIKR

SEQ ID NO: 2585 - DNA, 1449 bp, Sorghum bicolor
atgggatctgtcaacagcaatgatcaaattggattgtgtcagctatctccgctaaccaatattgatctctcgtataactttttggttggagatattccttcatgcttacagcaaatccaaaggtacaccttcgccttttgtgacttaaaagtttcagttgtcttcctgcacttacctgttttacagtatttgaacagatcaagcttggtggggaattgcttccagaacaacacatcaaaccgtccactacagcaatgtgatactaatcaggacagaggtgaagacaatggtgctgatgagaatgcgcagaaaggcctgccagagccactttggctattcattctggaagtcatcgcggcactttcattgctttgtttgttaacactttgtaccatgactggcctccgaaggtgcagaactagatcctctgggtccgggaccagtgttccatggacaagagctgtaagctggaaggagaataccgtaatctcaatcgatgatgacctcctggtaaatgtgccaaagataagccggcaagagctggcagaggcttgtgaagacttcagcaacataattggatcgtctcaggagacagttgtgtacaagggaactctgaaggatggccgggaaatcgctgttgtgtctctgactgtcccggtgcattactggaatgactatgtggaactttactttcagaaggaggtgatagaaatgtccagactgagtcatgaaaatgttgcaaagatggtgggatactgcaaggaatctgatccattttcgagaatgctagtctttcagtatccacctaatgggacactctacgagcatctgcacgatggagatgggtggcagctatcttggcctagacggatgaaattagcactggccatctcgcgggttctcagatacttgcacaccgagctgcaacctccatttgcagttgctgcactgacgtctagttcagtttacctaaccgaagacttctccccaaagataatcgatttcgagaggtggagatatcttgcgaccaaaccaggatttgcctcactgaatggcgagtctgtcaacagcattacagattctcggcataagcgcttcatggacgtccaggccaacacctatgctttcggcgtgatcctgctggagctcatcagtggcagagcctcggtttccaaagatacagggggcttagtggattgggcaagaaagcacctggagcagcccgaggagttcagcaagctggtggacccgaggctgcagagcgtgaaccaggagagcctgggcatcgtctgcaacgtggtgaacctgtgcatcgacccggagccgtcgcggcggccgtccatgagcatgatcgcggccatcctggaggaaggcatcgaggcgtcggcggccaccatgctcaggaattcgtctctggcctgggccgaagccgagctggccatctcctag

SEQ ID NO: 2586 - protein, 482 aa, Sorghum bicolor
MGSVNSNDQIGLCQLSPLTNIDLSYNFLVGDIPSCLQQIQRYTFAFCDLKVSVVFLHLPVLQYLNRSSLVGNCFQNNTSNRPLQQCDTNQDRGEDNGADENAQKGLPEPLWLFILEVIAALSLLCLLTLCTMTGLRRCRTRSSGSGTSVPWTRAVSWKENTVISIDDDLLVNVPKISRQELAEACEDFSNIIGSSQETVVYKGTLKDGREIAVVSLTVPVHYWNDYVELYFQKEVIEMSRLSHENVAKMVGYCKESDPFSRMLVFQYPPNGTLYEHLHDGDGWQLSWPRRMKLALAISRVLRYLHTELQPPFAVAALTSSSVYLTEDFSPKIIDFERWRYLATKPGFASLNGESVNSITDSRHKRFMDVQANTYAFGVILLELISGRASVSKDTGGLVDWARKHLEQPEEFSKLVDPRLQSVNQESLGIVCNVVNLCIDPEPSRRPSMSMIAAILEEGIEASAATMLRNSSLAWAEAELAIS

SEQ ID NO: 2587 - DNA, 1023 bp, Sorghum bicolor
atggacgctttcacacatgttcctcccggctttcgtttccaccctaccgatgaggaactcgttgattactaccttaggaaaaaggtagcaatgaagaagatagatttggatgttataaaagatgtggacttgtacaaaattgagccttgggatctgcaagaaaaatgcaggattggagctgaagagcagaacgagtggtacttcttcagccacaaggacaagaagtacccaaccggcactcgcaccaacagagcgacgacggctggtttctggaaggccacagggagagacaagccgatctatgtgaagaactgcctcgtagggatgaggaagacactagttttctacaaaggccgagcgcccaacgggcagaagtcagactggatcatgcacgagtatcgcttggagaccaacgaaaatggaatcccacacgaagaaggatgggttgtctgcagggtgttcaggaagcgactcgcgactgtccaaagaatggttggggactcaccttactggttcaacgaccacgcagggttcatgccaccggagctcggctcgccgaggcaggcggcacaccaccagcagagcgccatgatgtaccataggcaacagagcagctacccttgcaaggtggagctagagtaccaccacctccttccccaggagcacttcttgcagcagctccctccgctggagagccccaagctccctgaccttattggccaagtagatgctactctccagccatgcggccttacaccggagcatggtctcgttcgctacaccgtgcaagagctccaagccgagccgctctatctgacggctaggaatgtgtctggcacagattggcgagctctcgacaagttcgtggcgtcccagctcagcaacgacaccactctgaaggagtcaactagctactccaatccgacacaggtgtttcagcagtctgaggagaaagaggaggcattagactacgtgtcaacatcagcttcttgtggaggtgacaatgatttctggaaattataa

SEQ ID NO: 2588 - protein, 340 aa, Sorghum bicolor
MDAFTHVPPGFRFHPTDEELVDYYLRKKVAMKKIDLDVIKDVDLYKIEPWDLQEKCRIGAEEQNEWYFFSHKDKKYPTGTRTNRATTAGFWKATGRDKPIYVKNCLVGMRKTLVFYKGRAPNGQKSDWIMHEYRLETNENGIPHEEGWVVCRVFRKRLATVQRMVGDSPYWFNDHAGFMPPELGSPRQAAHHQQSAMMYHRQQSSYPCKVELEYHHLLPQEHFLQQLPPLESPKLPDLIGQVDATLQPCGLTPEHGLVRYTVQELQAEPLYLTARNVSGTDWRALDKFVASQLSNDTTLKESTSYSNPTQVFQQSEEKEEALDYVSTSASCGGDNDFWKL

SEQ ID NO: 2589 - DNA, 1662 bp, Sorghum bicolor
atggcttctctcaagccatctctagtgttctgctctattcttactcttctgagcttgaactgtggtccatctcatgtatttgccaaggtttatatggtggtgatggaggatgacccagtcatttcctacaaagtgaaccgcaagcatgtaatgagaggcgacgaagctcagaagtacaaacgggtggccacaacaaagcatgacagcttcctggactcatttctcccagtgggatcttacaagaaactatacagttacacgcacttgattaatggatttgctctccatgctgaatctgagaagacagttagaattcttagtggtgcaaaaggagttagatttatccaagaagacatcaaaatggccaagatgaccacacatacaccaagttacattggagctagtgcagtatggccgctcctgggtggtgctgagaattccggtgatggggtggtgattggcatgattgataccgggattgaccctaagaacccaagctttgctatcagcaacacgtcaagccaagcaaaaccaccaccggctagtttcaaaggaatatgtcgtactggaaatagatttcctccagattcatgcagtggtaagatagtgggagctaggtggttcgcacgtgctgcccaagcgaccggggagttcaatgctactattcactatgaatctccttatgatccagatggtcatggcagccacaccgcatcgattgcagctgggaatttccatactccactaatatccagaggctacaactttgggtatgcaagcggcatggcccctggagctcgtcttgcaatctacaaagctgcctatcctttcgtttcacctgggccagcatctttcctcaatttgcttgaggcacaactgctccttgccactaaggctggagtgtcagttgttcaggccgttggcaatgcaggacccgatgcaaacacagtcgtctcattcagcccatggatattaagtgttgctgcttcaacgacagaccggaagtatagaaaatcaatcataattggcaatgggaaagtattttcttgcggtgccctttcagcaccaacaccaggtgaaacaatgtacccactagcatgggctgatgatgtggtcaatgagaattcatctgatgggtctgttaattgccaagatccaaggatgttcatcagacctcttgtccagggaaaggtgattatttgcatgttcgactcatcaaactactatgaagacgaccccgaccttgctagtgtcattgatacgattgagagaattggagctgctggggtcatcatcactgaccgttcttcgggtgacatcgacattgattttgagcctacatttcccacgacagtcccttccgccatagttctgaggggttccgacatgcgagctctgtttaggtactataacaacaacacggttcgagatgaacatggaaatgtggtcagcttcggagcgactgtacggattacggagggacggcgtgcaagctattcgggagaagcaccagtggtggccgactactcctcgagggggccggacgtggagaacgcacagatgcagccggcggagggtgaaaacccagcgtcagggctccggggaattttatttggggagcacgatcccggcgaccgacgacctgccggagatccagggtga

SEQ ID NO: 2590 - protein, 553 aa, Sorghum bicolor
MASLKPSLVFCSILTLLSLNCGPSHVFAKVYMVVMEDDPVISYKVNRKHVMRGDEAQKYKRVATTKHDSFLDSFLPVGSYKKLYSYTHLINGFALHAESEKTVRILSGAKGVRFIQEDIKMAKMTTHTPSYIGASAVWPLLGGAENSGDGVVIGMIDTGIDPKNPSFAISNTSSQAKPPPASFKGICRTGNRFPPDSCSGKIVGARWFARAAQATGEFNATIHYESPYDPDGHGSHTASIAAGNFHTPLISRGYNFGYASGMAPGARLAIYKAAYPFVSPGPASFLNLLEAQLLLATKAGVSVVQAVGNAGPDANTVVSFSPWILSVAASTTDRKYRKSIIIGNGKVFSCGALSAPTPGETMYPLAWADDVVNENSSDGSVNCQDPRMFIRPLVQGKVIICMFDSSNYYEDDPDLASVIDTIERIGAAGVIITDRSSGDIDIDFEPTFPTTVPSAIVLRGSDMRALFRYYNNNTVRDEHGNVVSFGATVRITEGRRASYSGEAPVVADYSSRGPDVENAQMQPAEGENPASGLRGILFGEHDPGDRRPAGDPG

SEQ ID NO: 2591 - DNA, 423 bp, Sorghum bicolor
atgactgctgcttgcactggttcagtaatcgaagctattcttgaaataggggttattcatgggaccagaagtgactctgaaaactttgatgaaactcctagtgcagtcatcgaagaactcagtgaggctgtgtctgcagctgtgaggttactcacgaaattattgaactttgatcttttcatccgcagcataaacagtgaaaaaatcacttctctgctaagaagaatgctcaagtcaagtttcccccttcagtcaaaggattgtcttgcagcatgcctcattaagctagaatccagagctggcttatcaggagatcatggtgtcagtaatatagatatggagataattatctatcagactattccacggctagttgagcaaatgatgacctcacattctcttgaaataagagaagtgctgtaa

SEQ ID NO: 2592 - protein, 140 aa, Sorghum bicolor
MTAACTGSVIEAILEIGVIHGTRSDSENFDETPSAVIEELSEAVSAAVRLLTKLLNFDLFIRSINSEKITSLLRRMLKSSFPLQSKDCLAACLIKLESRAGLSGDHGVSNIDMEIIIYQTIPRLVEQMMTSHSLEIREVL

SEQ ID NO: 2593 - DNA, 429 bp, Sorghum bicolor
atgactgctgcttgcactggttcagtaatcgaagctattcttgaaataggggttattcatgggaccagaagtgactctgaaaactttgatgaaactcctagtgcagtcatcgaagaactcagtgaggctgtgtctgcagctagaagtgctgtaatagagctcaataagataatatctggtggtgtgctggaatatacaagagcattggctgatggtggaggcatatttccactggtcaaaatgcttgaagagggggatggagatgcactcgaagctaccttagctatcttgtataatctgagcatggatccagagaatcacccagcaataattgctgctggagcagtgcccctgttgaagcggattgttcttgcagaaggcccacaatggaatagtgctattcagctgttgagaacattgcctgtatga

SEQ ID NO: 2594 - protein, 142 aa, Sorghum bicolor
MTAACTGSVIEAILEIGVIHGTRSDSENFDETPSAVIEELSEAVSAARSAVIELNKIISGGVLEYTRALADGGGIFPLVKMLEEGDGDALEATLAILYNLSMDPENHPAIIAAGAVPLLKRIVLAEGPQWNSAIQLLRTLPV

SEQ ID NO: 2595 - DNA, 876 bp, Sorghum bicolor
atggcggctagtccgagcacattccgatttgctgccgtagtggccgtgctgtcgaccctgtcacttcttgcaagccctacctccggctacgagaacgccgagcccatggtgatcagggactcgccgcagaacgacaccagcaggaggtacctgtgggcgtcgtcggcgcgaggctacggctggtcctccggcggcgcgacgtggtacggcaacgctaacggcgccggcagcgacggtggtgcttgtggttataaaggtgatgtcagccagcgcccattcaggtcgatgatcgcggccggcggcccttccctcttcaagaacggcaaaggatgcggcgcatgctaccaaattaagtgcacgggcaacagagcctgctccggccggccagtgacggtcaccatcaccgactcctgccccggcggtgcgtgccttgccgagtcggcgcactttgacatgagcggcacggccttcggcgccatggccaaccgcggcatggctgaccgcctccgctccgccggaatcctcaagatccagtacaagagggtgccctgcaagtacaacggcaggaccgtcaacttcaaggtggacgcggggtccaacccgtactacctcgccgtgctgatcgagtacgtggccggagacggcgagatctccgcggtggacatcatgcaagccggctacaactcgtggacgccgatgcagcagtcgtggggcgccgtgtggcgggtcaactcgaacaacggccagccgctccgcgtgcccttctcggtccgcatcacctcgggcgccggcaaggtcctcgtcgccaggaacgccatccccgccggatggagcgccgggaggacctaccgctccgcagtgaactttggctactga

SEQ ID NO: 2596 - protein, 291 aa, Sorghum bicolor
MAASPSTFRFAAVVAVLSTLSLLASPTSGYENAEPMVIRDSPQNDTSRRYLWASSARGYGWSSGGATWYGNANGAGSDGGACGYKGDVSQRPFRSMIAAGGPSLFKNGKGCGACYQIKCTGNRACSGRPVTVTITDSCPGGACLAESAHFDMSGTAFGAMANRGMADRLRSAGILKIQYKRVPCKYNGRTVNFKVDAGSNPYYLAVLIEYVAGDGEISAVDIMQAGYNSWTPMQQSWGAVWRVNSNNGQPLRVPFSVRITSGAGKVLVARNAIPAGWSAGRTYRSAVNFGY

SEQ ID NO: 2597 - DNA, 1584 bp, Sorghum bicolor
atgtgctggtgcgcggccctcgtcgccggaggccggctgccaccgcccgccctcccctgccggctccgccgccgccgaaggagctccgtccgggcagaggtctcgccaggtggcgagtcccagcagaagaaggtcgccgtcgcgggcgccggctgggccggccttgccgccgcgcaccacctcatcaaacaggggtacgatgtcacgcttctcgccgcagagagcggcccaaccgaggaggttggcctcagaggattctggcatccgtaccgcaacatcttcgctttagtcgatgaactggggatttcgcctttcacgggctggaataaagcagcctactattctacagagggccttgctgttgaatttcccatatttcataaccagccccgattaccagctccctttggagtctttgcatatccagaattcccaaatcttcctttgattgataggctgacatcaattcctgtcatagctgcagtcattgactttgacaacactgacactgcttggaggaaatatgatgcaatgactgcaaaagaactttttaagatgtacggttgctctcaaaggctctacaaggaagtctttgagccagctattcaggctgccctgtttgctcctggcgagcaatgtagtgcagctgcaacactggggatgctgtactattatatgctgtctcatcaggaaagttctgacttcttgctgtgccgtggtgaagtagaagaaaaaattctctctccttggctgcaatcattggagcttaaaggtttaaaatttgtagaaaacaaagttccaacaagtttgactacagatgcggatactggatgcatctctgctattgtctgtggtgactatgtatatgaggcagatgcatttgtttcagccatgggactctcttctctacaatccatcgtcaaaaacagtccgttcctacggtctgatcgggaattcaggaatcttcttcacttatctacactcgacgtgatctctgtaaaattatggtttgataaaaaggtcacaattccaaaggttgccaatgtatgttctggttttgatgattcgtctggctgggcattctttgacctaacctcaatacatgatgattataatgaagaatcaataacaattgtggaggctgaattttataatgctagccatttgatacttgtaaatgatgatgatattgtctctgaagcttcatcacatcttatcaaatgcatacaagattttgagggtgctattgtgataagatattcaatcagaagatctcctaattctgtaatcaactttcttccaggctcctacaagtacacactgagaggatcaacttcctttccaaatttgtttattgctggtgattggattgtcaaccgacatgggtccttttctaaagaaaaagcatatgtgactggacttgaagctgctaatagggtggtagactattttgacaccggggactttgccaaaataattgcaatcgaaggagatgagccccatatagagacattgcgtagtctcaacagaagagccaatgaactgaagtcacaaattccattctcagaattctttctccaataa

SEQ ID NO: 2598 - protein, 527 aa, Sorghum bicolor
MCWCAALVAGGRLPPPALPCRLRRRRRSSVRAEVSPGGESQQKKVAVAGAGWAGLAAAHHLIKQGYDVTLLAAESGPTEEVGLRGFWHPYRNIFALVDELGISPFTGWNKAAYYSTEGLAVEFPIFHNQPRLPAPFGVFAYPEFPNLPLIDRLTSIPVIAAVIDFDNTDTAWRKYDAMTAKELFKMYGCSQRLYKEVFEPAIQAALFAPGEQCSAAATLGMLYYYMLSHQESSDFLLCRGEVEEKILSPWLQSLELKGLKFVENKVPTSLTTDADTGCISAIVCGDYVYEADAFVSAMGLSSLQSIVKNSPFLRSDREFRNLLHLSTLDVISVKLWFDKKVTIPKVANVCSGFDDSSGWAFFDLTSIHDDYNEESITIVEAEFYNASHLILVNDDDIVSEASSHLIKCIQDFEGAIVIRYSIRRSPNSVINFLPGSYKYTLRGSTSFPNLFIAGDWIVNRHGSFSKEKAYVTGLEAANRVVDYFDTGDFAKIIAIEGDEPHIETLRSLNRRANELKSQIPFSEFFLQ

SEQ ID NO: 2599 - DNA, 1299 bp, Sorghum bicolor
atggcggcgagggcggctgatgagaacaggaggccggcggcggggggaaagcccgcgccaggcgtccgagagatggggagccggcgcgcgctcacggagatcaagaacctcgtcggggttgccccgtacccctgcgccgtcgccaagaagcccacgctgcagaagagcagaagggacgaaaagaagacaacgttgctgccaagcagccggcccatgacaaggaaattcgccgcctccttggcgagcaaagggcaacctgaatgtcagccgatcctaactgaatgtcagccgatcctaactgatccagaacccggagttgatcaacagaaggaatcaatcggtgatggcaccgttgatatcgacgtggaaatccacgagctggtcgacgatagtgatagtgacatcgacatgggagagacagagaacaaggagatgaaccaagatgaaccgctcatggatattgacagagcagactcggggaacccgcttgcagcaacagaatatgttgaagagctttacaagttctacagagaaaatgaggctaagagttgtgtaaggcctgattacatgtccagtcaacaagatataaactcaaagatgagagcaattctgattgactggctgattgaggttcactacaagtttgacctgatggatgagacgctctttcttacggtaaacataatagatagattcttggataaggaagtggttccaaggaagaagctacaactggttggagtcacagctatgcttcttgcttgcaaatatgaggaggtctcagttccagttgttgaggaccttgtgctcatttctgaccgtgcctacacaaaagggcaaattctagaaatggaaaagttgattctgaacacgctgcaattcaacatgtctgttccaacaccttatgtcttcatgaagaggtttcttaaagctgcagatgcagataaacagcttgagctagtgtcatttttcatgctggagctctgcttggtagaatatcaaatgctgaattatcagccttcacatctggctgctgctgcggtttatactgcacaatgcgctatcaatcgatgcccgcactggacaaaggtttgcgagtcacatagcagatacactagcgaccaactcctggagtgctcgaggatgatggtagactttcaccagaaggctggaaccggcaagctcactggcgtgcacaggaaatacagtacctacaagttcgggtgcgcggccaagaccttgcctgcgcagttcctgctggagtcaggagggacaccgcctccttcaggtgcaatctag

SEQ ID NO: 2600 - protein, 432 aa, Sorghum bicolor
MAARAADENRRPAAGGKPAPGVREMGSRRALTEIKNLVGVAPYPCAVAKKPTLQKSRRDEKKTTLLPSSRPMTRKFAASLASKGQPECQPILTECQPILTDPEPGVDQQKESIGDGTVDIDVEIHELVDDSDSDIDMGETENKEMNQDEPLMDIDRADSGNPLAATEYVEELYKFYRENEAKSCVRPDYMSSQQDINSKMRAILIDWLIEVHYKFDLMDETLFLTVNIIDRFLDKEVVPRKKLQLVGVTAMLLACKYEEVSVPVVEDLVLISDRAYTKGQILEMEKLILNTLQFNMSVPTPYVFMKRFLKAADADKQLELVSFFMLELCLVEYQMLNYQPSHLAAAAVYTAQCAINRCPHWTKVCESHSRYTSDQLLECSRMMVDFHQKAGTGKLTGVHRKYSTYKFGCAAKTLPAQFLLESGGTPPPSGAI

SEQ ID NO: 2601 - DNA, 1026 bp, Sorghum bicolor
atgaagttgcttgaggaaggttttgatctttgtgcacatctgctagctctgcggcggtaccatttcatggaaatagctgactgggcagattcctttattgcttcaatttatcataagaaattgtcatttgttaaatctgagcagaaaagatcagagatccaagggcttatggacttggctttgcagaaatcatcttgtgattctgatccttataaggaaagattgtttatatacatgagggagccacccgttgattcttttgatgcctctgcatgtggtcttgatttgctggatgatatcttgttgggttataaagctgaatggccagtgaatattgtcattacagatgacacacttaaaatatatgctgaaatattctgttatcttcttcaagtcaggtttgcagtgttttcactgactgaagtatggagatttctaaaggagttgacacagttcatcagtcgctccagcaatagcagacctgatgtgttgaagaaattgaattttgtaatgaaagtgaggcataaactttatcactttctatcaacactacagcagtatctccattgccatttatctgatatatcgtggcgccgttttcaacattcccttaaaaatcaggtgagggatatactggacctggagtatgtgcatatgtgttatattactgatgcacttgacatttggttacatagatgtttcttatctgatgagtcaaaacaagttgccacgataatcaaaagcatgctgcaactggctttggagttaagattatgcttccagagtcttggtgatacttgtgatttatcagtaaatcaactaagtaatctgcaataccttataaacttctctcaggtggatgtaattagaacaaagtttgagggcaacatgaaagatttgtatattttgcattcaaaatcttcgaaatatggggagcttggcctttcccgtttctgggggtatctgaactacaatgagtatcattctacgaaaatcagtacagatatgggcagcttctatttttga

SEQ ID NO: 2602 - protein, 341 aa, Sorghum bicolor
MKLLEEGFDLCAHLLALRRYHFMEIADWADSFIASIYHKKLSFVKSEQKRSEIQGLMDLALQKSSCDSDPYKERLFIYMREPPVDSFDASACGLDLLDDILLGYKAEWPVNIVITDDTLKIYAEIFCYLLQVRFAVFSLTEVWRFLKELTQFISRSSNSRPDVLKKLNFVMKVRHKLYHFLSTLQQYLHCHLSDISWRRFQHSLKNQVRDILDLEYVHMCYITDALDIWLHRCFLSDESKQVATIIKSMLQLALELRLCFQSLGDTCDLSVNQLSNLQYLINFSQVDVIRTKFEGNMKDLYILHSKSSKYGELGLSRFWGYLNYNEYHSTKISTDMGSFYF

SEQ ID NO: 2603 - DNA, 1872 bp, Sorghum bicolor
atggaggggtgccaactgctagtaggctgtaggattgagatggaggaggaagcgttctttgactcgcgagaggagctcacggcgtcgccggcgcccagcccgggccctgcattgccgtggtcgggaagcctcgacagtgtgtgccagaggagggagcggttcatgagaagcatgggcctagagtgctgcccggctcccccgcaggccgatgccgtggccaccgtgggcgatgtcgagaaggaggaggttgtgccggaatttgggaggttgtggtcgcagtcggatgagaatgactgctccatgtcgagttggtccacggaggagacggggagctccgtggatggtgtctcggatgacaattctgtcagtggatccagccgggatgatgctagcagcaaggtgagcaggagtttcagttcgttgtccttcatccagaggctcatgagccgcagtggtaagctctctggtgtgcccaaggcgattgagaggagaagaaacggatggcttcggaggctgggcttgagggctggtatcctcgatcatggagctgatgaagctagcaccagctcctcagagagtgagcaaaacaggggtggaaggtacgaaagggtcaaggtccgctgctacaggaagtggtcgaaagaattgtcagcagtttatcaaggccaagtgatcaagggccatgatggggccatcctgactatgaagtttagtccggatgggcagtttcttgcaagtggaggcgaagatggagttgttagggtctgggctgtcacacagtctgaggactgcaaaattcccgtggatgatccttcttgtgtttacctcaaagctcatcgccagagtggcttggctcctgttgttgctgacaatgagaagaaatgcaaagtcaagggcgtgaagcaatctgcagattctgcttgtgttgtgattccaacaatggtgttccagatctcagaggaaccattgcatgagttctgtggccactctggtgatgtactgtgtctgtcgtggtctgacaacaagggagcagtggttggaaccattactggaaattgtcggttttatgatgcatcagataatctgctgaggcttgagacacaaattgcactcagtggcaagaagaagtcttctcttaaaagaatcactgcttttgagttgcatccagattccgtctactacgtcctccgtgacctcatcgccgcggccttccccgttccccagcgcgtgcctgccaagcaagtggccacggccggcacgtcggcaccacccgccagccacattgccgcctgcacctgcagcacggcgaatggcaaatccgaggtgtgccatgccgtgccactgccgcacgaagattgccggcccccgtgcacgacagctaatccgatcgggtcgggcggcagcggcatccagttgcgctgcgcgtgcgtgcactcgtggcccgtcgtgtacaatgagcgctcatgggccagaggggagcctgccctcgcgttggacgccgtgcgatccgctgcgggaggaccggagaggagcgcgcgacaccagacaccacacgcacaccgtggcattggcttcgaaagcggcgaccgcggcctcctagattcagtgcacggctccagctccggcatgcatggcgccaccgtgccgcgcgttccgactgcccgcccccggcgaggggagacaggggtggcgcggccggccagatccagcggggcgggggcgggggcgggggcgggccagatccagtcgtggccgtggaacgttggatctgccatttcgggaggagtacgtggtgatggtggtggtggcggccaggcaccactggccggcggtcccgtcaccggcgaggggtccggtccggctaccgagtaa

SEQ ID NO: 2604 - protein, 623 aa, Sorghum bicolor
MEGCQLLVGCRIEMEEEAFFDSREELTASPAPSPGPALPWSGSLDSVCQRRERFMRSMGLECCPAPPQADAVATVGDVEKEEVVPEFGRLWSQSDENDCSMSSWSTEETGSSVDGVSDDNSVSGSSRDDASSKVSRSFSSLSFIQRLMSRSGKLSGVPKAIERRRNGWLRRLGLRAGILDHGADEASTSSSESEQNRGGRYERVKVRCYRKWSKELSAVYQGQVIKGHDGAILTMKFSPDGQFLASGGEDGVVRVWAVTQSEDCKIPVDDPSCVYLKAHRQSGLAPVVADNEKKCKVKGVKQSADSACVVIPTMVFQISEEPLHEFCGHSGDVLCLSWSDNKGAVVGTITGNCRFYDASDNLLRLETQIALSGKKKSSLKRITAFELHPDSVYYVLRDLIAAAFPVPQRVPAKQVATAGTSAPPASHIAACTCSTANGKSEVCHAVPLPHEDCRPPCTTANPIGSGGSGIQLRCACVHSWPVVYNERSWARGEPALALDAVRSAAGGPERSARHQTPHAHRGIGFESGDRGLLDSVHGSSSGMHGATVPRVPTARPRRGETGVARPARSSGAGAGAGAGQIQSWPWNVGSAISGGVRGDGGGGGQAPLAGGPVTGEGSGPATE

SEQ ID NO: 2605 - DNA, 2091 bp, Sorghum bicolor
atggttaatttcggaaagaaattgatggctgatcaagtggaagaatggaaaggatactacatcaattacaagctgatgaagaaaatgttaaagcaatatgtccaacagacccagcatggtgggaaagatcgtgaacaagttcttaaagatttttcaaggattcttgatgaccagattgaaaggatcgtgctttttctgctacaacaacaaggccatcttgccagtaggattgaggagttgggagaaaaacgcattgttcttctagaagagtatgacatatcacaagtttatcagctacatgatgcatacagagaagtcgggcttgatctcataaagcttctccgctttgttgatgtgaatgctactggtatacgcaagatactaaagaaatttgataaacgctttggctacaagttcactgattattatgtcaccactcgtgcaaatcatccttattctcagcttcagcaagtctttaagcaagtgggaattgtagctgttgtaggtgcattatcgcgcaaccttgaatatctgcaacatcatgaaggaagttttgtatccatctatgatcgtccagcagttaccttaaaggaccctattatcgaccaagtaaacaatgcagtacagaagctcacgcatgccacaaattttatgcaattcttgggacaacactcacttattgtccaggaagatgcgcaaagcgggtcggaggatcttgttgatgatcagagctaccatttcatgtccctgatgcttaatctagttaacacattcctttacatggtgaatacatatatcattgtgccgactgcagatgactatgctgtaagccttggggctgctgcaactgtctgtggtgtaattattggatcaatggcagtcgctcaagtgttctcctcagtctacttcagtgcctggtcaaataagtcctacttcaaacctcttgtattcagtagcattatgctgtttcttggaaacctattatatgcattggcatatgatctgaattcactaatagttctcctgattggacgactgctatgtgggctaggctctgcaagagcagtgaaccgtcgctatatcagtgactgtgtgcctctcaagatgaggctacaagcctccgccgggttcgttagtgctagtgctcttggcatggcatgtggccctgctcttgctggttttctccagattaaattcaagatatattcgctgacttttaatcagagcacgttgcctggatgggtcatgtgcattgcttggtttatttacttgttgtggctgtggcttacattcaaggagccagaacacttcactaaaaccctggtcagcgaacaaccatcagaatctggttgccaaggaaattctaacttggaggaaggtctagctcaacccttgcttgtaggtatagaacaaaggcaggaggagaactcagaagataatgatgatactgaattagcctcagaaagctctcatgagccagcaacatcaattgcttcagcatacagattgctaactccatctgtgaaggcccagctattgatatacttcatgctcaagtacgcaatggaaatactactctcggaatcgagcgttgtcaccacatactattttagctggactactagtgttgtggctatcttcctagcgattcttggattaacggttcttccagtaaatgccattgttggaagctacattacaaatttgtttgaggataggcaaattttgttggcatctgaagtcatggttctcatcggtataatcatgagctttcgtttcacacctcattactccattcctcaatatgtcatttcagctctcatcacatttgtatttgctgaggtgcttgaaggagtgaatctgtccttgctctcacgagtaatgtcatcgaggctttcccgagggacctacaatggtggactcctttcgacagaggctgggacgttggcccgtgtagttgcagatgccacgattactgcagctggttatcttggcacggacctccttctcaatatcactcttgtcccatctcttgtgatctgcatagtctccatcgcagccacactctacacttacaacaatctctattga

SEQ ID NO: 2606 - protein, 696 aa, Sorghum bicolor
MVNFGKKLMADQVEEWKGYYINYKLMKKMLKQYVQQTQHGGKDREQVLKDFSRILDDQIERIVLFLLQQQGHLASRIEELGEKRIVLLEEYDISQVYQLHDAYREVGLDLIKLLRFVDVNATGIRKILKKFDKRFGYKFTDYYVTTRANHPYSQLQQVFKQVGIVAVVGALSRNLEYLQHHEGSFVSIYDRPAVTLKDPIIDQVNNAVQKLTHATNFMQFLGQHSLIVQEDAQSGSEDLVDDQSYHFMSLMLNLVNTFLYMVNTYIIVPTADDYAVSLGAAATVCGVIIGSMAVAQVFSSVYFSAWSNKSYFKPLVFSSIMLFLGNLLYALAYDLNSLIVLLIGRLLCGLGSARAVNRRYISDCVPLKMRLQASAGFVSASALGMACGPALAGFLQIKFKIYSLTFNQSTLPGWVMCIAWFIYLLWLWLTFKEPEHFTKTLVSEQPSESGCQGNSNLEEGLAQPLLVGIEQRQEENSEDNDDTELASESSHEPATSIASAYRLLTPSVKAQLLIYFMLKYAMEILLSESSVVTTYYFSWTTSVVAIFLAILGLTVLPVNAIVGSYITNLFEDRQILLASEVMVLIGIIMSFRFTPHYSIPQYVISALITFVFAEVLEGVNLSLLSRVMSSRLSRGTYNGGLLSTEAGTLARVVADATITAAGYLGTDLLLNITLVPSLVICIVSIAATLYTYNNLY

SEQ ID NO: 2607 - DNA, 459 bp, Sorghum bicolor
atgtccctgatgaccacctcttccgccttctcggccactctccttccgttcccgccgccgcctcgcctctccgttgcccgcctgcgactccacccccgccgtcgcgctctggtccgctgcgccgcggtgtccgagattgccccggccgcctcagccgcctacggcgtcctcctcctgggcggcggcgccttcgcatatgcgaggtcggggagtaaaggctccatctacggaggactggctggagctgcgctcatgggcgctgcctattatctgatgcagtcgcctgagacgatggcagcaggtgatgctgttggatttggatctgcctttttatttgcctgcgtgtttggtatcaggttgtacaatagccggaaactggtgccatctggccttcttctagccctttctcttggtgccttgggtgtcttttactctgcttacttgcaagacaaggtgtaa

SEQ ID NO: 2608 - protein, 152 aa, Sorghum bicolor
MSLMTTSSAFSATLLPFPPPPRLSVARLRLHPRRRALVRCAAVSEIAPAASAAYGVLLLGGGAFAYARSGSKGSIYGGLAGAALMGAAYYLMQSPETMAAGDAVGFGSAFLFACVFGIRLYNSRKLVPSGLLLALSLGALGVFYSAYLQDKV

SEQ ID NO: 2609 - DNA, 480 bp, Sorghum bicolor
atggcttccggaggcgtcgcccgcgcccgcctcgccgaggagcgcaagtcctggcgcaggagccacccccacggcttcgtggccaagccggcgacactgccggacggctccgtcaacctgatgctctggaactgcattgtccccggcaagaaagacactgattgggagggtgggcatttcccattgactctgcattttactgaagactacccaagtagacctcccgactgcaagtttccggcaggtttcttccatgtcaatgtctacaacactggttcagtatgcttgtcgatccttgctgacgcctggaagccttctatcacagtgcggcaaattctaatcggcattcaggaccttcttgataatccaaatccagcctccccagcgcagaatttatgctacgtgctctttacacagaatacgccggagtataagaatcgtgttcgtcaacaagctaaacgttaccctccacttgtgtaa

SEQ ID NO: 2610 - protein, 159 aa, Sorghum bicolor
MASGGVARARLAEERKSWRRSHPHGFVAKPATLPDGSVNLMLWNCIVPGKKDTDWEGGHFPLTLHFTEDYPSRPPDCKFPAGFFHVNVYNTGSVCLSILADAWKPSITVRQILIGIQDLLDNPNPASPAQNLCYVLFTQNTPEYKNRVRQQAKRYPPLV

SEQ ID NO: 2611 - DNA, 1266 bp, Sorghum bicolor
atggacgacggcgccggcgaagccggcggcgaaagccaggtacgccgaatccgtggggtctccctttcttctgcccccgacccttatcgcggtacagagccgccggacatcaagaattggttctcgagctatgtgtatgactcaccggaggtcccggagctggttgctgatcacaacggcggcaacggcagcgagacccaagacccattcgaggatggtggagttgctttgagagaaaattgtctaggaggcgaatctgagcctgagattttttctggaaaatatttggttccggttgatgggaatgtgatgaagcccgcccccaaaaggaagcaaagcctgcgggcattatttggagcgagttttctttatgaggctgaggaagctactgaaactgaaagtcatggtttgttccctgtgcagctaaatgcactgaagcatgtgtcagatcgtacaagccttcctcttgatgaaatatgcgaggcacattcagaaaaaaaggattgcgcaataagcttgcctgatagtactagacatagccaggaaggcacaactgagcacaacaaggtgctggtcgattgtgatcgtattagttcagctgacactcaagaaagcacccctgcagatgaagttgagagtaaaaagtcttctaactgttatgatgcatgtttggctgatattggagacggctttgcagaagatgacatccatcatattgaactgcccgtcagtttcaacagtaccattctagctggaactgacaaaaagatccaagatggtgttgacaacagcacaagtcttgttagtcgcaacagcctcagtttagctgacactgaagataattctccactaggggaaaatgatagtgaagagaattctccctcagggctagggcgaactgacaactggaagccttcgttagacagtataaagccacaagaaatagttgcatcagatggttttatagctgtaaagaggaagaagctaccagatgaacacaaaacaaacaaaattccgaggcacccaatggggagagagaaggaaaagggaaacttacaagagagcggtggcatttcagaccaaaaggtttttgtccaagagcaaaccagacgtcccttggcagataggactaatttttcagaagtaaacacagctccggcaccagagccgagcaggaaatggaagtgtcctcgcaaaggaaagccctatgttggtcgtccaatgaagcagctccggttggagcaatgggtgcgccgtattaattga

SEQ ID NO: 2612 - protein, 421 aa, Sorghum bicolor
MDDGAGEAGGESQVRRIRGVSLSSAPDPYRGTEPPDIKNWFSSYVYDSPEVPELVADHNGGNGSETQDPFEDGGVALRENCLGGESEPEIFSGKYLVPVDGNVMKPAPKRKQSLRALFGASFLYEAEEATETESHGLFPVQLNALKHVSDRTSLPLDEICEAHSEKKDCAISLPDSTRHSQEGTTEHNKVLVDCDRISSADTQESTPADEVESKKSSNCYDACLADIGDGFAEDDIHHIELPVSFNSTILAGTDKKIQDGVDNSTSLVSRNSLSLADTEDNSPLGENDSEENSPSGLGRTDNWKPSLDSIKPQEIVASDGFIAVKRKKLPDEHKTNKIPRHPMGREKEKGNLQESGGISDQKVFVQEQTRRPLADRTNFSEVNTAPAPEPSRKWKCPRKGKPYVGRPMKQLRLEQWVRRIN

SEQ ID NO: 2613 - DNA, 756 bp, Sorghum bicolor
atggcaatcgacgatgaatcgccgctcagagtcaacaccagaggcggcgccatgggaggaggcgggtgcgacggggcggagaaccagcggtggccgccgtggctcaagccgctgctggggacgagcttcttcggtcaatgcaaggtgcacgcggacgcgcacaagagcgagtgcaacatgtactgcctcgactgcatgaacggcgcgctctgctcccagtgcctcgcctaccaccgcgaccaccacgccatccagatacggaggtcctcctaccatgacgtgatccgggtgtctgagattcagaaggtgctggacatcaccggcgtgcagacgtacatcatcaacagcgcgcgcgtggtgttcctgaacgagcgcccgcagccgaggcccggcaagggcgtcaccaacacctgcgaggtatgcgagcgcagcctcctcgacaccttccgcttctgctccctcggctgcaagatcgtcgggacctccggcgacttccgcatccggaagaagcacgtcgtcgttacgaagaagaagaagcaggcccagcaccagcaccagcacaggggcgcggcggcggcgtcggagtcggaggacgactcgtccaccagcaccagcggcggcagcgacaagagcagcgtggtgcagagcttcaccccgtcgaccccgccggcgactgccaacagcttccgcaccgggaagcggcgcaagggcgtgccgcaccggtcgccgttcggcaacctcatggtggagttctag

SEQ ID NO: 2614 - protein, 251 aa, Sorghum bicolor
MAIDDESPLRVNTRGGAMGGGGCDGAENQRWPPWLKPLLGTSFFGQCKVHADAHKSECNMYCLDCMNGALCSQCLAYHRDHHAIQIRRSSYHDVIRVSEIQKVLDITGVQTYIINSARVVFLNERPQPRPGKGVTNTCEVCERSLLDTFRFCSLGCKIVGTSGDFRIRKKHVVVTKKKKQAQHQHQHRGAAAASESEDDSSTSTSGGSDKSSVVQSFTPSTPPATANSFRTGKRRKGVPHRSPFGNLMVEF

SEQ ID NO: 2615 - DNA, 372 bp, Sorghum bicolor
atggcagcagcagctagttccaaggggcgggcgatcgctggaagcttcgtcagccgcgtcctggccggcaaggccgcttccccgaggagggccgtgcacgcctcggcgtacgacaagaacctggaggaccaggtgcggccggcgttcgtgccggacgatgtgatcggcggcggcgccgggaaccccgacaagtactggagcccgcacccgacgaccggcgtgttcggcccggcggcggtggaccccaagctggccgctgctgctggcgcgccggacgctgccgccgcgaatgctgcgggaggcacggtgctggaccagaaggtgtggttccgcccgctcgaggacgtcgagaagcccccacccgtcgcctga

SEQ ID NO: 2616 - protein, 123 aa, Sorghum bicolor
MAAAASSKGRAIAGSFVSRVLAGKAASPRRAVHASAYDKNLEDQVRPAFVPDDVIGGGAGNPDKYWSPHPTTGVFGPAAVDPKLAAAAGAPDAAAANAAGGTVLDQKVWFRPLEDVEKPPPVA

SEQ ID NO: 2617 - DNA, 711 bp, Sorghum bicolor
ggctgtggcggggcggcgtcacgggaccccaagccgcggctgcggtggacgccggacctccaccagcgcttcgtcgaagccgtcaccaggctcggcggcccggacaaagcaacacccaagtcagtgctcagattgatgggcatcaaaggcctcactctttaccatctaaaaagccacctccagaagtatagactgggaatacagggcaagaaaagcacaggcttggaacttgccactggcgcacttagcaatgcactaaggtatcaaattcaagtccaaaggaaactacaagaacaaattgaggtgcaaaagaagctgcagatgcgaattgaggcccaagggaagtacttaaagacaatactagagaaagctcagacaaatatttcctttgacacagatgcatccaatggcatagaatcaaccagatcacagctcatgggcctcaaccaagctctatcaggtttcatggacaatgcaactcaagtatgcaaagaaaataggaagcaattggtgaaagctttgtcagatgacaacgataaagataatctaggctttcagctgtaccatgtaggaagtcaggaggctaaggaagtcaaatgcacaccaaaaactgaagactcgctcctactagacttaaatattgaaggaggatatgacctctcttctagaggaatgcaagcatgtgaactagaattgaaaatcaaccagcag

SEQ ID NO: 2618 - protein, 237 aa, Sorghum bicolor
GCGGAASRDPKPRLRWTPDLHQRFVEAVTRLGGPDKATPKSVLRLMGIKGLTLYHLKSHLQKYRLGIQGKKSTGLELATGALSNALRYQIQVQRKLQEQIEVQKKLQMRIEAQGKYLKTILEKAQTNISFDTDASNGIESTRSQLMGLNQALSGFMDNATQVCKENRKQLVKALSDDNDKDNLGFQLYHVGSQEAKEVKCTPKTEDSLLLDLNIEGGYDLSSRGMQACELELKINQQ

SEQ ID NO: 2619 - DNA, 516 bp, Sorghum bicolor
atgtcgtcgtcctcgtccaagtctaacttcttcggtcgcgcgtgggacagagcacgcggcaagtctgatgtcgaaagaatttgcaagaaagtcttcgaggacctggcggacaagaacacggggctcctggacatcaactccctccacgtcgccaccctcatggtttacaattcaatcaacaagcagttagccggccctcacaaggaccctccttgcctgaacaccatcgccgagaaaatgaagttgtaccacgacaagaaaacgatactgttcaccgagttccaggagctgatcctcgagtgggtgcacaaggacctgcggctggtgctcgcgaacaaggccgccgtcgcgatcctgggcgcgccgctgctcgccgtgacggccaagaacgccgccaggcaggtgccgaggataagcgacgccgtggagcaggtgcccacgccgctgctcgccaccgtcttctccgtcgggctcatgctcctgcaggacgtccggctgggcaagcagagggagtga

SEQ ID NO: 2620 - protein, 171 aa, Sorghum bicolor
MSSSSSKSNFFGRAWDRARGKSDVERICKKVFEDLADKNTGLLDINSLHVATLMVYNSINKQLAGPHKDPPCLNTIAEKMKLYHDKKTILFTEFQELILEWVHKDLRLVLANKAAVAILGAPLLAVTAKNAARQVPRISDAVEQVPTPLLATVFSVGLMLLQDVRLGKQRE

SEQ ID NO: 2621 - DNA, 2457 bp, Sorghum bicolor
atgaggcgatatgcggaagctgcaagctgccatgctactgcgagagggagaggagtcaccgcaacgcgccagcgccaccgtctgatgtctcctgctccccgctgctccgtctcgctccctccgcctcctactaatgcctccactaccagcaccagcggcggcgggggcgggatgaaggcgcagcggcacccgacggcgtcgcaggtgaggcggctgtgcaaacagggccgcctggacggcgcgcggcggctgctcctcgacgcgctcccgcgcccgccgccgccgccgctctacaacgcgctcctcatcgcctacgtggcccgctccctcccggaacacgcgctgcggctctacgcgctcctcaaccacgccgcgcgccccgcgccacgctccgaccactacacctactcctgcgcgctcaccgcctgtgcccgcacccgccgcctccgcctagggaaatcagtccacgcgcatctcctccgccgcgcgcgctcgctgcccgacaccgcggtgctccgcaactcgctcctcaacctctacgcctcctgcatgcggtaccgaggcgacggcggcgtcgacgtcgtccgcaggctgttcgacgtgatgcccaagcggaacgcggtttcctggaacacactgttcggttggtacgtcaagaccggacgtccccaggaagctctggagctgttcgcgcgtatgctggaggatggcatcaagcccacgccggtcagcttcgtcaatgtcttccccgcagtggccaaggaagatcccagctggtcctttgtgctctacggcctacttgtgaagcatgggagggaatatgtcaatgatctcttcgttgtcagctcggccatcgcgatgttctctgaacttggggatttgcagtcagcttggagggtgtttgagtacactgccaagaagaacaccgaggtttggaacacgatgatcactgggtacgtgcagaatgggaaatttgctgaagctatggatctcgttatccggttaatgggatctaaagaggttccattggatgtcgtgaccttcttgtcagcactcacggcagcatcacagtcccaggatggcaggttgggtcagcagctgcatggctacttgatcaaaggaactcacgccactttgccagtgatacttggtaatgcactggttgtaatgtactcgagatgtggcaatgtccaaactgcctttaagctctttgaccgcttaccagagaaggacattgtttcttggaacaccatggtcactgcttttgtgcagaacgattttgatttggaaggcctgctgctcgtttatcagatgcaaaaatcatgttttgcagctgattcagtgacattgactgcagttctctctgccgcgtccaatacaggagaccttcagattggtaaacaagcccacggttatctcgtaaggcgtggcattgaggatgagggcttggagagctatctgattgacatgtatgccaagtccggtcgcatagaaatagctcagagagtatttgacgactatggtaatgtcaaaagagatgaagtcacctggaatgccatgatagcagggtacacacagagtgggcagcctgaacaagcaatcttgacattccgggcaatgcttcaggcaagtcttgaacctacttcagtgacacttgcctcggtgctccctgcatgtgatcctctaggaggaggtttatgtgcggggaagcagatccattgttttgctttgcgccgttgtttggacaccaatgtctttgtaggtacagctcttgttgacatgtactccaagtgtggcgagatttctactgcagaacatgtctttgctgttatgattgaaaagagcaccgtctcctatacaacaatgatttctggtcttggacagcatggttttggcgaaagagcattgtcacttttctactacatgcaagagaaggggctaaaacctgatggtgtgaccttcttggcagcaatttcagcatgtaattactctgggctggtcgatgaagggcttgctttgtacaggtcaatggaaacttttggggttgcagttactcctcagcaccgttgctgcattgtggacatgttagctaaagccggcagagtggaggaagcttatgaatttgtgcaggagctgggggaggagggtaacttcatttctatctggggatcactgctcgtgtcctgcaaagcacaggacaagcaggaattggtgaatttagcgacagagagattgctctgcattgagaagaagtatggccatgctggttacaacgttttgttgtcacatatttttgctgctgagggcaactggagtagtgctgatagcctgaggaaggagatgaggttgagagggttgcggaagatggcaggttctagttggattaaagtccaggatgcagcattacaaagctcccctaaaaatgaccatgaatactcattgctgcatgggggttga

SEQ ID NO: 2622 - protein, 818 aa, Sorghum bicolor
MRRYAEAASCHATARGRGVTATRQRHRLMSPAPRCSVSLPPPPTNASTTSTSGGGGGMKAQRHPTASQVRRLCKQGRLDGARRLLLDALPRPPPPPLYNALLIAYVARSLPEHALRLYALLNHAARPAPRSDHYTYSCALTACARTRRLRLGKSVHAHLLRRARSLPDTAVLRNSLLNLYASCMRYRGDGGVDVVRRLFDVMPKRNAVSWNTLFGWYVKTGRPQEALELFARMLEDGIKPTPVSFVNVFPAVAKEDPSWSFVLYGLLVKHGREYVNDLFVVSSAIAMFSELGDLQSAWRVFEYTAKKNTEVWNTMITGYVQNGKFAEAMDLVIRLMGSKEVPLDVVTFLSALTAASQSQDGRLGQQLHGYLIKGTHATLPVILGNALVVMYSRCGNVQTAFKLFDRLPEKDIVSWNTMVTAFVQNDFDLEGLLLVYQMQKSCFAADSVTLTAVLSAASNTGDLQIGKQAHGYLVRRGIEDEGLESYLIDMYAKSGRIEIAQRVFDDYGNVKRDEVTWNAMIAGYTQSGQPEQAILTFRAMLQASLEPTSVTLASVLPACDPLGGGLCAGKQIHCFALRRCLDTNVFVGTALVDMYSKCGEISTAEHVFAVMIEKSTVSYTTMISGLGQHGFGERALSLFYYMQEKGLKPDGVTFLAAISACNYSGLVDEGLALYRSMETFGVAVTPQHRCCIVDMLAKAGRVEEAYEFVQELGEEGNFISIWGSLLVSCKAQDKQELVNLATERLLCIEKKYGHAGYNVLLSHIFAAEGNWSSADSLRKEMRLRGLRKMAGSSWIKVQDAALQSSPKNDHEYSLLHGG

SEQ ID NO: 2623 - DNA, 3495 bp, Sorghum bicolor
atggcggcgaaggtgcggttcagcctcctggtggcgatgttccaggccatgtcgggcgacaagagttcggcgaagaagcgcagccgcctgcgcgcgttcctcgaccgcgcctacgtgcccagcggcggtagggatgactatttcagcgcgctccgcctcgtgctcccggggctcgaccgcgagcgcggcacctacgggctcaaggaggccaccctcgctgccgtgcttgtcgacgcccttggcatcgccaaggactctgccgacgccgtccggctcaccaactggcgccgcggcgggggtttccgcaacgccggcaacttcgggcttgtggccgctgaggtcctgcaacggaggcagggtttaacttctggtggattgacgataaaggaggttaacgatgcacttgatcgtctagctgcaactgagaacaggtccgagaaggcctcaatactttctaatctgatcaagaaaaccaatgccgctgaaatgaagtggcttctgatgattattcttaaagatttgaaattggggataagtgagaagagcatatttgaagaatttcatcctgatgcccaagatttgttcaatgtcacctgtgacttgaaatttgtctgcgagaagctcaatgatcgaagccagaggcataaacgtcaggatatagaaattgggaaggctgttaggcctcagctagctatgagagtccgtgatgcttcagctgcttggaagaagcttcatggaaaacaagtggttgctgagtgcaaattcgatggtgaccgtattcaaatccacaaaaacggggaagagatccatttcttctctagatgtatattggatggagaaatgcttgtctgggacactgtacttaaccgttttgctgaatttggttcaaaccaggaaatagctaaggctgcaagggagggattggagactgatcgacagcgatgcatagatgttgcttttgacatcctttatgctggagacaccagtgttatccaccaaagtttgacggagcggcatcaaattctgcagaaggttgtgaaaccattaaagggtcatcttgagattttaatcccaacaggtggtttaaatgttcgtcgcccttcagatgaaccatgctggtcgattattgcacacaatgttgaagatgttgaaagattcttcaaagagactattgagaacagagatgagggcattatactgaaggaccttgattccaaatgggaacctggtgaccgaaatggaaagtggcttaaactaaagcctgattatatacatgcgggtgccgatctggatgttattattatagggggatactatggatctggacgtcgaggacgagaggttgcacagtttttagttggccttgcagtcccttcagatgataatagttatcccaaaaggtttctttcattttgccgtgtcggtactggcctctctgatgaagagcgtgatgctcttgtcaccaaactgaagccttatttcaggaaaaacgagtacccgaaaaaaccaccaaaattttatgaagttacaaataactcaaaggagaggccagatgtttggatcgagagccctgataagtcagtcataatatctgtaacaagtgacattcgtacaatcaagtccgaggtatttgcttctccatactgtttgaggttcccccgtattcagagagtgagatatgacaagccatggcatgagtgccttgatgtgcaggcatttgtggacattgtgcattcaagtaatggtacaacacaaagggtggcagatgataacagcctgaagaatgatgacacgaatcgctcaagaacaaacaaaaaagtggagaagaagaagtgtgtctcagtcatcccttcacatctcatgaagactgatgtatcagttgtggaaaatgggggatctttctccatgaatctgaatgactctgttacgcactgcatagctgcggagaagaaaggtatcaaatatcaggcagctttacggcagggaaggatcattcactatgagtggatattagattgttgtaaggaaaaacatcttcttcgtttgcaacctaggtatatactatttcttgctgattttgccaggcacaaatttcctgaagagattgattcatatgctgactattactactgggacattgaaattgctgacctcaagcagattttcagcaacatcgacaaagttgctggtgattcaaacatggttaatcagtacaaaaagaagcattgcatagatgagagattctgtttcttccagggttgctgtgtctacttgcataatgcacccttagtgaatgcggactacaatgtaatatctgatcttgcgctgaagagggtgaagcaggatctaacaatgcatggtggtcaagtctgcagcagcattgctccagctactcatttggttgtagtttcggttttacaggcctataactttgataacctgtacaagagcttccctcctgctgaaagacgttatctgcatgacaaacgattacatgttgtcagtaataagtggttggaagattcagttgagaaacaaatgaagctctctgaaactgcttacagccttaaaccagatacactagaagaactagaaattgaaaggagtgaggaaaatgttcagcctccggatcataagcttgaggaacacagggaagttgaaagatctcatgcgaaaaatgtaccaaggaaaaggaccaggccaaccagttcaagaactgcaagggctgctcctagaccagtccggcgaatgaggcctagaagaggaaaccagaaagcaaaaataggtgatgatgttgaatctgaagaaagtggccccagcgaatgtcaagatgatcaaaatttggacacagatgatacctctaagattgaagaaggtattaccagcaaaaagaaaggactccctccacctgcttctaaaccagcccggagaacaagggctgccagaggaaatcagcatacaaagatagacgatggcggatctgaagaaagcgggccttgtgaaacagggcaagatgatcagaagttggacacagattacatctctaatatggaagttgataacagtgataaagactgtggaccaccgcctggtgctcagcttttcacattgggggagcaagaggccaaaggtgtcaaattgaacaccgtggaagagaaaccagacagtcctttccaaagaacaactgctgctgaagcgatgagtagtgcgcctggtgacaagatagaacaaatggctgatccattgcacgccatgcttctggatatgttgccactcctgggcaagaaagggacagaagatgcaagtagggcacccttgccgaaagctgagaaggatccacctgcaggaggaagttccacatccaattctgagattctggcgccagatgctggtacatccggggttccagccccagacccgaatgcagctcctcccccgaagaagaaaaaagtgagttacaaagatgtcgctagtgaacttctgaaagattggtga

SEQ ID NO: 2624 - protein, 1164 aa, Sorghum bicolor
MAAKVRFSLLVAMFQAMSGDKSSAKKRSRLRAFLDRAYVPSGGRDDYFSALRLVLPGLDRERGTYGLKEATLAAVLVDALGIAKDSADAVRLTNWRRGGGFRNAGNFGLVAAEVLQRRQGLTSGGLTIKEVNDALDRLAATENRSEKASILSNLIKKTNAAEMKWLLMIILKDLKLGISEKSIFEEFHPDAQDLFNVTCDLKFVCEKLNDRSQRHKRQDIEIGKAVRPQLAMRVRDASAAWKKLHGKQVVAECKFDGDRIQIHKNGEEIHFFSRCILDGEMLVWDTVLNRFAEFGSNQEIAKAAREGLETDRQRCIDVAFDILYAGDTSVIHQSLTERHQILQKVVKPLKGHLEILIPTGGLNVRRPSDEPCWSIIAHNVEDVERFFKETIENRDEGIILKDLDSKWEPGDRNGKWLKLKPDYIHAGADLDVIIIGGYYGSGRRGREVAQFLVGLAVPSDDNSYPKRFLSFCRVGTGLSDEERDALVTKLKPYFRKNEYPKKPPKFYEVTNNSKERPDVWIESPDKSVIISVTSDIRTIKSEVFASPYCLRFPRIQRVRYDKPWHECLDVQAFVDIVHSSNGTTQRVADDNSLKNDDTNRSRTNKKVEKKKCVSVIPSHLMKTDVSVVENGGSFSMNLNDSVTHCIAAEKKGIKYQAALRQGRIIHYEWILDCCKEKHLLRLQPRYILFLADFARHKFPEEIDSYADYYYWDIEIADLKQIFSNIDKVAGDSNMVNQYKKKHCIDERFCFFQGCCVYLHNAPLVNADYNVISDLALKRVKQDLTMHGGQVCSSIAPATHLVVVSVLQAYNFDNLYKSFPPAERRYLHDKRLHVVSNKWLEDSVEKQMKLSETAYSLKPDTLEELEIERSEENVQPPDHKLEEHREVERSHAKNVPRKRTRPTSSRTARAAPRPVRRMRPRRGNQKAKIGDDVESEESGPSECQDDQNLDTDDTSKIEEGITSKKKGLPPPASKPARRTRAARGNQHTKIDDGGSEESGPCETGQDDQKLDTDYISNMEVDNSDKDCGPPPGAQLFTLGEQEAKGVKLNTVEEKPDSPFQRTTAAEAMSSAPGDKIEQMADPLHAMLLDMLPLLGKKGTEDASRAPLPKAEKDPPAGGSSTSNSEILAPDAGTSGVPAPDPNAAPPPKKKKVSYKDVASELLKDW

SEQ ID NO: 2625 - DNA, 966 bp, Sorghum bicolor
atggtcggccggatggagcggcagaccgcgtcgtcgtcagcgtcatgctccccctccgccgccgccgccgcctcctcttcctcctcctcggtctgcggcggcaagaagcgccctgatatcctcaacatgatccggaatgcagcctgtcttaattcatcatctactgataccggcaagggaaggagtaaattgtcaaccaacaaagttgcacatggattccacctggtggaaggcaagtccggccatgacatggaagactaccatgtggcagagtacaagtatgtgaagaaccatgagcttggtctctttgccatttttgatggccatttaggagataaggtgccatgttacctgaaagctaacctttttagcaacataatgaaagagcctctcttctggtctagtcctcaagaagcaataaagaatgcatactgctctacaaacaaatttattctagaaaatgccaaacaacttggaccaggtggttcaacagcagttactgctattgtagttgatggtaaggacatgtggatagcaaatgtaggtgactctcgagctgttgtgtgtgaaaaaggcgctgctaatcagctcactgttgaccacgagcctcatacaactaatgaaagacagaggattgaaaagcacggtggttttgtaacgacatttcctggcgatgttcctcgggtgaatggccagcttgctgttgctagggcatttggtgaccaaagcctcaaggcccacttgagctctgaacctgacattagacatgtaccaataagctcaaatatagagttcgtcatccttgccagtgatggattgtggaaggtaatgaagaaccaagaagcagtcgatctcgtaaagtcgatcaaggatccccaggcagcagcgaagcgattgacaactgaagcattggcaaggaagagcaaggacgatatctcttgcattgtcatccgtttccgctgctga

SEQ ID NO: 2626 - protein, 321 aa, Sorghum bicolor
MVGRMERQTASSSASCSPSAAAAASSSSSSVCGGKKRPDILNMIRNAACLNSSSTDTGKGRSKLSTNKVAHGFHLVEGKSGHDMEDYHVAEYKYVKNHELGLFAIFDGHLGDKVPCYLKANLFSNIMKEPLFWSSPQEAIKNAYCSTNKFILENAKQLGPGGSTAVTAIVVDGKDMWIANVGDSRAVVCEKGAANQLTVDHEPHTTNERQRIEKHGGFVTTFPGDVPRVNGQLAVARAFGDQSLKAHLSSEPDIRHVPISSNIEFVILASDGLWKVMKNQEAVDLVKSIKDPQAAAKRLTTEALARKSKDDISCIVIRFRC

SEQ ID NO: 2627 - DNA, 1104 bp, Sorghum bicolor
atgggggctgtgaagcataccttgaaagtgtttccatggctcctactcttcgcacaattggctgtagccactacctccaagtgcacaaatgccacaaatgggactgagactgacagcctgggtgctatgaaactgaagctgattgccattgcatccatcctcacagctggagcagctggtgtgctggtgccagtacttgggcgctccatggccgcgctacatcctgatggtgacatctttttcgctgtcaaggcatttgcagctggtgtcatcctggccacaggcatggtccacattctgccagcagcatttgatgggctgacatccccatgcctctacaaaggtggcagtggtgggaacattttcccctttgcaggcctcattgcaatgtctgctgcaatggctacaatggtgatagactcactagctgctgggtactaccgccggtctcacttcaagaaggcacggccaatcgacaacctagagatccatgaacaacctggagatgaggagaggactgggcatgcacaacatgtgcatgtgcacacccatgcaacacatggccattcacacggagaggcagatggcatcaattcaccagaggaggcttcaatagctgacacaatccggcacagggtggtatctcaggtccttgagcttggaatcttggtgcattcagtgataattggggtgtccttaggtgcatctgtgaggccaaacaccatcaggcctcttgttggtgcccttagcttccatcaattctttgaaggcattggcttgggtggttgcattgtgcaggcaaatttcaagttgcgagctaccgtcatgatggcaatttttttctccctgactgcacccattggcattgcattagggattgcaatttcatctagctacaatggccatagcactacagccttcattgttgaaggagtgttcaactcagcctcagcaggaattttgatctacatgtcattagtcgatcttctggccacagatttcaataaacccaaactgcagacgaatacaaagcttcagctgatgacataccttgcacttttcttaggtgcagggatgatgtccatgcttgctatatgggcatag

SEQ ID NO: 2628 - protein, 367 aa, Sorghum bicolor
MGAVKHTLKVFPWLLLFAQLAVATTSKCTNATNGTETDSLGAMKLKLIAIASILTAGAAGVLVPVLGRSMAALHPDGDIFFAVKAFAAGVILATGMVHILPAAFDGLTSPCLYKGGSGGNIFPFAGLIAMSAAMATMVIDSLAAGYYRRSHFKKARPIDNLEIHEQPGDEERTGHAQHVHVHTHATHGHSHGEADGINSPEEASIADTIRHRVVSQVLELGILVHSVIIGVSLGASVRPNTIRPLVGALSFHQFFEGIGLGGCIVQANFKLRATVMMAIFFSLTAPIGIALGIAISSSYNGHSTTAFIVEGVFNSASAGILIYMSLVDLLATDFNKPKLQTNTKLQLMTYLALFLGAGMMSMLAIWA

SEQ ID NO: 2629 - DNA, 888 bp, Sorghum bicolor
atggcgttcctccttcccaagctcacaacgccgtcaggcccgtcatgcaagttgcccccgagtcccctcctcaagccccagctagcccagccgggccacagcggcggcaagatccaaggctccgtctccggcgctggcgctgcgcaggtcgcggccccgggccacctcagtctccttctcctactcagcgccccgcagcaggcagcggacccagcgtccaagtccacggcgaccaagaaccggggcaagggcggcggggatccgcaaaggtcggatttttacctcaacctcgggacggcggtgcgcacgctgcgggacgacctgcccgacgtcttcgaccgggaacccaactacgatatctaccgtgaagacatcacatttgtcgacccactaaacacttttcatgggattgacaactacaagactatcttctgggcacttagattccatgggcgcctactattcagagaaattgggcttgatgtatcacgcatttggcaactgacagagacttcaatagttgtccggtgggagctgtggggcactccacgtgtcccatgggaatcatatggctgcttcagtgggacgtcgagatacaaggttgacaggaatgggaaaatttacgagcacaaagtcgacaacttggcattggacttcccacgatcagtagcgaaagtgggcagcattgctgacatggtagtcgccacaccaagccccaatttaacgttttggaatgtggttgggccaggtgatggttgctcatggacaaagctttatgaagccgtggtggaagctgtggaacgggaagaacatggttccactggcattggcgttggaggtctacctgtaccctgcagctttggctgcggctgtggcagcagtttttga

SEQ ID NO: 2630 - protein, 295 aa, Sorghum bicolor
MAFLLPKLTTPSGPSCKLPPSPLLKPQLAQPGHSGGKIQGSVSGAGAAQVAAPGHLSLLLLLSAPQQAADPASKSTATKNRGKGGGDPQRSDFYLNLGTAVRTLRDDLPDVFDREPNYDIYREDITFVDPLNTFHGIDNYKTIFWALRFHGRLLFREIGLDVSRIWQLTETSIVVRWELWGTPRVPWESYGCFSGTSRYKVDRNGKIYEHKVDNLALDFPRSVAKVGSIADMVVATPSPNLTFWNVVGPGDGCSWTKLYEAVVEAVEREEHGSTGIGVGGLPVPCSFGCGCGSSF

SEQ ID NO: 2631 - DNA, 1536 bp, Sorghum bicolor
atgatcgcgcgacgcctgctccgatccaatgcccccgcccaggcaagcagcttattgaagcatgtaactggcactgcgagtttgcaagggcatgcggatagtttgttggatgcctcagtcagacattttagttcagctccatctgcacagtctgcctcaactgaagaaaatgggtttaagggccatggcatgttggcaccttttacagctggctggcagagcaatgatttgcatccactgattattgagagatctgagggttcctatgtttatgacattaatgggaacaagtacctggattctcttgcaggattatggtgcacagcgttaggtggtagcgagcctcgattagtcaaagcagcaactgagcaattaaacaagttacccttctaccattccttttggaaccgtactaccaaaccttcgttggatcttgcacaggagatccttagcatattcactgcaaggaaaatgggaaaagttttcttcacaaacagcggttcagaagcaaatgactctcaggtcaaactagtatggtattataacaatgcattggggaggccaaacaagaagaaatttattgcacgatcaaaagcataccatggatctacattgatatcagcgagtctaactggtcttcctgccctgcaccagaagtttgatctaccagcaccttttgttctgcacactgactgccctcactactggagatatcatcttcctggtgagacagaagaagaatttgcgactagacttgccaccaatttagagaatcttattctcaaagaaggaccagaaacaatcgctgctttcattgctgaacctgtgatgggtgctggtggtgtcatccctcctccaaaaacctattttgaaaaggttcaagcagtggtcaagaagtatgacattcttttcatagcagatgaggttatcactgcatttggaaggttggggactatgtttggatgtgattattataacatcaagccagatctagtttcattggccaaggctctttcaaatgcctatgtacccatcggggcaactcttgttagccaagagatatcagatgtgattcattcccagagcaataagcttggttcatttgctcatgggtttacatactctggtcatccagttgcctgtgctgtggccatagaagctctgaaactttatcgcgaaagggatattcctggtcatgtcaagcaaatcgctccaaagttccaggacggaattagggcgttcgcagacagtccaattattggggagatacgcggcttagggatgataatgggaaccgaattcactaacaacaaatcaccgaccgatctattccctgccgaatggggggttggtgcgatctttggagaggagtgccagaagcgcggcatgttggtcagggttgccggcgacgcaatcatgatgtcgccgacgctgatcatgacacccgctgaagtcgacgagctggtgagcatctatggggaagccctcaaggccacggaggagagggtggcagccctgaaatccaagaagaactag

SEQ ID NO: 2632 - protein, 511 aa, Sorghum bicolor
MIARRLLRSNAPAQASSLLKHVTGTASLQGHADSLLDASVRHFSSAPSAQSASTEENGFKGHGMLAPFTAGWQSNDLHPLIIERSEGSYVYDINGNKYLDSLAGLWCTALGGSEPRLVKAATEQLNKLPFYHSFWNRTTKPSLDLAQEILSIFTARKMGKVFFTNSGSEANDSQVKLVWYYNNALGRPNKKKFIARSKAYHGSTLISASLTGLPALHQKFDLPAPFVLHTDCPHYWRYHLPGETEEEFATRLATNLENLILKEGPETIAAFIAEPVMGAGGVIPPPKTYFEKVQAVVKKYDILFIADEVITAFGRLGTMFGCDYYNIKPDLVSLAKALSNAYVPIGATLVSQEISDVIHSQSNKLGSFAHGFTYSGHPVACAVAIEALKLYRERDIPGHVKQIAPKFQDGIRAFADSPIIGEIRGLGMIMGTEFTNNKSPTDLFPAEWGVGAIFGEECQKRGMLVRVAGDAIMMSPTLIMTPAEVDELVSIYGEALKATEERVAALKSKKN

SEQ ID NO: 2633 - DNA, 1353 bp, Sorghum bicolor
atggaagagttacaagattgcaactcgaaatgcctggttgccctcccgggctctttggttctgcatctctttaggctgtttggccagcaggatcagagttcatggcagaagtacatactagcttactttctgttggtcaggaatgactacttctctggggagtcgaagaaacactcagatgtgttctgtgatatttcagaattagatttctttccatatgctacagatttggatagtgaagaacttgaactgaaggagcagaaacctatttcgaaggctcaatcaggaggtgattcaagtagcaacagatcaaatgattgctacttcccaggccttcatgatgacctgtctcaagactgccttgcttgggcaagcagatcagactacccttccctttcttgtctgaacaaaagattcaatttgttaattaacagtggatatctgtacaaactgagaaggaaatatggcatcgttgagcactgggtgtatctcgcttgtagcttgatgccctgggaagcatttgatcctttgcggaagcggtggatgaggctcccaagaatgccatgcgacgagtgcttctcctgtgcagataaggaatcacttgccgtcggaacacagctgcttgtctttggccgtgaatatactggccttgctatttggatgtacaacttactgactcgcagttggtccccatgcactccaatgaatctgccccgctgcctttttgcctcgggaagctcaggtgagattgctattgttgctggtgggtgtgataaggatggacaggtgctgagatctgttgagttgtacaactcagagattggccactgggagactatcccagacatgaacctgcccaggcggctctcttcaggtttcttcatggatggcaagttttacgttattgggggtgtatcgagtcagagggattcattgacttgtggagaggaatataaccttgaaacaaggacctggagaagaatacttgatatgtaccctggtggaaccagtgcatctcaatcgcctccccttgttgctgttgtgaataaccagctctatgctgctgatcagtcaacaaatgtggtcaagaagtatgacaaggtaaataacgcctggaacatagtgaagccattgcctgttagagctgactcatccaatggttggggtctagctttcaaggcttgtggcgatagattgctagtaattggagggcatagaggacctcgtggcgaggtaatactgctgcattcctggtgccccgaaggtggggaagatggtgctgactgggaggttctatcggtgaaggaacgtgcaggcgtcttcgtttacaactgtgcaataatggggtgctga

SEQ ID NO: 2634 - protein, 450 aa, Sorghum bicolor
MEELQDCNSKCLVALPGSLVLHLFRLFGQQDQSSWQKYILAYFLLVRNDYFSGESKKHSDVFCDISELDFFPYATDLDSEELELKEQKPISKAQSGGDSSSNRSNDCYFPGLHDDLSQDCLAWASRSDYPSLSCLNKRFNLLINSGYLYKLRRKYGIVEHWVYLACSLMPWEAFDPLRKRWMRLPRMPCDECFSCADKESLAVGTQLLVFGREYTGLAIWMYNLLTRSWSPCTPMNLPRCLFASGSSGEIAIVAGGCDKDGQVLRSVELYNSEIGHWETIPDMNLPRRLSSGFFMDGKFYVIGGVSSQRDSLTCGEEYNLETRTWRRILDMYPGGTSASQSPPLVAVVNNQLYAADQSTNVVKKYDKVNNAWNIVKPLPVRADSSNGWGLAFKACGDRLLVIGGHRGPRGEVILLHSWCPEGGEDGADWEVLSVKERAGVFVYNCAIMGC

SEQ ID NO: 2635 - DNA, 2544 bp, Sorghum bicolor
atgattgacgttcagatgagtccatttgtgctggctgtggtgagcattgcatttctcaacttgtggttcctgcaagctcatggaagtgaattgcttctgagctgtggctcgaacggcactgttgatgctgatgggcggagatggatcggtgacataacccctgagggcaattttaccttgagcagccctgggattgccgcgtcacaggttgggaagagcaattccgatgaaatattcggaccgctttacagttctgcccgtttctttgacgcagcaacttggtataccattagtgtgctgcctggaagttactgtgtcagattgcatttcttcccttcaacattcgggaatttcagtgcaaacaattctgtgtttgatgtcacagcaaatgatttcaagcttgtttcaaaattcaatgtgtcagaggagattgcttggagagcctctgtgagcaattcagtcatcagtgcagttgtcaaggagtactttcttgtagttggtgctcatggcctgaatattgagtttgatccaagacctgggtcatttgcctttgtgaatgcaattgaggtcatgctggctccagataatttgttcaatgatacagtgagcaaagttggtggtgcaggcgtgcagcttccgcttggcttgcgcggtagaggtgttgagacaatgtaccggctgaacattggaggtcctgcacttaaatcggccagtgatcagtatctccataggccatggtacactgatgaagcattcatgttttctacaaatgctgctcagactgtgtctaatgtttcaagcataatgtatgtatcaagcaacgactcatcagttgcaccgattgatgtttacgagactgcaagaatcatgagcaataacatggttgtggacaagcggtttaacgtgtcatggcgattctatgtccacccaaactttgattacttagtccgccttcatttctgtgagcttgtctatgacaagcccagccagaggatcttcaagatctacatcaataacaagactgctgctgagaactatgatgtatatgcgagggctgcgggaattaataaagcatatcatgaggacttctttgacaactcaacacagcaggcagactcactttggcttcagctaggccctgattccatgaccagtgcctcaggtactgatgcacttctgaatggtttggagatattcaagctcagcaaggattccgacctttcttacgtgcttggtcatattgacacgggcaaccaaaggagttcttcaaaagggggaaagaataaaggtctatgggaagaagttggtattggctcagcatctttagttgcagttacaagcgttgttctgttctcttggtgttatataagaaagaaacaaaaagctgttaagaaggaggcccctctcgggtggcatccgttggttctccatgagactatgaaaagcactacagatgctcgtgcaaccagtaaatcatccttggcacgaaatgcctctaacatcggtcataggatgggaagaagattcggcattgcagagattagggctgccacgaagaattttgatgagtccttaatcattggaactggaggatttggaaaggtatacaaaggtgagctcgatgagggcactacagtggctatcaagcgtgctaatacactatgtggccagggtctgaaagaatttgaaacagagattgagatgctttccaagcttcggcatcggcaccttgttgcaatgattggctactgtgaagagcagaaagagatgattctggtgtatgaatacatggctaaggggacactgagaagccatctctatgggagcaaccttcctcctctgacatggaagcaacggatcgatgcatgcattggtgccgcccgtggccttcactacctccacacaggagcggaccgaggtataatccacagggatgtaaagaccactaacatcctgttggacgagaattttgttgcaaaaatagcagactttgggctgtccaaaactggaccaacgctcgaccacacccatgttagtactgcagtcaggggaagctttggatacctagatccagagtacttccggaggcagcaactcacacaaaaatccgatgtgtattcttttggagtggtgctctttgaagttgcttgtgcaaggcctgtgatagatcccacattgccaaaggatcaaatcaacttggcagagtgggcgatgaggtggcagcgccagcgttcgctggaagcaatcatggatcctcgtctggatggcgacttctcatcagaatcactgaagaagtttggtgaaattgcagagaaatgtctcgctgatgatgggagaagcaggccatcaatgggcgaggtcctgtggcatcttgagtatgtgctgcagctccatgaagcttacaagcgaaatgtagagtctgaatcatttggaagcggtgagttgggattcgctgatatatcctttagcctccctcacatcagagagggggaagaggaacgccactctaagccatcaagtatcagagaggaactagacacatga

SEQ ID NO: 2636 - protein, 847 aa, Sorghum bicolor
MIDVQMSPFVLAVVSIAFLNLWFLQAHGSELLLSCGSNGTVDADGRRWIGDITPEGNFTLSSPGIAASQVGKSNSDEIFGPLYSSARFFDAATWYTISVLPGSYCVRLHFFPSTFGNFSANNSVFDVTANDFKLVSKFNVSEEIAWRASVSNSVISAVVKEYFLVVGAHGLNIEFDPRPGSFAFVNAIEVMLAPDNLFNDTVSKVGGAGVQLPLGLRGRGVETMYRLNIGGPALKSASDQYLHRPWYTDEAFMFSTNAAQTVSNVSSIMYVSSNDSSVAPIDVYETARIMSNNMVVDKRFNVSWRFYVHPNFDYLVRLHFCELVYDKPSQRIFKIYINNKTAAENYDVYARAAGINKAYHEDFFDNSTQQADSLWLQLGPDSMTSASGTDALLNGLEIFKLSKDSDLSYVLGHIDTGNQRSSSKGGKNKGLWEEVGIGSASLVAVTSVVLFSWCYIRKKQKAVKKEAPLGWHPLVLHETMKSTTDARATSKSSLARNASNIGHRMGRRFGIAEIRAATKNFDESLIIGTGGFGKVYKGELDEGTTVAIKRANTLCGQGLKEFETEIEMLSKLRHRHLVAMIGYCEEQKEMILVYEYMAKGTLRSHLYGSNLPPLTWKQRIDACIGAARGLHYLHTGADRGIIHRDVKTTNILLDENFVAKIADFGLSKTGPTLDHTHVSTAVRGSFGYLDPEYFRRQQLTQKSDVYSFGVVLFEVACARPVIDPTLPKDQINLAEWAMRWQRQRSLEAIMDPRLDGDFSSESLKKFGEIAEKCLADDGRSRPSMGEVLWHLEYVLQLHEAYKRNVESESFGSGELGFADISFSLPHIREGEEERHSKPSSIREELDT

SEQ ID NO: 2637 - DNA, 1602 bp, Sorghum bicolor
atggagtacgagaggattcatcagaaagctcagcctggtgctctttccccaacaaagctaaggatgaagattatgggagcccacaatcgagttagagtcatcaccagcaattcatcatcgcgaacgtcgcctgcaaaaaacatcgaggcttcacaagcgcagaacaggctactagtctgtgatgttctcgaagaagtttcagacagcacatcagatggcaccaaacacccttcggcagtcaacaaaactgaagccgtggaaaaggattcagcagtggacagcaataaagttcagaacatttccaagagttcagttcctcaaccagcaacaggcagctctagcatgatacacccagtgagacctgtggaagaagacagtaccgaatgtgacagtggtcttgacaatgctagcactagtagctttgagttccatggagttgagaagacagcgacgcagaatccagcacatgggtatttatctagacagacttccatttcctccaagtggaatgatgcagagaaatggatcgtgaaccggcagaatgttaaccagaacatcaccaagggcacagcacagaaccagacagtaaaccagatgaactctgctgcagccaggggcgccattgtgcccaaaatttctggtcgtcctgtgcagaaaatgaagagggtgaatccagctttgtctgctccgcgcagcatattagagaggttatcgtttgcttcgtatcagcctaagttggttaggcatgcagatgtctgtccagttagtaatgctagtgctaactcagagtgtcacaaggcaactgatactggttcatcaattgaaatgaagccctgcaatgaagcaaacgctattccagcagttcagtcagtgtccgtgagagatgtgggcacagaaatgactccaatacctagccaggaaccttcaagaactggaactccactcgggtcaaggacaccaactcgaagccctaattgttcgataccctcaacacctgtaggagggaggtcaatagcatctcctggagaagaatgcacagatgatggtccatatttcaacagaaaaggtgtcgcacatgcaaatgaattgtcagatactgaaacgaggcttaaaacaaggcaagaaattgctgctcttggtatacagctaggaaagatgaacattgctacatgggccagcaaagaagagctagaactagtctctgcggcaccaagcattgctgatttggagcgcatgaagaaggaatatgctgctcgtgctgcatcatatgaggaggcagaaaacactaaacatacagcaagattcaaaaaagaagaggtgaagattgaagcttgggagagtcgtcaaagaggaaaaattgaatccgaaatgagaagaatagaggaacatgctgagagaatgagaagcgaggccatggcaaagatggcagaaaagctagagatgacacgccgcattgctgaagagaaacgagcttcagccaatgccaaaatgaaccagcaagcagcaatagcagttcagaaggccgagaagattcgccaaacaggacgagttccaggatcaagtatcctatgctgcagtggctgcttctgtggaccttattag

SEQ ID NO: 2638 - protein, 533 aa, Sorghum bicolor
MEYERIHQKAQPGALSPTKLRMKIMGAHNRVRVITSNSSSRTSPAKNIEASQAQNRLLVCDVLEEVSDSTSDGTKHPSAVNKTEAVEKDSAVDSNKVQNISKSSVPQPATGSSSMIHPVRPVEEDSTECDSGLDNASTSSFEFHGVEKTATQNPAHGYLSRQTSISSKWNDAEKWIVNRQNVNQNITKGTAQNQTVNQMNSAAARGAIVPKISGRPVQKMKRVNPALSAPRSILERLSFASYQPKLVRHADVCPVSNASANSECHKATDTGSSIEMKPCNEANAIPAVQSVSVRDVGTEMTPIPSQEPSRTGTPLGSRTPTRSPNCSIPSTPVGGRSIASPGEECTDDGPYFNRKGVAHANELSDTETRLKTRQEIAALGIQLGKMNIATWASKEELELVSAAPSIADLERMKKEYAARAASYEEAENTKHTARFKKEEVKIEAWESRQRGKIESEMRRIEEHAERMRSEAMAKMAEKLEMTRRIAEEKRASANAKMNQQAAIAVQKAEKIRQTGRVPGSSILCCSGCFCGPY

SEQ ID NO: 2639 - DNA, 414 bp, Sorghum bicolor
atggtgaagttcctcaagcccggcaaggccgtgatcctcctccagggccggttcgccggccggaaggcggtgatcgtgcgcgtgttcgaggagggcacccgcgaccgcccctacggtcactgcctcgtcgccggcctcgccaagtaccccaagaaggtgatccgcaaggactccgccaagaagacggccaagaagtcccgcgtcaagtgcttcatcaagctcgtcaacttcacccacctcatgcccacccgctacaccctcgacgtcgacttgaaggacgtcgcctcgggcgggcccgacgcgctctccacccgcgacaagaaggtcgaggcctgcaagaccgccaagtaccgtctcgaggagaggttcaagagcggcaagaacaggtggttctttaccaagctccgcttctag

SEQ ID NO: 2640 - protein, 137 aa, Sorghum bicolor
MVKFLKPGKAVILLQGRFAGRKAVIVRVFEEGTRDRPYGHCLVAGLAKYPKKVIRKDSAKKTAKKSRVKCFIKLVNFTHLMPTRYTLDVDLKDVASGGPDALSTRDKKVEACKTAKYRLEERFKSGKNRWFFTKLRF

SEQ ID NO: 2641 - DNA, 1023 bp, Sorghum bicolor
atggttctcgtggtgctgggctgctctcctgcatcgccgcgccccgcctgcactcccaattccaggagaagatgcagcgccaccagacagaaaatcatcagatgctctctgaatgaggaaacactactgagcaaacatggagtagtatccaggcagttaatctcatgccttgctgcttcgcttgtgttcgtctctccacctagtcaggctattcctgcagaaacttttgcccatccaggcttgtgccagattgcaacagtggcagccatcgacaatgcttcagttcctctgaaatttgacaacccttcagatgatggcagcgcagggatgatgatgaggggtatgactgcaaagaactttgatccagttcgctactctggtagatggtttgaggtagcctcgctgaaacgtggatttgctggtcagggacaagaagactgtcattgtactcagggagtgtactcgttcgatgagaagtcacgctcaatccaggtggatacattctgtgtccatggtggacctgatggatacatcactggtattcgggggagggtgcaatgcctgtccgaagaggacatgtcaagtgctgagacagatcttgagaggcaggagatgatccgtgagaaatgctttctccggttccccacgctgccattcatacccaaggagccctatgatgtccttgcaactgactatgacaattatgcagttgtgtctggagctaaggatacaagctttattcagatatactcaagaacacccaaccccgggccagaattcattgagaagtacaagtcctatgttgccaacttcggctatgacccaagcaagatcaaggacacccctcaagactgcgagtacatgtcctcagaccagattgccttgatgatgtcgatgcccgggatgaacgaagccctgacgaatcagttcccagatctcaagttaaaggcaccagttgcacttaacccattcacaagtgtgtttgataccctgaagaagctgcttgaactgtacttcaagtaa

SEQ ID NO: 2642 - protein, 340 aa, Sorghum bicolor
MVLVVLGCSPASPRPACTPNSRRRCSATRQKIIRCSLNEETLLSKHGVVSRQLISCLAASLVFVSPPSQAIPAETFAHPGLCQIATVAAIDNASVPLKFDNPSDDGSAGMMMRGMTAKNFDPVRYSGRWFEVASLKRGFAGQGQEDCHCTQGVYSFDEKSRSIQVDTFCVHGGPDGYITGIRGRVQCLSEEDMSSAETDLERQEMIREKCFLRFPTLPFIPKEPYDVLATDYDNYAVVSGAKDTSFIQIYSRTPNPGPEFIEKYKSYVANFGYDPSKIKDTPQDCEYMSSDQIALMMSMPGMNEALTNQFPDLKLKAPVALNPFTSVFDTLKKLLELYFK

SEQ ID NO: 2643 - DNA, 5205 bp, Sorghum bicolor
ctccccgtgttcttgctttcgttcagagcctcggccgctggcactgcatctgacacactcagcagcagcagcaacatcaccgatggcgagacgttggtctcatccggcagcaccttcaccctgggcttcttctcccctaccggcgttccagccaagagataccttggcatctggttcaccgcgtccccggatgccgtctgttgggtggccaaccgcgacagccccctcaacaacacctcgggtgtactggtggtcggcagcaccgggagccttcgccttctcgatggctctggcggccacaccgcgtggtcttccaattccaacaccacgacgacgagcagtcccggtccatccgtggcgcagctgctcgactccggcaaccttgtggtgcgcgagcagagcagcggtgacgtgctctggcagtcgttcgatcacccgtcgaacaccttgctcgccggcatgagaatcggcaagaacccgcagactggcgcggaatggtccctcacgtcgtggcgtgcatcgaacgacccgaccaccggggactgcaggactgcgatggacaccagggggctcccgggcatcgtctcgtggcaaggaaacgccaagaagtaccaaacgggcccctggaacggcctatggttcagcggcctcccggaggtggcgagggtgtcgaacacggatccgtaccccaacgaggtcgtcgtccgcgccgacgagatcgcataccacttcgacgccaggaccgacgcgcccttctcccgcctcgtgctgaacgaggtcggcgtggtgcagcacctggcgtgggatccggcaaacctgctgtggaacatcttggtgcaggcgcccaaggacatctgcgacaactacgccaagtgcggcgcgttcggcctgtgcaacgtgaacacggcgtccacgaggttctgcagctgcgtcgtcgggttcagccccgtcaacccctcgcagtggtccttgggtcaatacggaagcgggtgccagaggaatgtgccgctggaatgccacggcaacgggacgacgacggacgggtttatggtggtgcggggagtgaagctccctgacacggacaacgcgacggtggacacgggcgcgacgatggagcagtgcagggcaaggtgcctcgccaactgcgaatgcgtcgcctacgccgccgccgacatccgaggaggcggtgatggtagtggctgcatcatgtggacgaattacattgttgacattcggtacgtagacaaggggcaggatcgtgatcgtctctacctgaagttggccaggtctgaatctgaaaggaacaggaggggtgtggcaaagatcgtgcttccggtcaccgcatctctgctagcagccatggctgtcggcatgtaccttatttggatatgcaagcttagaggcccacgtcaaaataatggtaacgggaagaaagtaatgccaagtaccgagagcacgtcaaatgaacttggcgatgaagaagatcttgagattccatcttttagctttagagatattatctctgcaacaaacaacttttctgagggtaacatgcttggacgaggaggcttcgggaaggtgtataagggtatgctgcccaataatagagaagttgcaatcaaaagacttggtaagggttctagacagggggcagaggaattcagaaatgaagttgttctaattgccaaattgcaacacagaaacctcgtcagacttcttggttgctgcattcatggagatgagaggctgctgatttacgagtatttaccaaacaaaagcttagattgcttcatttttgatcctacaagtaaaagagccctcgattggccaacaagattcaagataatcaaaggaatttctagaggacttctttatctccaacaggattcaaggttgactataattcatagagatatcaaaacaagcaacatactcttggatgcagatatgagcccaaaaatatcggattttggaatggcaagaatatttggcggaaaccaacaagaagcaaatactattcgagttgttgggacatatggttacatgtctcctgaatatgcaatggatggcgccttttcggtcaaatcagatacatatagcttcggcgtcatactcttggagattgcatggagcttatggaaagatggtaaggcaattgatcttgtggactcatcaattgttgagacttgttcaccagttgaagctttgcgatgtatccacataggactcttgtgtgtgcaagacaatccaaatagtaggccacttatgtcatcggttgtgttcatattggagaacgaaaccacgttaggttctgtcccaaagcagcccatgtacttctcccaatggtatttagaagcccaaggaacaagagaaaatgcaaatagctccatgaatgacctgccatcaggaggggacaagcacgtgtgcgctgttgctagaaaaagaatgttgagtcacccacaggccatatggagtgccaaggtagcacatagtagcaagaaaggggtggatccatgccgccagatgtgccacgcctcctactcgatctacggatggtggtgggaaggtggaagaggcggtagtgggaagagaacccatgatgtggaggagatgaagacggcagttggctcctcccgtgcacatattggacttgggatcatccaagaaaagaagccaccgtttcttacatcccagaccacgtttgctgactccagaaacacgaaatctaccagtggccagagaacaagaaaagccctgatagatatgatgtatagtgccatcttcatcctcatattcttgagttcactctgtcgatccgacgatcagctgacacatacaaagccgctctttcccaaagacactctcatctcggcgggcagagactttgctcttggcttcttttctcctaccaattcaagcaacaagttatacattggaatttggtacaacaatctcccagagcgcacggtggtatggatcgccaaccgtgacagcccaatcaccgcgcctacatcagcgaagctcgccatctcaaacaattcagggctggtgttgtcagactcccaagggcacatcttttggacggcaacgagcaacacaagtggaggtcctggagcttttgcagtattactcagctcaggaaactttgtccttcgatcgccgaatgacatggacatatggcaaagctttgatcaccccaccgatacaattcttccaaccatgaggcttatgctaagctacaagtcacaaccggcaacacacctctttgcttggaagggccctgacgatccatcaaccggggacatctctatcagcatggatccgggctcctcaggccttcagatgttcatttggaatgggactttgccatacttccgttcttctgttgttagtgatgtcctagtatcccgtggcgtataccagaccaacagtacctcagccacgtaccaagcgatgatagttgacacaggggatgagttgtactatacgttcacagtcttagctggttcaccctacttgcgaatattacttcactacacaggcaagacgaggctcctgatctgggaaaatagcacatcatcctgggcagtcattggtgaggcccctagtgttggctgtgatctctacgcctcttgtggcccgttcggctattgcgatcgcacgaaggcaatgccgacatgccagtgccctgatggttttgagctggtcgacagtctcaacttctctagaggatgccagagaaaggaagagctaaaatgccgaacagagaactatttcttgaccatgcctaatatgaagattcctgacaagttcttatacattaggaatagaacctttgaccagtgtgcagcagagtgcgccagaaactgctcctgtatagcatatgcctattccaacctaagcgctgctggcattatgggcgaagcatcaaggtgtttggtttggactcaccatcttattgacatggagaaggccagtcttttagagaacttgtacatccggcttggcgaatctcctgcagatcagaagaagagcacttttctgaaaattttgctcccaactatagcatgtctgctgctactaacaatcaccgctcttgtttggacatgtaaaggcagaggcaaatggcataagaagaaagtccagaagagaatgatgctagaatacttgagttctacagatgaagctgggggaaagaatatagagttcccatttattacatttgaaaacattgtcacagcaacagacaatttctctgacagcaatatgcttgggaaaggaggttttggcaaagtatacaagggaatgttggaaggaaccaaagaagtagccatcaagagactgagcaagagttctgggcaaggtgccaaggagttcaggaatgaagtagttttgattgcaaagttgcagcacaagaacctagttaagcttcttggttgctgtgttcatgaagatgagaagctgttagtttatgagtacttgcccaacaaaagcttggattacttcctctttgattctgcaagaaaatcaatgcttcagtggcaaacaaggttcaagataatctatggggtggctagaggaattatgtatcttcatcatgactcgagattaacaataattcatagagatctcaaagctagcaacatcttgctagataaggacatgagcccaaagatatcagatttcggcatggctagaatattcagtgccgaccagctccaagcaaatactaacagagttgtagggacatatggttacatgtctcctgaatatgcaatggaaggtgccttttcagtcaagtctgacacctacagttttggtgttttaatgctggagattataagtggtttaaagatcagctcaccacatcttatcatggattttcctaaccttagagcatatgcatggaacatgtggaaagaagggaaaatagaagatctggtggactcatcagtcatggagaattgctcccctgatgaagtttcacgatgtatccatataggactcttgtgtgttcaagacgatccgagttgcaggccactcatgtcggtggttgtgtccatgctggaaaacaaaacgacgccacttccaactccaaatcaacctacatattttgcacttagggactcctaccgacctgaaaaggcagttgacaacaaggaattctctgtaaatgatatgagtctcactgtgctagagggccgt

SEQ ID NO: 2644 - protein, 1735 aa, Sorghum bicolor
LPVFLLSFRASAAGTASDTLSSSSNITDGETLVSSGSTFTLGFFSPTGVPAKRYLGIWFTASPDAVCWVANRDSPLNNTSGVLVVGSTGSLRLLDGSGGHTAWSSNSNTTTTSSPGPSVAQLLDSGNLVVREQSSGDVLWQSFDHPSNTLLAGMRIGKNPQTGAEWSLTSWRASNDPTTGDCRTAMDTRGLPGIVSWQGNAKKYQTGPWNGLWFSGLPEVARVSNTDPYPNEVVVRADEIAYHFDARTDAPFSRLVLNEVGVVQHLAWDPANLLWNILVQAPKDICDNYAKCGAFGLCNVNTASTRFCSCVVGFSPVNPSQWSLGQYGSGCQRNVPLECHGNGTTTDGFMVVRGVKLPDTDNATVDTGATMEQCRARCLANCECVAYAAADIRGGGDGSGCIMWTNYIVDIRYVDKGQDRDRLYLKLARSESERNRRGVAKIVLPVTASLLAAMAVGMYLIWICKLRGPRQNNGNGKKVMPSTESTSNELGDEEDLEIPSFSFRDIISATNNFSEGNMLGRGGFGKVYKGMLPNNREVAIKRLGKGSRQGAEEFRNEVVLIAKLQHRNLVRLLGCCIHGDERLLIYEYLPNKSLDCFIFDPTSKRALDWPTRFKIIKGISRGLLYLQQDSRLTIIHRDIKTSNILLDADMSPKISDFGMARIFGGNQQEANTIRVVGTYGYMSPEYAMDGAFSVKSDTYSFGVILLEIAWSLWKDGKAIDLVDSSIVETCSPVEALRCIHIGLLCVQDNPNSRPLMSSVVFILENETTLGSVPKQPMYFSQWYLEAQGTRENANSSMNDLPSGGDKHVCAVARKRMLSHPQAIWSAKVAHSSKKGVDPCRQMCHASYSIYGWWWEGGRGGSGKRTHDVEEMKTAVGSSRAHIGLGIIQEKKPPFLTSQTTFADSRNTKSTSGQRTRKALIDMMYSAIFILIFLSSLCRSDDQLTHTKPLFPKDTLISAGRDFALGFFSPTNSSNKLYIGIWYNNLPERTVVWIANRDSPITAPTSAKLAISNNSGLVLSDSQGHIFWTATSNTSGGPGAFAVLLSSGNFVLRSPNDMDIWQSFDHPTDTILPTMRLMLSYKSQPATHLFAWKGPDDPSTGDISISMDPGSSGLQMFIWNGTLPYFRSSVVSDVLVSRGVYQTNSTSATYQAMIVDTGDELYYTFTVLAGSPYLRILLHYTGKTRLLIWENSTSSWAVIGEAPSVGCDLYASCGPFGYCDRTKAMPTCQCPDGFELVDSLNFSRGCQRKEELKCRTENYFLTMPNMKIPDKFLYIRNRTFDQCAAECARNCSCIAYAYSNLSAAGIMGEASRCLVWTHHLIDMEKASLLENLYIRLGESPADQKKSTFLKILLPTIACLLLLTITALVWTCKGRGKWHKKKVQKRMMLEYLSSTDEAGGKNIEFPFITFENIVTATDNFSDSNMLGKGGFGKVYKGMLEGTKEVAIKRLSKSSGQGAKEFRNEVVLIAKLQHKNLVKLLGCCVHEDEKLLVYEYLPNKSLDYFLFDSARKSMLQWQTRFKIIYGVARGIMYLHHDSRLTIIHRDLKASNILLDKDMSPKISDFGMARIFSADQLQANTNRVVGTYGYMSPEYAMEGAFSVKSDTYSFGVLMLEIISGLKISSPHLIMDFPNLRAYAWNMWKEGKIEDLVDSSVMENCSPDEVSRCIHIGLLCVQDDPSCRPLMSVVVSMLENKTTPLPTPNQPTYFALRDSYRPEKAVDNKEFSVNDMSLTVLEGR

SEQ ID NO: 2645 - DNA, 957 bp, Sorghum bicolor
atggcggccagcggcgcgctccccgtggtggacctggcgccgttcttcaccgacgacggccacgacggcggcgtctcccgcgccagcgccacggaggccgtgcgccaggcgtgccggacgcacggcttcttccgcgccgtcaaccacggcgtgccggcccacctcatggggcgcgcgctcgagctgtcggccgcgttcttcgcgctgccggacgaggacaaggccagggcccgggcggccgagggcgccgaagcgcctctccccgtgggctacgcgcggcagccggcgcactcggcggacaagaacgagtacgtgctggtgtttgatcccaagcttgggttcaacgtgtaccccgccgagccagccggattcagagaggcagtggaggagtgctacgccaagctcacagagctggggctgctcatccaggaggttgtgaacgagtgcatgggcctcccgccgggcttcctcagcgactacaatagcgaccgcagcttcgacttcatggcggcgctgcgctacttcccggcgacggaggaggaggtcaacggcatcagcgcgcacgaggacggcaactgcatcacgtttgtcatccaggacggcgtcggggggctcgaggtcctcaaggacggcgactgggtcccggtggagcccgtcgacggcagcatcatcgtcaatctaggcgacgtcatacaggtgctgagtaacaacaagctcaagagcgcgacgcaccgggtggtgaggaggccggtgcacaggcactcgttcgcgttcttcttcaacatccacggcgacaagtggatcgagccgctgccggagttcacggccaagatcggcgaggcgccacggtacagggggttcgtgtacaacgagtatatgcagctgcggatgaagaacaagacccatccgccggagaggcccgaggatgtggtccatataacccactacgccatctag

SEQ ID NO: 2646 - protein, 318 aa, Sorghum bicolor
MAASGALPVVDLAPFFTDDGHDGGVSRASATEAVRQACRTHGFFRAVNHGVPAHLMGRALELSAAFFALPDEDKARARAAEGAEAPLPVGYARQPAHSADKNEYVLVFDPKLGFNVYPAEPAGFREAVEECYAKLTELGLLIQEVVNECMGLPPGFLSDYNSDRSFDFMAALRYFPATEEEVNGISAHEDGNCITFVIQDGVGGLEVLKDGDWVPVEPVDGSIIVNLGDVIQVLSNNKLKSATHRVVRRPVHRHSFAFFFNIHGDKWIEPLPEFTAKIGEAPRYRGFVYNEYMQLRMKNKTHPPERPEDVVHITHYAI

SEQ ID NO: 2647 - DNA, 921 bp, Sorghum bicolor
atgccgcaccctggaactggaacggagggcatggcagcgtcgccgtcgccggaccacctcttcggcctgcgcaacagcttctacatcggcgcgtaccacgccgccatcaccagcagccagtccctccccgcgcacgcgctctcccccgacgacctcgtcgagcgcgacgccctcctctaccgctcctacatcgccatcggctcccaccagttggtgatcggcgagatcgggcccagcgcagccacgccgctccaggccgtcaagctgctcgccgtgtacctctccggcgacgccgggaacagggaatcggtggtctcgaggcttcgggagctcctgtcagatgcggctgttgggaccaatccgatcctacggttgatggccggcaccgtcttcatgcacgaacgcgattacgccgaggcactgaagcacaccagctccggtggcagcatggaactgcatgcgttgaatgttcagatataccttcaaatgaataggacagaccatgcagagaagcaactcagggtgatgcaacagctggacgaagaccacacgctgacgcagctcgccaatgcatggatcgaccttgtcatgggtggctccaagatccaagaagcgcacctcatcttccaggacttgtccgagaagtacccggcgacctgcacgattcttaacgggaaagccctgtgttcgatgcacatgggcaacttcgaggacgccgagggcttgctgctggagtcactgaacaaggacgccaaggatgctgaaactcttgcgaacctcacggtgtgcagcctcaacttgggaaaacctgcaacgcgctacctcaaccagttgaagctagcacagccagaccacgcgctggtgaagcgaatgtcctccgctgcagacagcttcgacagagcctgccaagcaatggcatga

SEQ ID NO: 2648 - protein, 306 aa, Sorghum bicolor
MPHPGTGTEGMAASPSPDHLFGLRNSFYIGAYHAAITSSQSLPAHALSPDDLVERDALLYRSYIAIGSHQLVIGEIGPSAATPLQAVKLLAVYLSGDAGNRESVVSRLRELLSDAAVGTNPILRLMAGTVFMHERDYAEALKHTSSGGSMELHALNVQIYLQMNRTDHAEKQLRVMQQLDEDHTLTQLANAWIDLVMGGSKIQEAHLIFQDLSEKYPATCTILNGKALCSMHMGNFEDAEGLLLESLNKDAKDAETLANLTVCSLNLGKPATRYLNQLKLAQPDHALVKRMSSAADSFDRACQAMA

SEQ ID NO: 2649 - DNA, 1821 bp, Sorghum bicolor
atgggccaccggcaaccgtgttattcattcggcccggctaaactcctgggtgggggaaagggttttctccggccgttttcccgagccgccggccacaagaccactgccgccgccgacgccgacgccgacgcgaagaccgaccgcaggtccgcagcaagcactcgcggatactactactgcctccgtcccccgctgcacccgctgcttttcgtctccgcgcagtcgtccgatggccaagcggctcgctgccgccgagaaagaggtaggggcgtcgcgcttgcagtcctccgagccgggcaggcctccttgtttcgcttacccgtttggtctgcttccgtttgtgcgtgcgcccaggtgctcgtcgaggtggtgcggttcacgcagaagaacggcctcagaggctgtgacggcgggtggaaggatttcctggcccggaacgacaggaagtttggcgcgtcggtgagcgaccccaggaagcgcaccagggatgtgctgctcgccttcctgcaaaccttctccaaggatttccagaagtacttcggcaaattggtgaagcgtcataaggaaagaagtgatgttcagcagtatatgactgatttccctgatgaagtttctcccgagcagaaacttgttcaactgacggcagagcacccggagtacagaaaacactactgcttcccatcataccaggaggggtggaaagtattgaggataggagaagtctctagtttaatgagctcaagtgctatgttggcaattgactgtgagatggtcctttgcagtgatggcacagaggctgtggtcagagtatgtgttgtagatgacaagctcaaggctaagctggacatacttgtaaacccctcaaaagctattgctgactacagaacagacatcactggtgtatctaagaatgatttagaaggagtcacatcatcattagttgatgttcagaaatcgctgaagagaatgttatcgaaaggaaatattttgattggccatagcttgcatagagatttatgcgtcttaaagcttgattactctcaagttattgatacagcatacatatttaagtatgcaaatttacctactactgcatcaccttccttaaacagtttgtgcaaggctattctggggtattctgttcgagaagaaggagaaccacataattgcttaaaggatgcagaagctgcgatgaatctagttcttgcaaaacttaagaatgggtttaatgaccccattgaaattgctgcaagtagtgtaattgaatctgatgtggtgaagttgcttgctcatagaattccagtgtacctgccttgccaagagctgtgcaaaattttctctgggaaccccaacattgatgacaagattgattcgcgaatacgaggtgaattttattccacatgtatttcattcaatgacgtagatgaggtagagaaggcatttgaagaactggatggccaaaagactaaggactcaggtgggagacttcaaaagcatgtagtgctgaagcgtgacaatggagatgtcgtaagcttctacgttcggaagatggtatacggttcctggcccaaacagctcgaagttccaaagaatagaccagagcctacggaggattcagagccaaagaaagagcatgccgagggagttcagcaaaaaaagaagagaaataacttcgtgagagataatgaggatccagagccaaagaggagaccagagcctactttggatccagagccaaagaaagatcatgccgagggggttcagcaaaagaagaagagaagtaaaaaacacacagacaaggaaaatgcgtcggtggtgtaa

SEQ ID NO: 2650 - protein, 606 aa, Sorghum bicolor
MGHRQPCYSFGPAKLLGGGKGFLRPFSRAAGHKTTAAADADADAKTDRRSAASTRGYYYCLRPPLHPLLFVSAQSSDGQAARCRRERGRGVALAVLRAGQASLFRLPVWSASVCACAQVLVEVVRFTQKNGLRGCDGGWKDFLARNDRKFGASVSDPRKRTRDVLLAFLQTFSKDFQKYFGKLVKRHKERSDVQQYMTDFPDEVSPEQKLVQLTAEHPEYRKHYCFPSYQEGWKVLRIGEVSSLMSSSAMLAIDCEMVLCSDGTEAVVRVCVVDDKLKAKLDILVNPSKAIADYRTDITGVSKNDLEGVTSSLVDVQKSLKRMLSKGNILIGHSLHRDLCVLKLDYSQVIDTAYIFKYANLPTTASPSLNSLCKAILGYSVREEGEPHNCLKDAEAAMNLVLAKLKNGFNDPIEIAASSVIESDVVKLLAHRIPVYLPCQELCKIFSGNPNIDDKIDSRIRGEFYSTCISFNDVDEVEKAFEELDGQKTKDSGGRLQKHVVLKRDNGDVVSFYVRKMVYGSWPKQLEVPKNRPEPTEDSEPKKEHAEGVQQKKKRNNFVRDNEDPEPKRRPEPTLDPEPKKDHAEGVQQKKKRSKKHTDKENASVV

SEQ ID NO: 2651 - DNA, 966 bp, Sorghum bicolor
atggcgccctgccggcagaccttcgcccgctacaccatggcgctgctgtttgctgcggctgctgtctcagcgcagctctccaccgacttctacggtgagacatgccccgacgcgctggacatcattgagtccgccgtgagagccgctatctccaaggagtcccgcatgggggcctccctgctccgcctccatttccacgactgctttgtcaatggctgtgacgggtcagtgctgctcgacgacaccacgggcttcaccggcgagaagacggcgaagccgaacaagaactcgctccgtgggttcgacgtggttgacgacatcaaggcgcagctcgaggactcctgccagcagacggtctcctgcgccgacatcctcgccgtcgccgcccgcgactccgtcgtcgccctcggtgggcctacgtgggacgtggagctcggccgccgtgacgggacgacggcgagcctggacgacgcgaacaacgacctcccggcgccgaccctggacctcggcgacctcatcaaggccttcgccaagaagggcctgagcgcgaacgaaatgatcgcgctgtcgggcgggcacacgatcgggcaggcgcggtgcgtcaacttccgcggccgcctctacaacgagaccaccagcctggacgcgtcgctggcgtcgtcgctgaagccgcggtgcccgagcgcggacggcaccggcgacgacaacacgtcgccgctggacccggccacgtcctacgtcttcgacaacttctactacaggaacctgctgcggaacaagggcctgctccactcggaccagcagctcttcaacggcggctccgcggacacgcagaccacctcctacgcgtccgacaaggccggcttcttcgatgatttccgcgacgccatggtgaagatgggtgccatcggcgtcgtcactgggtccggagggcaggtcaggctgaactgccggaagacgaactaa

SEQ ID NO: 2652 - protein, 321 aa, Sorghum bicolor
MAPCRQTFARYTMALLFAAAAVSAQLSTDFYGETCPDALDIIESAVRAAISKESRMGASLLRLHFHDCFVNGCDGSVLLDDTTGFTGEKTAKPNKNSLRGFDVVDDIKAQLEDSCQQTVSCADILAVAARDSVVALGGPTWDVELGRRDGTTASLDDANNDLPAPTLDLGDLIKAFAKKGLSANEMIALSGGHTIGQARCVNFRGRLYNETTSLDASLASSLKPRCPSADGTGDDNTSPLDPATSYVFDNFYYRNLLRNKGLLHSDQQLFNGGSADTQTTSYASDKAGFFDDFRDAMVKMGAIGVVTGSGGQVRLNCRKTN

SEQ ID NO: 2653 - DNA, 1731 bp, Sorghum bicolor
atggcgtccctcttcggtgctcgccgccggcgatcgccggaggacgacggcgaggacgatagatccggcagcgggagggcccagcgccgccgcctctcaccggaggatgccgccgcgtcgccggcggaggcgggcgcggcgacggggactagccccggttggctctccggcttcgtctccggagcgaagagggtcttttcttccgttttactgttctcctcgcccgaggagaccggctcgggggaggatgaggaggaggaggacgacgacgaagaagaagaagagggcgtcggcttgaatgaaaatgaagatattcatgacactcagggagcaatagttccttttagtgagtcaaagcttgctattgagcaaatggttatgaaggaaacattctcaagggatgaatgtgataggatggtagagctaataaaatcaagagttagagattctacttttcctgaagcccatgagtatggaaagccagaagaaatcccaagtaggaatgcaggcattgcgcatgactttacaggaacatggcgctccttgagccgtgaccggaatttccctgaatcagttccactctctagtatgagaatgggacctggtagtttttctccaggttctccactccaagcatcacctgagctatgcagtgcagcagttacggaagcaaaaaaatggttggaagagaaaaggcagggactgggcttaaagcctgaagacaatgggccgtgcacattaaatactgatatgtttagttctcacgatgactctgacatgggtactccagttgatttagcgaaatcatacatgcagtcgttacctccttggcaatccccattcttaggacgtcagaagtttgacacatcaccctccaaatactctatctcgtcaacaaaggtaaccacaaaggaagactacctttccagcttttggacaaaattggaagaatcacgaagagctcacattggatcatctggaggttctgctgatgctcctaaattctggaattatggttctggttccagattatttgagaataacacctctatattctcattgggcactgatgagaaagttggagatcttaccgaaacccataatgggtctgagaaagttgcagcaacagaaccagtcagtggatgctccttacttattacaccaactgaagatataactgatggtattactgagcccgtggaccttgcaaaggacaatgggaatgcgctccaagaataccaagttgcatctgaaattctccccgataaagttgcagagggtaacgatgtgtcttccacaggaattactaaggatactactgcccatagtggagatgttaaagctcccacatcagaaccacatataggggaaacacatgtcaactcagcttcagaatccataccaaatgatgcagatcccccaacccagaccaaaatgaatgggtcgaccaagaaaacattagtcaacggtcttttggatcaatcaaatggcaactcagggctacaatcttcaggaaatgataatcctagctacactaactcgagcagtgctatgccaccctctagtaccgaactaactgagtctacagcccctgctacagatgttgattctgttaagaatggcccaggtacaaaaccagaacaaccagctaagcgggccttgagatcatccaatgttcaacaaggacggaaaagggtgttgcgaagcacagcaagaggaagagcgacgtag

SEQ ID NO: 2654 - protein, 576 aa, Sorghum bicolor
MASLFGARRRRSPEDDGEDDRSGSGRAQRRRLSPEDAAASPAEAGAATGTSPGWLSGFVSGAKRVFSSVLLFSSPEETGSGEDEEEEDDDEEEEEGVGLNENEDIHDTQGAIVPFSESKLAIEQMVMKETFSRDECDRMVELIKSRVRDSTFPEAHEYGKPEEIPSRNAGIAHDFTGTWRSLSRDRNFPESVPLSSMRMGPGSFSPGSPLQASPELCSAAVTEAKKWLEEKRQGLGLKPEDNGPCTLNTDMFSSHDDSDMGTPVDLAKSYMQSLPPWQSPFLGRQKFDTSPSKYSISSTKVTTKEDYLSSFWTKLEESRRAHIGSSGGSADAPKFWNYGSGSRLFENNTSIFSLGTDEKVGDLTETHNGSEKVAATEPVSGCSLLITPTEDITDGITEPVDLAKDNGNALQEYQVASEILPDKVAEGNDVSSTGITKDTTAHSGDVKAPTSEPHIGETHVNSASESIPNDADPPTQTKMNGSTKKTLVNGLLDQSNGNSGLQSSGNDNPSYTNSSSAMPPSSTELTESTAPATDVDSVKNGPGTKPEQPAKRALRSSNVQQGRKRVLRSTARGRAT

SEQ ID NO: 2655 - DNA, 207 bp, Sorghum bicolor
atggaaggtgcagtcggccaaatggtcgtcccggtcctcggcatcgttgccgcggccgccgtgaccttctacaccgtcagcttcatggagatgcgagacaaatctttcgaggagctcgacgagaagtactcggagctcgacgagtcaggcggacggcagcgccggtctcgccggagggccgagcgcgacaggaagagagcgaaatga

SEQ ID NO: 2656 - protein, 68 aa, Sorghum bicolor
MEGAVGQMVVPVLGIVAAAAVTFYTVSFMEMRDKSFEELDEKYSELDESGGRQRRSRRRAERDRKRAK

SEQ ID NO: 2657 - DNA, 921 bp, Sorghum bicolor; identical to SEQ ID NO: 667

SEQ ID NO: 2658 - protein, 306 aa, Sorghum bicolor; identical to SEQ ID NO: 668

SEQ ID NO: 2659 - DNA, 456 bp, Sorghum bicolor
gggaaaaaaatggaggcgtccgcggaggcgggggcggcggccgccgccgccgcgcgaacgttgaggtgggcgggccgcgcggggcacctgggcggcctcccgcgcgccgcggtgttcgccgccgtgggcgcgttcgccaaggcgtacgcgtcgctgctcaacaccaccacggtccacaacgccgacgcgctcctccgcctcgtctcgtcgcgggctcccgggacgccgctcctcaccgtcagcaaccacatgtccacgttagatgatccgcttatgtggggattcaagggttttccaacttctgatgcaaaacttggaaggtgggtgctgacagcagaagatatatgcttcaagaatgcagtaatgtcctacatgtttcgacttggtaagatctcatataaatatgggttgctgccttttcatagagggctaagaggcattttaaggtatgcctag

SEQ ID NO: 2660 - protein, 151 aa, Sorghum bicolor
GKKMEASAEAGAAAAAAARTLRWAGRAGHLGGLPRAAVFAAVGAFAKAYASLLNTTTVHNADALLRLVSSRAPGTPLLTVSNHMSTLDDPLMWGFKGFPTSDAKLGRWVLTAEDICFKNAVMSYMFRLGKISYKYGLLPFHRGLRGILRYA

SEQ ID NO: 2661 - DNA, 1038 bp, Sorghum bicolor
atgacgcgggagcgcgtctacttcgaggcctccacgctgcgtgagcacggccgcctgtgcccggagcacacccccgaggtgtaccacttggaccgggccatgtcgctgatggcgatgcgttacatcgagcccccgcacatcatcctccgcaagggcttcatcgccggcgtcgagtacccgctgctcgccgaccacatgtccgattacatggccaagacgctcttcttcacctccctcctctataacaacaccacggatcataagaaaggagttgctaagtactctgcgaacgtggagatgtgtaggctcacggagcaatttgtgttctcggatccataccgcgtctcgaaatttaatcggtggacctcaccttatcttgacaaagatgctgaggcagttcgagaggatgaggagctcaagttggaagcggctgaattgaaatcgctgtttatggagagagctcaggctctgattcatggagatctccacactgcttctatcatggtgaccacaggttcaactcaaatcattgattcagagtttgggttctatgggccaatgggttatgacattggagccttccttggaaacctgattttggcatactatgcacagaatgggcatgctgatcaagcgaacgatcgtaaggcttacaagaaatggatcttgaagacaattgaagagtcgtggaatttgttccagaaaaagtttgttgaactatggaataaacacaaagaagggaatggggaggcgtacctgcctgatatatacaacaactcaaagcttttgagcgttgctcaaaagaagtacatgacaaacctatttcatgatagccttgggtttggttcagccaaaatgatcaggcgaatagtcggaatcgctcacgtcgaggatctcgagtcaattaaggatgccagcaggagagcagagtgcgagcgtgctgccctcaattgtgcaaagacgatcctcaagggaagacgccaatttgagaccatcgagcaagtcattgtgcatattcaatcgtttgatcaggactga

SEQ ID NO: 2662 - protein, 345 aa, Sorghum bicolor
MTRERVYFEASTLREHGRLCPEHTPEVYHLDRAMSLMAMRYIEPPHIILRKGFIAGVEYPLLADHMSDYMAKTLFFTSLLYNNTTDHKKGVAKYSANVEMCRLTEQFVFSDPYRVSKFNRWTSPYLDKDAEAVREDEELKLEAAELKSLFMERAQALIHGDLHTASIMVTTGSTQIIDSEFGFYGPMGYDIGAFLGNLILAYYAQNGHADQANDRKAYKKWILKTIEESWNLFQKKFVELWNKHKEGNGEAYLPDIYNNSKLLSVAQKKYMTNLFHDSLGFGSAKMIRRIVGIAHVEDLESIKDASRRAECERAALNCAKTILKGRRQFETIEQVIVHIQSFDQD

SEQ ID NO: 2663 - DNA, 339 bp, Sorghum bicolor
atgaagtttattgctgcctacctgcttgctgtcctcggtgggaacctcagcccctctgctgaggacttggcagccattctggagtcagttggctgtgaagttgacaatgaaaagatggaactcctgttgtcccaactgagcggtaaggacattaccgagctcattgctgcaggcagggagaagtttgcttcagtcccatgtggcggtggcggcgtggctgtcgcggcagctgcgcctgctgctggcggagctgctcctgcagctgaggcgaagaaagaagagaaggtggaagagaaggaagaaagtgatgatgacatgggcttcagcctcttcgattaa

SEQ ID NO: 2664 - protein, 112 aa, Sorghum bicolor
MKFIAAYLLAVLGGNLSPSAEDLAAILESVGCEVDNEKMELLLSQLSGKDITELIAAGREKFASVPCGGGGVAVAAAAPAAGGAAPAAEAKKEEKVEEKEESDDDMGFSLFD

SEQ ID NO: 2665 - DNA, 291 bp, Sorghum bicolor
atggcatcgttatcccgcacagccgccgccgccgccgccgccgtgaggtcggcggtccgctccgcaccccttaccggccgcgtcctcggagcgccactgccttcccttgcctcgacttccgctgcccggtccgcccggatcctccgcaggtcggcggccgcggcgtccgcggggctcgaaacgctattgcctctgcacagcgcggtggcggccgcgcggcttaggtcctgcatcgcggtcgattccacctgctggagctcgctctcgcaaggtttaaacaagcgcatctga

SEQ ID NO: 2666 - protein, 96 aa, Sorghum bicolor
MASLSRTAAAAAAAVRSAVRSAPLTGRVLGAPLPSLASTSAARSARILRRSAAAASAGLETLLPLHSAVAAARLRSCIAVDSTCWSSLSQGLNKRI

SEQ ID NO: 2667 - DNA, 921 bp, Sorghum bicolor
  misc_feature (650)..(749): n is a, c, g, or t
atggcgccgtcccctcccaccccggcggcacccaaaacaatcgccgacttcttcgcgcgccccgccaagcgcctccgggcgggcagtgccgctccggccgcctccctctcctcctccccttcctcgctctcgccggagcagcgccgccgcgccgacaccaacctggcgctcgctcgcgcgcgccgcaacctccgcctcgccgagtccaaagcgcaagcatcggggggcgcaccgaagctggaggagctcctcgtggaggagacgtgggcggaggcgctccacggggagctgcgcaagccatacgcgctcgagctctgccgcttcgtcgcccacgagcggctccacggcccgctgcccgtgtacccgccgccgcacctcgtgttccacgcgctcaacgccaccccgttcgaccgtgtgaaggctgtcatcatcggtcaggatccataccatggccctggtcaggccatggggttgtctttctcagtaccggaggggataaaaataccttctagcctaggtaacatttttaaagagctcgaaaaagacctaggctgcactgtgccatcacatggaaatctggaaagatgggccgtgcagggtgttcttatgctcaatactgtcctaactgtgagtggtcaaaatgcaatttnnnnnnnnnnnnnnnnnnnnnnnnnnnnnnnnnnnnnnnnnnnnnnnnnnnnnnnnnnnnnnnnnnnnnnnnnnnnnnnnnnnnnnnnnnnnnnnnnnnnttctgctcaatctaagacaagattgattgatgaaacaaaacatcacattttgaaatctgctcatccatcaggcctgtctgcaaacaggggtttctttggatgcaggcacttttccaaaacaaaccagatccttgagaagctggggctatctgccatcgattggcagctctaa

SEQ ID NO: 2668 - protein, 306 aa, Sorghum bicolor
  misc_feature (217)..(250): Xaa can be any naturally occurring amino acid
MAPSPPTPAAPKTIADFFARPAKRLRAGSAAPAASLSSSPSSLSPEQRRRADTNLALARARRNLRLAESKAQASGGAPKLEELLVEETWAEALHGELRKPYALELCRFVAHERLHGPLPVYPPPHLVFHALNATPFDRVKAVIIGQDPYHGPGQAMGLSFSVPEGIKIPSSLGNIFKELEKDLGCTVPSHGNLERWAVQGVLMLNTVLTVSGQNAIXXXXXXXXXXXXXXXXXXXXXXXXXXXXXXXXXXSAQSKTRLIDETKHHILKSAHPSGLSANRGFFGCRHFSKTNQILEKLGLSAIDWQL

SEQ ID NO: 2669 - DNA, 759 bp, Sorghum bicolor
atggcgatggcggtggcgcgggtgactagcctcggcctcgcctgcgctccccgacaggcgcagcatcgccgccgccgccatagccttcccccgccgcgcgctttgggtgcggtggaggtgcgggtctgcacgaaccgcacatgcgcgcggcagggcgggcgcgacgtcctggctgcgctcgtgggcctcgcgccgccgccggtcgacgtggcctcctgcggttgcctcgggcgctgcggcgctgggcccaacgtcgcggcgtccgtcgctgggagcgccgcggtgttccgccacgtgggcacggcggcgcgcggcgcgcagctactggaacacctcctcggccccgcggagttcgacgcggccctagggctcaccgcgctggccacgagggagaaggcggaggctgccctcgagaagggaaacgcggatgaagcggaagcccttctgaccgaggttattgggttcaatgcttgtggcggtctgcatttggtgtacaggagcaggtctaaggcgagattggcaatgggggatatctctggtgcacttgaggacgctgaggaagcaataagaatagctcccagatttcctcaggctcacttattgcgaggcgacgcactttttgcaatgggtgaatattctgttgcggaagatgcctatgcacatgccttggatattgatccatctattcgccggtccaagtctttcagggcccgtgtggaaaggctacgagagaagcttgttggtgccaataatccgtag

SEQ ID NO: 2670 - protein, 252 aa, Sorghum bicolor
MAMAVARVTSLGLACAPRQAQHRRRRHSLPPPRALGAVEVRVCTNRTCARQGGRDVLAALVGLAPPPVDVASCGCLGRCGAGPNVAASVAGSAAVFRHVGTAARGAQLLEHLLGPAEFDAALGLTALATREKAEAALEKGNADEAEALLTEVIGFNACGGLHLVYRSRSKARLAMGDISGALEDAEEAIRIAPRFPQAHLLRGDALFAMGEYSVAEDAYAHALDIDPSIRRSKSFRARVERLREKLVGANNP

SEQ ID NO: 2671 - DNA, 207 bp, Sorghum bicolor
atgtttctagaatgcgcaaaccaagagataactgctatattgaagtttcaagagcagggagagcaaggtcaaatgtctctaattgggaagggagggatcagtcccctagtcacgaagaaccgacaacaagcagttcttcgctggctcctacaggccgtccatattcatctagaggaagcaaacaagcttctgaaactccaatcatag

SEQ ID NO: 2672 - protein, 68 aa, Sorghum bicolor
MFLECANQEITAILKFQEQGEQGQMSLIGKGGISPLVTKNRQQAVLRWLLQAVHIHLEEANKLLKLQS

SEQ ID NO: 2673 - DNA, 660 bp, Sorghum bicolor
atggcggggcggatggtgcggagctgcgtgcagacggcgctcaaggcggccaactccgtcgtggggcttgccggcatggccgtcatcctctacgcgctctggatgctccgcgcctggtacagggaggtcgccgaccaccacctccaccaacgcctcccggtcccctggttcatctacgcttttcttggcctggggatctttttgtgcctgttgacttgctctgggcatattgccgctgaaactgcaaatggtcactgcctctcttgttacatgatcatcgtatttgtgcttattatactggaaggcacaatcactatggatgtatgtctgaatagcaactgggaagaggatttcccccctgatccatcaggcaagtttgaggatttcaaggactttgtgaaatcaaattttgagatatgtgaatgggtaggcctctcagtggtggctgctcaggtgttatcaattattctggggatggtactcaggacccttgggcctgaacgtgagactgactatgacagtgatgatgacacaattgtgcctgcaaggctgcctctcctgagaaatcaggcccaacatggtttagactatgctgaacctaatacatctcgtaggagtgattcatggaaattgcggattttagacaaggtcaacaactaa

SEQ ID NO: 2674 - protein, 219 aa, Sorghum bicolor
MAGRMVRSCVQTALKAANSVVGLAGMAVILYALWMLRAWYREVADHHLHQRLPVPWFIYAFLGLGIFLCLLTCSGHIAAETANGHCLSCYMIIVFVLIILEGTITMDVCLNSNWEEDFPPDPSGKFEDFKDFVKSNFEICEWVGLSVVAAQVLSIILGMVLRTLGPERETDYDSDDDTIVPARLPLLRNQAQHGLDYAEPNTSRRSDSWKLRILDKVNN

SEQ ID NO: 2675 - DNA, 1170 bp, Sorghum bicolor
atggcgggcggcgagggctcggccgcggtcgcggaggagggggagatgcggtcgctggcgctcacgccgacgtggtccgtcgccaccgtgctcaccctcctcgtcgccggctcgctcctcatcgagcgctccatccaccgcctcagcaatgtttgctttgttgcacaatttggtcagtctgttgttcgagcagactaccttatcctccgcaagggttttataatgacccacaatcttccgccaacatatgatttccacaattacatgatacgctcaatggaagaggagtttgagaagattgttggagtgaggtttgctggacagttcctatgcagttacagtacattgcctgtttatgcgctggtcactcagatggggtccaaatacaaggcggcgctgatcccgcggaggatcagagagaccatacatgggtgggggaaggcgacgaggaagaagcgtcgtcgccgccgcggcgacgactcgacggcccgcacggagacgagcacggtgtgctcgctcacggacgacgacgaggacgacttcgacgaccaccaccacgggccgtcggacgagaccccgaggcccggggcccggggccgcccgccgtacctgaagatcgagatgcttcgtcagtcgggcagcggccacgacggccccaggcccggcaccccatgcttccaccccgcgcccatgccgacgccgggcggcggccgcggcagcgggcacgccatgctcctgcagcaggcctccgtctccgcgccgtcgtcgccgtcgtaccgcggaggcaacgtgaccaggtcggcgtccatgcccgggttcgccgcgctgaggatgggctccggcacgccgacgcgcatgagccatgaggagcccacctccgtcgcgacgcgagacgaggcgcgcatgcgcacggtgccggcgacgtctccaccgtcgccatgcagggcggcgccgaggaggctgctgggcgttgcgcagccgcagccgtcgcccgtggctctggctgtggtgccggctgctgctgctgctgccgggaagcgcaagccggggcaccaggtccggagggcggtttccaaggtggtggcggcgccatgcaggcgcgggatgagggtcatcggcactccatgcaagaagtgctggtacacgctgcgccgccgcctccgctgctga

SEQ ID NO: 2676 - protein, 389 aa, Sorghum bicolor
MAGGEGSAAVAEEGEMRSLALTPTWSVATVLTLLVAGSLLIERSIHRLSNVCFVAQFGQSVVRADYLILRKGFIMTHNLPPTYDFHNYMIRSMEEEFEKIVGVRFAGQFLCSYSTLPVYALVTQMGSKYKAALIPRRIRETIHGWGKATRKKRRRRRGDDSTARTETSTVCSLTDDDEDDFDDHHHGPSDETPRPGARGRPPYLKIEMLRQSGSGHDGPRPGTPCFHPAPMPTPGGGRGSGHAMLLQQASVSAPSSPSYRGGNVTRSASMPGFAALRMGSGTPTRMSHEEPTSVATRDEARMRTVPATSPPSPCRAAPRRLLGVAQPQPSPVALAVVPAAAAAAGKRKPGHQVRRAVSKVVAAPCRRGMRVIGTPCKKCWYTLRRRLRC

SEQ ID NO: 2677 - DNA, 1152 bp, Sorghum bicolor
atgtggcgtcttctgggctgcgccaaggttctgacctccagtgatgtgtggttccttggtaaatgctacaaggtgtcacctgaggaagaggagtctggcgacggccatgctgcgtttctggaagatttctcttccaagatatggatcacctaccggaaaggctttgatgcaatatctgattccaagctgactagtgatgtgaactggggatgcatggttagaagcagtcagatgctggttgctcaggcactgatttttcaccatcttggaagatcttggagaaagcccccggagaagccatacaacccagattatataggggtcttacacctatttggtgattctgaagcttgtgctttctctattcacaatttacttcaagctggaaggaattatggtctggctgctggatcatgggtgggtccatatgctatgtgccgggcatggcagacccttatccgcacaaatagagagcaagctggtgctgtcaatgggaaggaaaatttccctatgattctttatgtggtttcgggtgatgaagatggtgaaagaggtggagctccagttgtttgcatcgatgttgctgctcagctttgctctgatttcaacaaagaacaatctacatggtcacctattcttttgttagttcctctggttcttggcctcgacaaaattaatccaaggtacatcccattactaaaggagacgtttacgttcccacaaagcttgggcattttaggtggaaaacctgggacgtcaacatacattgctggcgtacaggatgatagggccctctacctagatccccacgacgttcagatggcagttgacattgcaccggataacttggaggcagacacttcgtcgtaccactgcagtgttgtccgagatttggctctagaacaaatagatccctccctggctattggtttttactgtcgtgacaaagacgactttgatgatttctgttctcgggcctctgagttggcagaaaaggccaatggagcgccactctttactgttgtgcagtcaatcgagccattgaagcaaatgtataaacaagatgatgggctgggctgttctggcagtagcatgggcaacgacgatgaccttgatggctctggagaagcagaggagtggcagatcctctaa

SEQ ID NO: 2678 - protein, 383 aa, Sorghum bicolor
MWRLLGCAKVLTSSDVWFLGKCYKVSPEEEESGDGHAAFLEDFSSKIWITYRKGFDAISDSKLTSDVNWGCMVRSSQMLVAQALIFHHLGRSWRKPPEKPYNPDYIGVLHLFGDSEACAFSIHNLLQAGRNYGLAAGSWVGPYAMCRAWQTLIRTNREQAGAVNGKENFPMILYVVSGDEDGERGGAPVVCIDVAAQLCSDFNKEQSTWSPILLLVPLVLGLDKINPRYIPLLKETFTFPQSLGILGGKPGTSTYIAGVQDDRALYLDPHDVQMAVDIAPDNLEADTSSYHCSVVRDLALEQIDPSLAIGFYCRDKDDFDDFCSRASELAEKANGAPLFTVVQSIEPLKQMYKQDDGLGCSGSSMGNDDDLDGSGEAEEWQIL

SEQ ID NO: 2679 - DNA, 750 bp, Sorghum bicolor
atggccgccgcggggaggaatgcgggcgtcctcgcgctcttcgatgtcgacggcactctcacagcgccgcgcaaggtggtgacgccagagatgctagagttcatgaagcagctgcgccagcatgtgactgtgggcgtggttggcggatccgatcttgtgaagattactgagcagctcggcaatacagttattactgattatgattacgtcttctccgaaaacggcctggttgcacacaaaaatggccaactaattggaactcaaagtttgaaatcatttgtcggagaagacaagctaaaggaatttattaacttcactcttcattacattgctgacttggatatcccaattaaaaggggtacgttcatagagttccgaagtggaatgattaatgtatctcctataggaagaaactgtagccaagaagaacgtgatgaatttgagaagtatgataaggtgcataacattcgacctaaaatggtgtcagtgcttcgtgaaaagtttgcacacttgaacctgacattttctattggagggcagattagttttgatgtatttccccaaggttgggacaaaacttactgcttgagatatcttgaggaatttcaagaaatccatttctttggggataagacatacaagggtggcaatgactatgagatatttgaatctgaaagaacagttggccatacagttaccagccccaatgacacagctcagcaatgcagatctctcttcatgtcgaagtga

SEQ ID NO: 2680 - protein, 249 aa, Sorghum bicolor
MAAAGRNAGVLALFDVDGTLTAPRKVVTPEMLEFMKQLRQHVTVGVVGGSDLVKITEQLGNTVITDYDYVFSENGLVAHKNGQLIGTQSLKSFVGEDKLKEFINFTLHYIADLDIPIKRGTFIEFRSGMINVSPIGRNCSQEERDEFEKYDKVHNIRPKMVSVLREKFAHLNLTFSIGGQISFDVFPQGWDKTYCLRYLEEFQEIHFFGDKTYKGGNDYEIFESERTVGHTVTSPNDTAQQCRSLFMSK

SEQ ID NO: 2681 - DNA, 1068 bp, Sorghum bicolor
atggccaccggcggcggcgccagcgagacggccgtcggcgccggggaggagaacgcgagcgcttccaggatccccacccgcaggtttttcgtggcgctgcacgtgggcgccggcttccacgcgccggcgaacgagaaggcgtaccgcagggccatgaagcgcgcctgcctcgcagctgcggccattcttcgcgagggcagtggcacaagcctggatgctgttgcagctggcattcaagttttggaggatgatcctgtcacaaatgctggtcggggttcaaatttgactgagagtggtcatgtggaatgtgatgcaagcatcatggatggaagtactggttcttttggagctgttggagctattcgagatgtaaagaatccaatcaaagtcgctttgcacttggcgaaggaacaaatggcaggatcgtcattgcttggtcggataccccccatgtttctggttggtgaaggagcatatcaatgggcaaaatctaaaggaatggacctagttgaatctgcaccaggggctaataattggttggtgactgagaatgcaagagcgcagtgggtgaagtacacatcattgcttgttaataccaagaaattattagagcatgacactggttctgcttcagaacattcagtgcagttggaagcaccaggaactgaatctgagaatatttctgatgtaaagaagatattgacagagtcattcatggaagacaatacagattgcgtaatggatactgttggtgttatttgtgtagatagctacggaaatgtagcatcaggtgcatctagtggtggtattgccctgaagatgtctcatgacacaggggctgggttgttgctagttcaggctgatgttcgaaagggaggggatttgtctgaactggaagctgctgagctggttgctgcctattcctcgccatcatttggtgttggttatttcggaagcaatatgaataatcctaaggttctgatgcttaaaacaccagaaggtccatccaaaacggtcaaccagttcgcgacctgcgtcaagtttgatagagaatcatctgaacaatga

SEQ ID NO: 2682 - protein, 355 aa, Sorghum bicolor
MATGGGASETAVGAGEENASASRIPTRRFFVALHVGAGFHAPANEKAYRRAMKRACLAAAAILREGSGTSLDAVAAGIQVLEDDPVTNAGRGSNLTESGHVECDASIMDGSTGSFGAVGAIRDVKNPIKVALHLAKEQMAGSSLLGRIPPMFLVGEGAYQWAKSKGMDLVESAPGANNWLVTENARAQWVKYTSLLVNTKKLLEHDTGSASEHSVQLEAPGTESENISDVKKILTESFMEDNTDCVMDTVGVICVDSYGNVASGASSGGIALKMSHDTGAGLLLVQADVRKGGDLSELEAAELVAAYSSPSFGVGYFGSNMNNPKVLMLKTPEGPSKTVNQFATCVKFDRESSEQ

SEQ ID NO: 2683 - DNA, 942 bp, Sorghum bicolor
atggagcaaggccaagggactccgcctgcgacggaacgcgacatcggcttcgccgagcgggccgtggcggcggccggcgccgccgtcatatccgccgtcctcgttaaccccctcgacgtcgccaagacgaggttgcaagcacaagctgctggagtgatttacaacccggaaggaatttttagactatggagaggtacaggtgcaaacctggcattagctgtaccaatggttggaatatatatgccttgttacgatttattgcgcaatcggattgaagaatactcggaccgcaattgtcccaagcttagaccatatgctcctcttatttctggctctattgcacgatcattggcatgcatagcttgttcccctattgagttagcaagaacacgtatgctggccttcaaagcatcaaatgttggagggaagccccctggaatgtggacgaccttgataggtgtgctttcatcgagacaaaacatcaggagccctgaaaacgttcgaggataccacctcctatggactggtctgggagcacaactagcacgcgatgccccctactcagctatatgttggacagttcttgaaccaattagaagacatgtgatacaactattcggtgatcaaagcaatgcagcagttatattgggggcaaacttttctgcgggcttcattgctggggttatctctgctggtgctacctgccctcttgatgttgccaagacacgcagacaaatagagagggatcctgaaagggtattaagcatgaacacaaggcgcatattgcttgaggtttggaggaaggaaggtctggaaggtctgttcagaggtgcaggccctcgaatggcgcgcgcaggcccgtcggtgggcatcgtcgtctcctcctatgaagtcatgaagcacatcatgcacaggaaacatgcagtgcagacctatgattaa

SEQ ID NO: 2684 - protein, 313 aa, Sorghum bicolor
MEQGQGTPPATERDIGFAERAVAAAGAAVISAVLVNPLDVAKTRLQAQAAGVIYNPEGIFRLWRGTGANLALAVPMVGIYMPCYDLLRNRIEEYSDRNCPKLRPYAPLISGSIARSLACIACSPIELARTRMLAFKASNVGGKPPGMWTTLIGVLSSRQNIRSPENVRGYHLLWTGLGAQLARDAPYSAICWTVLEPIRRHVIQLFGDQSNAAVILGANFSAGFIAGVISAGATCPLDVAKTRRQIERDPERVLSMNTRRILLEVWRKEGLEGLFRGAGPRMARAGPSVGIVVSSYEVMKHIMHRKHAVQTYD

SEQ ID NO: 2685 - DNA, 1224 bp, Sorghum bicolor
atggcggcggctctgcaagccacgccgctcaaaaccctagccatctcccgccggcgcgtcggcgtcgcgggggtgcggcagcggccgatggtggcgagcttccggtgctccgcggcggcgcggagctacaacatcacgctcctccccggggacggcatcggcccggaggtggtcgccgtcgccaaggacgtgctctccctcgccggcgccctcgaaggcgtcgagctccggttccaggagaagctggtgggcggctccgcgctggacgccaccggcgtgcctctccccgacgagacgctcgacgcggccaagggttccgacgccatcctcctcggtgccattggaggctataagtgggataacaatgagaagcacctcaagcctgagaccggcctgctgcagctccgtgctggactcggggtttttgccaatctgcgaccagctgcagtgttgccgcagttggtagacgcatccactctgaagaaagaggtagctgaaggtgttgacatcatggttgtcagagagcttactggaggcatctacttcggcaaacccaggggttttggaacaaatgacaagggagaggatattggcttcaacacagaagtttattcagcttctgagattgatcgtattgcacgtgttgcatttgaggttgctcgcaagagaagagggaaactatgctcagttgacaaagcaaatgtgctggaggcatccatgctttggaggaaaagggtgactgcactagcttctgaattccctgacattgagctctcacacatgtatgttgataatgctgcgatgcagcttgttaggaatcctaagcagtttgacacaattgtcacaaacaatatttttggtgacatattatctgatgaagcatcaatgattacgggaagcattggaatgcttccatctgccagtgttggtgaatcgggacctggtctttttgaacctattcatggctctgcccctgatattgctggacaggacaaggccaatccattagctacaattcttagtgcagcgatgctattgcgatatggcctaggagaagaaaatgctgcaaagagaattgaagctgcagttacagcaacactgaaccatgggttccgaaccggggacatatattctcctggaacaacattggttggatgcaagcagatgggggaagaagtcttgaagacagttgagtcgctaaaggaagtggctgctgtaaactga

SEQ ID NO: 2686 - protein, 407 aa, Sorghum bicolor
MAAALQATPLKTLAISRRRVGVAGVRQRPMVASFRCSAAARSYNITLLPGDGIGPEVVAVAKDVLSLAGALEGVELRFQEKLVGGSALDATGVPLPDETLDAAKGSDAILLGAIGGYKWDNNEKHLKPETGLLQLRAGLGVFANLRPAAVLPQLVDASTLKKEVAEGVDIMVVRELTGGIYFGKPRGFGTNDKGEDIGFNTEVYSASEIDRIARVAFEVARKRRGKLCSVDKANVLEASMLWRKRVTALASEFPDIELSHMYVDNAAMQLVRNPKQFDTIVTNNIFGDILSDEASMITGSIGMLPSASVGESGPGLFEPIHGSAPDIAGQDKANPLATILSAAMLLRYGLGEENAAKRIEAAVTATLNHGFRTGDIYSPGTTLVGCKQMGEEVLKTVESLKEVAAVN

SEQ ID NO: 2687 - DNA, 615 bp, Sorghum bicolor
atggaccccaccggcggcggcggcggcggcggcgacaccattcccctcctcctgacatccaacaagcagcagcaggaggaggactctctcgcgggcgtctccgactaccttgggcggcccgtgcagcgcggaagctccgggggatggagatccgcgctcttcgtcgtgggcgttgagatcgccgggagcttcgcctacttcggcatctcggcgaacctgatcacgtacctgacgggcccgttggggcagtcgaacgcgtccgccgcggcctccgtcaacgcctggtcgggcacggcctgcctcatgcccctgctcggcgccttcctcgccgacgcctacctgggccgataccgatccgtcatcatcgcctgcaccctctacgtcctgatccaacgactccaaagcaattttttagggaatgctggcggcgggagcgctcagcttgaggcgggagtttccctcgcgcgctggccgtcccacgcgccgcttcactttcctggccgcgcggtgcgccgtcggtcctgcggggcgcgcggtccgcgcccgcgctgcctcagctgcctggccgcgcgacgcggcggctgtctcgcgcgccgcctcgtctgctggccgtga

SEQ ID NO: 2688 - protein, 204 aa, Sorghum bicolor
MDPTGGGGGGGDTIPLLLTSNKQQQEEDSLAGVSDYLGRPVQRGSSGGWRSALFVVGVEIAGSFAYFGISANLITYLTGPLGQSNASAAASVNAWSGTACLMPLLGAFLADAYLGRYRSVIIACTLYVLIQRLQSNFLGNAGGGSAQLEAGVSLARWPSHAPLHFPGRAVRRRSCGARGPRPRCLSCLAARRGGCLARRLVCWP

SEQ ID NO: 2689 - DNA, 1041 bp, Sorghum bicolor
atggaggacggcggcaaggcgccggccagcctgggcaccctgcgcgcggtgctcgccatcctccagtggtggggcttcaacgtcaccgtcatcatcatgaacaagtggatcttccagaaactggatttcaagtttcctctcaccgtgtcctgtgtccacttcatctgctcttcaattggagcttacattgcaatccatgtgcttaaggcgaaaccgctgattcaagttgaaccggaggaccgctggaagcggatatttccaatgtcgttcgtcttctgcataaacattgtgctgggaaatgtgagcctgcgctacattccagtctccttcatgcagacaatcaaatctttcactcctgcaaccacagttattctgcagtggctagtctggaataagcatttcgagtggcgcatatgggcttcgctcgtccccatagttgggggaatactcctgacttcggtgacagagcttagcttcaacatttttggtttttgtgctgccatggttggctgcctggctacatctacaaagaccatcttggcagagtccctgctccatggatacaaatttgacagcattaacacggtgtactacatggcaccctttgccaccatgatactggctctaccagcaatgttgcttgaaggaggtggtgtaatcaactggttctacacacatgattccatcgtttctgcgttgattatcatcctaggttcaggggtgcttgcgttttgccttaacttctccatcttctatgtcatccattcaacgacagcagtgactttcaacgttgctggcaaccttaaagttgcggtggctgtgttagtgtcatggttgatcttccggaatccaatctctgcaatgaatgcaattggatgtggaatcaccctggttggttgcactttctatggctacgtgaggcatctgatctcacaacggcaggctgcagccccagggagtccaggaacagcgcctgcgaacctttcaagaaatcagatggaaatgcttccccttgtggacaacaagcaagaaaaggtttag

SEQ ID NO: 2690 - protein, 346 aa, Sorghum bicolor
MEDGGKAPASLGTLRAVLAILQWWGFNVTVIIMNKWIFQKLDFKFPLTVSCVHFICSSIGAYIAIHVLKAKPLIQVEPEDRWKRIFPMSFVFCINIVLGNVSLRYIPVSFMQTIKSFTPATTVILQWLVWNKHFEWRIWASLVPIVGGILLTSVTELSFNIFGFCAAMVGCLATSTKTILAESLLHGYKFDSINTVYYMAPFATMILALPAMLLEGGGVINWFYTHDSIVSALIIILGSGVLAFCLNFSIFYVIHSTTAVTFNVAGNLKVAVAVLVSWLIFRNPISAMNAIGCGITLVGCTFYGYVRHLISQRQAAAPGSPGTAPANLSRNQMEMLPLVDNKQEKV

SEQ ID NO: 2691 - DNA, 939 bp, Sorghum bicolor
atggcggcggcctccgctcccgtgcccccggtcttgtgcaagcggtggcagcagctagtgcttgtccacaccaccaagccccccctgcccctgcgcctcacgcgccacgccgtctccgtccgggccgcgccgccccgtcagcagcagcagcagcaccgcgcccgcccacggccacctcccaggaataagccccccggacccgcgcgccgtcctcccaggatccctcgggaccaagatgattatgaatacgacgacggcgaccgggaggaggggagattctctgggggtacccgggccgccgccatgcccaagccaccggccggcttcgtgctggatgaccagggcaggtgcatcgccgcagcatccaagcgcatcgtcaccatcatcgacgacaccagcaaccgccccttggagtgcattatccgaagagtattcaggagctcgcagggccacgactgcttgcttctctgccccgttgacatgcctgtgcaggtcctcaagagcacaaatttcagtggatgggtagctgtccatgacgaccaactcaagcaaatcattccatctgttgcctatgcccttgccagagtgcatatgcactttgtcgaaagcggattctgttatacagcaaggggtggcttctgctttcctgaagaggccattcaagagtttcatgattctggtgatggcggtgacggtgtacctttcgaaggtgtagagatttgctgcttcaatttggatggtgcacactatatgatttatacaccagttgatcctctcctgttcgtcgcagtcaagcataaggatggtgtcctacgcattgctgaggatgatctaatggaagaccctggagttctggatgcggtagatgaagagacagaatttacagctctagtggaggaggaggaggcccttcttgaaacagtacttggtgaaaggtga

SEQ ID NO: 2692 - protein, 312 aa, Sorghum bicolor
MAAASAPVPPVLCKRWQQLVLVHTTKPPLPLRLTRHAVSVRAAPPRQQQQQHRARPRPPPRNKPPGPARRPPRIPRDQDDYEYDDGDREEGRFSGGTRAAAMPKPPAGFVLDDQGRCIAAASKRIVTIIDDTSNRPLECIIRRVFRSSQGHDCLLLCPVDMPVQVLKSTNFSGWVAVHDDQLKQIIPSVAYALARVHMHFVESGFCYTARGGFCFPEEAIQEFHDSGDGGDGVPFEGVEICCFNLDGAHYMIYTPVDPLLFVAVKHKDGVLRIAEDDLMEDPGVLDAVDEETEFTALVEEEEALLETVLGER

SEQ ID NO: 2693 - DNA, 345 bp, Sorghum bicolor
atggcttcttccttcggcgaggcccccgtcggtgacgccggcagcggcgagaagatcttccgcaccaagtgcgcgcagtgccatacggtggagcgaggcggcgcgcacaagcaggggcccaacctgcacggcctcttcggccgccagtccggcaccaccctcggctacgcctactccacggccaataagaacatggccgtcgtctgggaggagaccaccctgtacgactacctcctcaaccccaagaagtacatcccgggcacaaagatggtcttcccggggctcaagaagcccaaggagcgcaccgatctcatcgcctacctcaaggaatccacggcggcttaa

SEQ ID NO: 2694 - protein, 114 aa, Sorghum bicolor
MASSFGEAPVGDAGSGEKIFRTKCAQCHTVERGGAHKQGPNLHGLFGRQSGTTLGYAYSTANKNMAVVWEETTLYDYLLNPKKYIPGTKMVFPGLKKPKERTDLIAYLKESTAA

SEQ ID NO: 2695 - DNA, 666 bp, Sorghum bicolor
atggctggaggcaagtccggcggcaacgccgcgcgcagcaggaagcgcgtcgaggccaccgtcctcaagcgctccagggacggcagcgcattcaccagatgcgaggcctgcaacaaggatgtccccgtcgtcctcatcgacatgcacagctgcagcctcgacaagcacatcaggatgatgctcgaggcgcaggtcgtcgagaagaccgtcgaggtcgccgccaagcccgccgaacgcaacaagtcctccgccaagggacacggaggcggcggcaacaaggatgccaagcgcaagcgctcgcccacagccttcttcctcttcatggacgacttcaggaaggagttcaaggccgcccatcctgacaacaagagtgtcgccaccgttgcaaaggaaggaggggagaagtggaagtccatgacagacgaggagaagaagccttacgttgaaaaggccgcggagctcaaggctcaagccgagaatggcgagggcagtggtgagaacaatgttgccaagaagaaagccaaggcagatgacaaggatggggagcaggaggtggatcagcctgcaaagaagcgcatcaggcgcaaggctcttgacgaggacgaggatgacgctggcgaccaggaagatgaggatgagcagaacgagttggatgatgacatgtag

SEQ ID NO: 2696 - protein, 221 aa, Sorghum bicolor
MAGGKSGGNAARSRKRVEATVLKRSRDGSAFTRCEACNKDVPVVLIDMHSCSLDKHIRMMLEAQVVEKTVEVAAKPAERNKSSAKGHGGGGNKDAKRKRSPTAFFLFMDDFRKEFKAAHPDNKSVATVAKEGGEKWKSMTDEEKKPYVEKAAELKAQAENGEGSGENNVAKKKAKADDKDGEQEVDQPAKKRIRRKALDEDEDDAGDQEDEDEQNELDDDM

SEQ ID NO: 2697 - DNA, 1503 bp, Sorghum bicolor
atggcatgtccaaggggaaggacatcattgcccctttgtttctttctgatgatttgcctcatggctcagctgggagcttccaatgttgtactcatggcgaacaacactaccctgtcgttcgatgatgttgaggcaacttttactccagcagtgaaaggttcaggtgtaaatggtgtcctttatgctgtggaacctatggatgcatgcagtccattgagaacaaaagcgattgaaggctctgcctcaccatttgcattggttataagaggtggttgccaattcgatgacaaagttagaaatgcacagaatgctggattcaaggctgctgtagtgtatgataatgaagacaacggcatccttgtttcaatggctggaagctcgtctggagtccacatttatgcagtgttcgtctctaaggcatcaggcgaggaattgaagaaatattcaagccaaactgatgcagagttgtggataataccaacatatgagaactcagcttggtcaatcatggcaatttcattcatatcactgcttgctatgtctgctatcctagctgcttgtttctttgtgaggagacaccagataagacgggacagagctcgacttccccaagttcgggagttccacggaatgagcagtcaattagttaaagcaatgccaagccttattttcacaaaagtgcaagaagacaactgtacatcagcaacatgcgccatttgcttagaagactacagtgttggagaaaagctaagagtgctaccatgtcgacacaagttccatgcagcttgtgtggacctatggctcacctcctggagaacattctgccctgtatgcaagcgggacgcaaatgctggaacatcaaaccttcctgtatcagagtctacccctttgctttcatcatctgccattcccttaccagaatcaactgctttggcttccttccggtctacagtagcagcatctccccccaggccaatcagccggcatccttcatcacagtccatatcccgcaattactccatttcgggttccagtatccctcgcacccctaaccctaggttttatgcaaactcatctcctttctgcacccttgcaaatatgtcatcctcatggtctcgcacttcgcaccttgcatctgctcactctttgtgcggtggccacttgtccccaccaatcgacatcaggaatacctcacaacacatctcccgttcggcctatggatctcccagtcgttacataggctcatcacacatgtcccatggatctccgagttactaccttggatcttcagggcagcggattccttacctgaggcactgcacgttgtcaggcccgagcctgttcaccatggtgccccagtcaccgcaacagaaccagtcgcagcacggtggagactcggaaacaaatctgtcagctgctgcatcaactcagtcattccgtcagctttacctgcagcattgtcctgattctgacacgtcatctcagtcgcttccggggtgctga

SEQ ID NO: 2698 - protein, 500 aa, Sorghum bicolor
MACPRGRTSLPLCFFLMICLMAQLGASNVVLMANNTTLSFDDVEATFTPAVKGSGVNGVLYAVEPMDACSPLRTKAIEGSASPFALVIRGGCQFDDKVRNAQNAGFKAAVVYDNEDNGILVSMAGSSSGVHIYAVFVSKASGEELKKYSSQTDAELWIIPTYENSAWSIMAISFISLLAMSAILAACFFVRRHQIRRDRARLPQVREFHGMSSQLVKAMPSLIFTKVQEDNCTSATCAICLEDYSVGEKLRVLPCRHKFHAACVDLWLTSWRTFCPVCKRDANAGTSNLPVSESTPLLSSSAIPLPESTALASFRSTVAASPPRPISRHPSSQSISRNYSISGSSIPRTPNPRFYANSSPFCTLANMSSSWSRTSHLASAHSLCGGHLSPPIDIRNTSQHISRSAYGSPSRYIGSSHMSHGSPSYYLGSSGQRIPYLRHCTLSGPSLFTMVPQSPQQNQSQHGGDSETNLSAAASTQSFRQLYLQHCPDSDTSSQSLPGC

SEQ ID NO: 2699 - DNA, 729 bp, Sorghum bicolor
atggagaggaaacggaaggagatggagaagggcaagtctgagctgagagtggccatggaggagcttcgtttgtgcagctcaggagatggggaggaggatcaggtgcaggtgcagcaggtgaaagtgcaggagcagcccaagtcatccaccatggacctcctctctgtctccaagcagctcatccatgtccttgacttaactgacaaactctaccttctgttcgatgaagatgagattggaccaacgttgctagtcctgaggcaggacattcagcaaaatgttcagagattacaagatctgcatgaaagagactcttccaaatatgctagcttgacgacgatagttactgaggaaattgagcaagggacagcaaagaagaccaaaagctgcaccagagctatcatctggctgtctaggtcgataaatttctcaaaatatttactggagaagctgctaaaaacacctgagtcaagcctggaagagattgtcgaagaagcctatggaaatactctgaagccatggcatggctggatctcatcagctgcttacaaggtagcactgaagctcatcccagaaagagaattcttcatagcgctgctgatgggtaattgtcaagactttgaggatcttgcagaagatgccaagacgttggcctatgctgtccagcccctgttagaggagatcgatgcaatttcggtcagggcttcgaacttcacatctgtttgctaa

SEQ ID NO: 2700 - protein, 242 aa, Sorghum bicolor
MERKRKEMEKGKSELRVAMEELRLCSSGDGEEDQVQVQQVKVQEQPKSSTMDLLSVSKQLIHVLDLTDKLYLLFDEDEIGPTLLVLRQDIQQNVQRLQDLHERDSSKYASLTTIVTEEIEQGTAKKTKSCTRAIIWLSRSINFSKYLLEKLLKTPESSLEEIVEEAYGNTLKPWHGWISSAAYKVALKLIPEREFFIALLMGNCQDFEDLAEDAKTLAYAVQPLLEEIDAISVRASNFTSVC

SEQ ID NO: 2701 - DNA, 789 bp, Sorghum bicolor
atggagctctgcttggccaggacgacgacggccgcgtgccggagggcgccgacaggcattccgaagaagcggcgcgccggcgggagcaccgtgcggtgcgtggcgacggcgcccatgggggagaagacagagtaccgtgacggcccgctagagcgcgcgttcatgggtctgttcgcgcggaagatggagaagtacgcgaccaagaagaagcagccgccgtcgccggagccggaggagaagaagaaggcggtgtgggattgggactacgagagcttcgtggacgtgtcgcggcgcgtgatggtgggccgcacccacgcgcagcagcaggaggcggtgcgggaggtgctcctctccatgctcccgcccggcgcgcccgagcagttccggaagctgttcccgcccacgcgctgggcctgcgagttcaacgccgcgctcaccgtccctttcttccgctggctcgtcggcccctccgaggtcatcgaggtggaggtcgacggcgtgaagcagcgcagcggggtgctcatcaagaaatgcaggtacctcgagaacagcggctgcgttgggatgtgcgtcaacatgtgcaagatccccacgcaggacttcttcaccaacgagtttggactcccactcaccatgaatccaaattttgaagacatgagctgtgagatgatatacggtcaggtgccaccacccttggaagaggatccagtgtcaaagcaaccatgctaccctaacctctgttccatgtcgacgccgtctgcgccggtctgtcccaagcttcaggcgtag

SEQ ID NO: 2702 - protein, 262 aa, Sorghum bicolor
MELCLARTTTAACRRAPTGIPKKRRAGGSTVRCVATAPMGEKTEYRDGPLERAFMGLFARKMEKYATKKKQPPSPEPEEKKKAVWDWDYESFVDVSRRVMVGRTHAQQQEAVREVLLSMLPPGAPEQFRKLFPPTRWACEFNAALTVPFFRWLVGPSEVIEVEVDGVKQRSGVLIKKCRYLENSGCVGMCVNMCKIPTQDFFTNEFGLPLTMNPNFEDMSCEMIYGQVPPPLEEDPVSKQPCYPNLCSMSTPSAPVCPKLQA

SEQ ID NO: 2703 - DNA, 7539 bp, Sorghum bicolor
atgaagacagtcaatgttacttccaattatcggaaggatgaatcagattcacatgtgctatgcttatctgggaacttaacacgatgtcctgaaaattctgttgacacttgcttgaatctgcattatagaactcacaagcatgatgatcaaatgcatcatgtataccagctgaatttaagtgatgttgatctgcatgttaacccatctgttattggtcagatacggatgtttttgagaaaacttgattcaggaccttcagtcagcagtgatgttgaatccacaatgattggtcagagttccatgaaatctggggcaactaatggcatacttcccaagttttccttgtcaaatttatgtggtgcagatggcacagtattcgcaggagtttctgttgaccagtttccctttttagttgatgttgaagcacaagaaagtttatactcaaagaatgagcaatatcatgacacttcaggtttgaatggttatcatgcatcagatcttgtcagcaatacacaaggtaaaacccagcgttcaaattgttcatccgcctcatcaaatcatgccaagaatgccagcagaactgttttggatctatcacttatttctgttagagtacattttcctgaatcatgtggtactttagcaacaataaccattcctgaatctatatcaacactcacttattttgatgcaagctcatgggacttgctattgtctgctaacaatttgactcttgcttcaccatggactccaccaaatatccatgagctgctctggggcacatcttcacatcgcaattctggtgtgctcaacgttcgagttaaaaaggacttacctgcactgtcaaccgaagtatgtgttggaattcaaaatgtttgttgtgtattgtcatccaagttactggctatgtttgttggattttttttgttggatgattggagtcctattgcagaacaggaattccttgtggcaggtaataatcttgagtgcttgggagaatcacatgactgcgtaacatacaaattcgagatcagtgattgtgttgtaatttttcctgtggaagagcaagatttcttttgtctaaagctggaggttccacattttttctgtgagttcattgcgaccggaagctctgtagaatttgcaaagcgtatccccaaagaactcttcagttcggagtgcatagtttccagaagagttgatatcatctgcatacatgcaagaaatgcatccatatcacttctaattgtaagcgaccaaacagattttatgctgaagcttgatgagaacgttcctaagagaatccattctcttattgaaaagcttgatgctggcatatggattcaggttccttgcaaagatataccatactcccagcagactactttacccacctcaattatgagcaaaatatcacgatgcaacttgattgctgaagatctatatttcataaatgggatggagacagttattggtcttgttgaccagttgatttcgatcggcaatgaaagtaaaatgtacaaaggcaatgccttgcagtttttagatcatagaagtttctacgagggcaaccctgaccctagtgagtgtaccaatctcactatttcgatcaaggatctgatgattctcttgggtcagtctaaaaataaaggtttggcactggagaagattgccactgcaaacatggagtttgatgtttctgctgtactaggtgaaaaaccagagcgcatgaactttgatgttgtttctctaatgctgcagtcacccggtggttacactctcatctccattgtttccgatgggccattatctcctgttttcgtcaagtttacaaagcaccatgctggacaagatgagatattactaaatgtaccccttttcgaggtctggttatatttacaggattggaacacgattatcaatcattcccagtcatatgtaaagacagaagtaaacagtatgcctgtggagcatgcagctgctttgtctcagtttccagaaacagcgtcatcaccacttattgcatcagaatttggtttgccagatgacttcaacttagttgtaacatgtgaaactattgctggtgtactccatatacctatctgggggaaagaagaaaatcacacaagcaatcacatgggtgtgactccttttccaacagaagtgggcactcatcatgaggcagatgatattcaatattgtgaaccaaaaggttgcaagtttgtaaccttaacttttgagagtaaacattttgtggtgatgtcaggtgatagctgcatgaattttaaatgtgatctagagagattgaaggtaatgctggaaatgattcaagagaataagggtacctctgttccatttgtgcatatatctaaggttaaatcttctggttatgttcatcaaacagaaaggaatttggaacatctttctgttgatctacaagctgaatacatggatgttagtttttcacaccagatatttaacttctggcataatatggaactcaaatttcctgctgcatcatctgcatcctctttttattccgtcgcattcaaggcaggattgaggaaaggatctcttctgctaaatgatggaaggtggagcagtcatggacctgtaatagagaccttattgaagaatttaactgtgcagtttagtcaaatgaaggataggacagaagtttctgcttttgttgaccttttagtaaattacaataacattgacaaggttatgtgggaaccttttgtagaaccctcaagatttcagttaagtatgctaagaaaatgtggtgatagtggactggatatatcacccagtactgatgtgtgtttaagttcaagcaagcagcttaatctgaatatatcagaacccttaattgaggctatcctcagacttagccagatgattacagattctcttgatccaagtaatggtagtggtcttcgggaagatcctggaatcttgagattaagccatgatgatgttcgtaccagaagatacgcaccatacattctctcgaatgacacatcattgccctttaggttcaaggtgtaccgtggtgctgttaattcagatgatattgacagtttctctgtgatagatgaaaactccgtgccggcagggtatgctgtcccaatttacgtcgaagaaactcttgatgaatttttcttccaacacagagaagcacgatcgtctgaccatctcatcgagaaacgaatgagtgctgtatcacactatatgatctccattgagtttgatggaacgtcaggcccttcaaaggcaatgtcaatggaccttgtgggcatttacttctttgaagtaaatttctcttcaagtagaaagccaattctaggggaagaaagtttaggagcattttcgtctaatggaaaaggcaacgatgggttaattgtgcctgtggtgctcgatgtttccttacagaactacagcaagcatatacgagtttactcaacggtaatactatacaatgcaacatcaatgcccctcgaattgaggttcgatataccatttggtcttacatcaaaggtaatagggcccattcctccaaacaaagagattccactgccagttcatttgtctgaagctggccagattaggtggcatcctgttggcagaacatacttgtggagtgaaacccgctccttgtcaagtttgctttcacgtgaaagcagagttgggttcatgaaatcatctgtttgctatccttctcaccctagtaatgatccatttcgttgttgtgtatctgttgaagaatacaatgtcccttcatccgttagtatccagaaaggcgagttgtgcagtgaaagattgaatgcacaggtttctggaagttctactccaaatacttttaagcaaaatttgacaaggacacattttatacggcatgtcaagcttaatactccgcttctcataaagaactatctccctgtttgcatttccttggcaatagataatggtgggtctgcacgtgtagtttcgctaaaggaggtagggtctgcctctattttttttgttgatccctccaatgatcttggaattacaattgatattcaagattataggtccttgaacataaagtttccccgggctgaatcattctctactgcagccaagtcaaatggcttcaaattctccataacagagtcaattactttctactcaaatttgtcgaattctcctcttaatgttatgctggaaaaatcaatggatgctcgttctggcgcaagagagttgtatctttctgttccattcttgttgtacaattgcacagatctattgcttactgtcactgaaagcagctctgagaggagtgggtccacccttgtgattcctcctagttttgagttggatggacatgcaagacatttgcttgaaaaaggtggtctttctcttgttgatccatctgtacagtgctttacaggcaaaatgccccagttagatttgatggatggacgctgctcttcttcagagataagctgcaccagtaacagtgagtctgcaaagaaagattttgacaatggtgttaaagcttatatgtttgctcctgatgggcacactccagcaactgaactttcagttaagttgaatgcttctccgcctaataatggaactgaaacaactcggcgaaattggtcaattccatttctccttgtccctgccagtggttcaacaaatgttactattcctcagtcatctacctctggtgccttcttagttgcagtggcatctatacctgtttcaacagaactttttgggaggacaagggctattactttcaggccaagaggaattaaggttttggaagttttggccagggctcaaagatgtcttatctccttgcccttgtgccactcggtatctaatgttttgtcccaagcaaattatgttagattactcaaaggacacagagagttgctggtctctgttcggtttgatggcccaggatggcaatggtcaggaagttttttccctgatcacctgggagatgctcaattgaaaatgcgcaatagtgcctcaggtttatcatatatggttcgagttgaagtgcaaaatgccgatctagacatatacaacaagagattttctggaaaaaataatgtcaatactggtacagtactgattctgctttctgatgacaagactggttttgtaccttacaggatcgacaatttttcaatggagaaactgcggatatatcaacagagatgtgaatctattgaaacaatcgtttatccctacacatcctgtcaatatgcttgggatgagccttgctatcctcatcgccttactgttgagattcctggagaacgaagtttgggtacattcaatctggacattctcaacgacgatgttcatgtgtcactaccatccacatctgagaaagctgaaaggcaattctgcatctcaatacatgcagaaggagcaattaaggtgctaagtgttcttgattcaaattaccacaatacggaaacaaaagaaaagaattttctgggatcaaaggaacctaaagttgctgatcacaaactggagcttgatatgaattttgctgaagttatcaaaatacagttaccattcatagggatatctttaataagttcttctccacaggaattgttgtttgcttctgccaaggagatgacagttgttgccatgcagagtttagatcagcagagatttacagttcaaatacaatctatgcaaatcgataatcagttccctgatagcccacaccctgtcatgttatcatttgagggcagtcataagggaaaatccatgaacttttttaagagtaaagatactaagctgaaatcagcaaatgacattctttccaataccacagagcctgtgctgcagtttactgcagctaaatggagaaccagagatgtatcatttgtttcctaccaatatataaacataagtgtagcacctgttcgccttgaacttgaagaacgacttgtcttgagcatgattgaattttttagatctgtttcctctagaataaatattggacgcttcgagaaaagtcttgagctaagtattttaggtggtgctacggacatgttaagagaatatgaaaaaatctcaaagaatattacagacaagctcctggtgcaagacagtgaattgttgccttctgttgtcccagttggtgctccatggcaacagatacaccttttagccagaaagcagaaaaaggtgtacattgaattgtttcagttgactcctgtcaagttgactttcagttttacgagcacaccttggctcaataggactgaaggtggttcagaccccagcataggtttcaacaacactactgcaatccagagaggtcttatggccctcttagatgttgaaggagtaccagtttatcttggagaaattactgcagaaaatcttatggccagctggcaatctgttcaggacattcttgtgaggcattatagcaggcaaatcctccatgaactttataaggttttgggttctgctggcgttataggcaatcctatgggttttgctaggaatgttgggtttggtttaaaggacttcatatctgcttcaagaaaagggaaattgcagagcccagttgaactattaaacggtatagcacaaggttcaaaaactcttattggaagtacggtttatgcagtcagcagcgccacttctcacttcagtaaaactgcttataagggccttgttgcttttacatatgatgagcaagcagcttcgaagatggaagaacgggaaagacagctaggtttgcatggggaaggagtactgaatggttttctagagggtctgactgggctccttcagtcaccgattaggggagctgagaaacatggtcttcctggggtcatctcaggtttagcaatggggacagctgggcttgtggcacggcctatggccagcattcttgaagccacaggcagaactgcccagagcataagaaaccgaagcaaccctcatgaatccaactacttgcgagtccgtttccccaggcctgttgccagagatcaccctttgttcccgtactcctgggaagaagccatcggtgtatcattgcttgcccaagctgagagtggtagactaaaggaggagacatttgtcatgtgcaagacactcaagggggctgggaagttccttgtgctaactgagaagctgcttctactagtctcaagcccatatttagtggatctaggatcacctcagtttgtcggtgttcctcctgacccacagtggtcaatcgacacagagatgcacctcaagagcgttgttcatctggacaggtctcaggaggtagtgaacattgttgggagcaatggacagacttcacctagggacaaaagaagtggcacgaggaacagggtcatgagctcggcctttgtccccctgtttcacctcagcatcgagctcccaaacgatgaggacgcagaagggacggtgcaggtcctacaggcactcatcgagaaggggaaggcaaggaggtgggacaagaacatcctacaccgaagcaacatcagttga

(The sequence listing continues in the following parts.)
